United States Patent Application Publication US 2021/0254056 A1 - sequence listing, part 25

SEQ ID NO: 50154 - DNA, 6367 bp, Homo sapiens
aaagacaagtagaagaagatgaatttgaaagacgacttgtcatttatatggacttgttgtattttttttccaaccattttttcaatattttgttgcttgccttaagggatgggcagatatggactctgtccagtggaaagtcacctctaggtttttacacatttttgaaaggcgagtggagaacagcggtggcctgaaagctcttaaaactagtgctctgggtcggggcggtggctcacgcctttaatcccagcactttgggaggtcgaggtgggcgggatcacctgacgtcaggagtttgagaccagcctgggcaacgtggtaaaaccccgtctctactgaaaatacaaaaaaattagccaggcgtggtggtgagcgcctgtaatctcagctactccggaggctgaggcaggagaatcgcttgaatccgggaggcagaggttgctgtgatctgagatcgtgcccttgcactccagcctggtgacagagggaaactccgtctcaaaaaacaaacaaatagctagtgctctgactctggtccaactctttttcccttttgagttgattcagtgacagcacaagcattagtatccagtatccaaccatctgaaaaaaattggaggattttagcttgtcttcgctaaaatagtttggggaataatagagtcacaaattagaactagtaagaatccattccttcagtcttgctagttgaagtaaatcccttatttgtggacatgagatttactttaggttgtatttggcaagtgtgggagtacagggtgtggaatttattcagctacaaaagtcccttaaaattccccgcaatttcataaacccttaagagttcagacatgcaagaatgtttgtgaaatctttggaagatgacaacctaggctactctctctgctgaaaatgactaagttggattttctgcttcattcctaaggaggaaacttgacggctgaaagtgaaaagtgatggcaataaaccagggagcgtgaaatagaaggtgggtgcaaattttactcaactgggaaaaagatgctaattcaaccccgggcagcaagagaaaatgcaaatgaagatgaagtcaaaagagcttaacctgtttcaaatatttcatttctaaaaattcgattctattttctcttgtctcatagtctgtcttaagagactcatactaaatccgtgggcatcctattctttcctcatctaaacacatttttaaaggtgagaaataaccaaagttatgaggcaggattcagggttaatcaataatttcaaacacgaaatggaatatgttaagtcaagaactagtgtgtaaagatattcagcaatcttgttagaaagttgtttgaaagaatttgctctttttttgcttagagatgaagttgttgttcttattcacacacatgaacacagcacgttcttgcttcaggaagtgcgccggcgggcagattggataaattcaaagatcggtattctgacaaaattggcagtttccaaattccagataaatttgtttatcccaaatcattgtgttgtaacttaatcacaaattaaacagatttaaacacagagcctttaagtaaaaatatgtggggaaataattgcttaagtttaaaaataggaatctctatttttttattttttctttctttattttaatcaatgttgaccaggttggcctcgaacgtgtagcctcgcctcctcgagtgccagggcaaccgccctgagccaccgcgactcccaggaatctctattttttttaaaccaggtgaaaaatgttagaccagattactcacccttaaaaattagacaaagtatctgagtcatcgctcccttgaacaacgcctcctagccgtgggattgaggaggaatctggtgttaaaagtccacacgcatcatttcccttaatgttattaatgataatttgcataaggaatctttttttgactgtaaaaataagtttactttgacagtctctattacttaagacatttggtctatcagataatatcttcgtaatcatagtgctgtttaaactttcagtttttttgttcgtttgcttttgtttttgagacggaatctcactctgtcgcccaggctggactgtagtggcactatctcggctcactgcaacctccgcctcctgggctcaagcgattctcctgcctcaacctcccgagtagctggggttacaggcgcccgccgccgcgcccggctaatttttgtatttttagtagagacggagtttcaccctgttggccagactggtctcgaactcctgacctcaggtgatcggcgcgcctcggcgtcccaaagtgctgggattacaggcgtgagccaccacccccagcctacactttcactttttgatgaaatccatggatggcttcctgagatacattgagattttgtgtgtgtgctatcttctggaatgaagccccacaccgtttattagatgatcttggggatatatgtcttgaagggaagaatgatttagaatatcacattaaaattgtatatgtactgtgaggcagcaatacaaatctggcactttgccaaagttattactagtaggtgggttaaagggacgtttactccaatactatgcaaagtaaagtggacctttctgtcaaacaaaaatagtaataggccgggcatggtggctcaagcctgtaattctcagcctggtggctcaagcctgtagttgtcagcactttgggaggctgaggcgggaggatagcttgagcccaggaggtcgaggctgcagtgagccacgattgtgtcactgccctccagcctgggcgacagagtgagaccctgtctctaaagacaaaccacacacacatatacacacacacactgacacacacttattgttcaattcagtgcgtgttttgcttcgttttggatgaaaattaacaggctttcacattgtgacttaatcttatcagagactcctaaagtaaacaatagcgcagtaggagaaaccctgattgtgtaacttctgctcttgctcccctggaaataatgtcatttcctataaacccacccccaaacaatcgtgactacgtattcataccactggagtcttccaaaatagcaactgcacattatttatcaacgtttagtttgcatttgacaaagcacatccacctgggcttccatttatcattgctattattatattttattattattttcttatttccaaaatctttgtagaatggaaagtaaacggggggaccaaaaccccacttagaactctgcttagaagattcggaaatgcccttgaggtttggtcctcccaggagagcacgaagtttatcctcgcgcgcagcctctcttccccggcccgcgcccaccggcctagcccggggctagcgcccgcccacgtgtgctcggctccaggcaaaccccgctgagcagcggccgcacaccgcccaccccggggattggtcagcgcggccggggcccggcgggaggcgggctcggggtcgcgttccgggagcgcggaggaggcggtgccgcccggccccgcgccccgcccccgccccgggtggctacacagaggggcgcccacgtgcccagccctccttctgcagcgcggccggcgggcgctcctcttcgcgggaccagcgaggcggcggccgctgctccagcgtcccccagccgcgggcccccgacgcgctgcagccggcagcccaccgccgccttcttggcgcgaccccaacccagccccagtaagttgctaggtctccagccccgccgagaggccgcgggcgaggggcagcccggacgctggggccggcggggaaggagcggggcgagggcgccctggggccggcggggaactagagggtcgagggctcccggggacgagtccagctgcgcgcagctgccctgaggccgcgctccagcgagtcttcgtcagggagtcggggccgtgggctggggctgaagccgtggaccttcgtcctcggggctgcgccccggaatgcgcctcgcctcgtccggtccctgtgcagccggctctgcccggggacttcggggaccgctggaactgggagaggggctggcacggcgacttcgcggggacccttcagtcactatttccagaggagctcggcgcacccctctccgggtgggcaggctgaacctcctggccctgcacgctgccggggtccccgaagccgccttcgctccttttcggttcttggcttaaattagaaagccggcttggagcgctggaagccccttcacattctgcaggggacctggtaaaatagcccgtcttggtgtttgtattgggtattttaaagtaactgggtgccttttaaaatccgtttgagatgggctgtattttataagcccgtttcatgaaacgctgttcttgaggcttagagaatctcccaacccatcaccccagagtacctgtccgttcagaaagtaccttttcatcctcttttgacgcttacatccagtctatggagtaaggtattgagagattgtcatcttcaactcgtcgaaaagaaatatgctcagcaaaagccacaatcatatgtggcttttgaagtggatatagtgcctggatttcaagagaaaaagtactcagcctcttcagagttgtaaatatttgtgcaaaactggctaaagcctttaggtgactaattttggaccagtaataagatttatctagacgtttgtgcagaaacactaatccttttaatgagaggatatcgtcagatcttattcaaataagagctctctgaatcccatccagggccgcctgggttataaaattagaatgtatgtggccttgacttgatactttttcattcttgcctgagctagtctttaaaagttaataattatctcctccggaaggtgaaacattctgtgtttgtaatctttctctaggagatgtataagatgtgaatattctgtattatgtaccttgttaggattgctttgtaattagtaaatccttttttattttaattgcactgaagcgtgacatgaaatgatctctcagtgcagaacacaggacttcttccctctccttttcctacaaagttgctagttgcctgctctgggaggccactttattgtgatttttcaagtttcttccctcggcccacactttgtttacattctgtgccttcatctgggaatggtcatttaccttaaggcattttaatcttttagggtgtgccatggccttggagaccagagtaaagcgctgtggtatctgcggggatcagtttgcagaatccttggcctcctaagcagtgggcatagctcttttcattccagaatctctgatcattccagagtctctcctgtcactgggcttaggagcctgggaaggcgaatagaagctagctggggagacaggggagctgtggcagtttaaaaagcctgatcttgcgctggagtttttcatcttgcattctcatgtatctttgccttttgaacacatgtgcctgaagaattttaaagttcacgtttcttgctttgcactgcaagcacactcacctttgcagagtggaagtgccttgtccccattctaggtggtctaccttctgttctcttttcagacctcctggcttaagcccttgtttctcctggctgttatggccagacccggagtccccgttgtgcccatttcttctcttttcagtccttccttttcaaatgttttttcccagaagtcctctggcaacttctctatttcacctagcctctgtcttctcttgttttatttttccctctctccctccctctctatccctctttccccctctttccctccttctccctcctttctctcttcctctctctctgtctctctctctctctccccctctctccctcatttctctctccctctctctgtccctcttccctccattctctctccccccttctctctctgtgtgttcagagccatctgctggttttactttggtgccctttggtggacaactttcagaacagaatcttgggagcaccttcatgttgctgtttgctttatttcccccaaacatgtagatatgaacacactgattttaaagactcttatagactacctactagatgccaaacatttagaacaaaagcaaaagctttcagtggaatatatttctaaatactcacatatttagttttgggtgcatcatttgaatgctttgtcatccaaatgaatcctgaaaaacttagttaactaagatttcacttaagtgatagcacttgtctaaatgggcttgaaaatcgaagctgttaattaatttctaaaactttaatctggatattaaaaaccatatagatacaaccttgaatgacaacagaaaactaa

SEQ ID NO: 50155 - DNA, 451 bp, Homo sapiens
gtttctggcacggtgctagacgaatatggaagagaagtaagtgcctcagaatgacattttagaacgctctttttataggttaagagactgagatcttgagaggtgtaactcatctgaggttagacagctagggatacagtgaagactggagtccaagcatattgaaaagtcagaccattctgtttttgtgaaaacaaataataattactagaatgcactacttctgtggaatttttttttttgagacagactcttgctttgttgcctgtctggagtgcagtggcgcaatctcggctcatgtgaggttagacagctaggggtagagtgaagactagagtccaagcatgttgaaaaatcagaccattctgtttttgtgaaaacaaataataattactagaatgcactacttatttgtggaatttttttttttttttttgaggcagactctcac

SEQ ID NO: 50156 - DNA, 2109 bp, Homo sapiens
aacttatgtatttatgtacatagttgtgacttccgcatctaatcctgattttttttttttagcttgtttgtagcagggattaacatacagagccagtgtgcaatcaggagcaagttcttagcatacttgatgaatttccctgtgctcacttgctgcttatagtgatagcactttaacttttggaagtggagaaattaccaaaaatttttgactggggcaagggtcagggatgactcagagctcagctctctccctgcatctagacagagttgtaatctaacacagaaccatttttccacatattccccccattctctacatcacatcctatctattaaaaggatcctttcagcccaccagattagtttgccttgacttcttaagttgaataatgggtttctttctgggtgtcttagagatgctgggctcttcttctccctcattagaaggcctatcttcattatgagtattcctctacttgaagaaaatagagtatttagaagtcttatttttaaaaaaggggataaccgtgatcagatggatatgctaatttgcttgcctgtcataaccatttcactatgtatattaaaacatcatgatgtagaccttaaatatatgcaataagaaacaagctctagaatctgaaacaagaaagtggccaaaaatcacagtggcaattattagtatttgtcccattttctttttatttctcaacaagttatctttgcattcacagcaagatgtcctagaaaaaggacactatacagatacgggtttgggtgtatgaacagtaggagtggcgagtcctgagggaggtgcaggtgataatccgggaggatttgtttgctagggttttaatttgacaatgaactggttacttttaaattatcatggtagaatcctacatgcctcaacagtgattggctgtgtatgagtttgcactcagggtacattaagcaactggatggtgctagagaggtagatgatgaaatactgttctgttgcttgcaaaccagcacattcctgcaagcgggatttgctgaaaccttccagtgaaggattcttaaacaaacttggtctttggtgatgtaagatacatgaaatagggaggctgagtactgagagtttgggaagttcaaaaaatttacacaagctttactttttggtagtattcatagaatgtttgtcttttttcatgatggggaagtaatttgcatataccttagaacattccctcatgactagctagtggactcaatctctataccctagatttttaaaaagcagatttctaaatacccagagaaaatatgaagataattctatggactgtaaccctaaaaggtgatgctttttggcaagaagaaaagacaaatacaatcaaaatcctagtctgataacgaatgctctgagttaggaacaagaggggaggataccagaaggtttcattgtagctgccatgggaattcatttgagggattcagatttaaaaggtggaagaataaagtaaaaagtatgggtttgtgaaaaatggcaaagaaatggttgattggaagcttgtaaaataggaaggcgaacaagaaaggagaggcctggtatggtggcagcagatgacagggaagcagagctcctaaatctctattttgcttttgtctttacacaaagaagggccacctgactaggaggacaggacgcatgatggaaaaggacctgaagcccgagttggtgagagagaacctcactgttaaaactagttcacaatttcaggtctggatgaattacatctcatgatgttggaggaatttttagatgtgtgtgtgtggagtgagtagagatcatcttggaggtgccctgaagtatgaggaagagagaagaagaaaggaaagaggtagtcacctttattttcaaactggaagccaatgtagatgctggaaaccatggatcagggagctgaagaccatccatcagaaaaatttcagcagcgtgtggtatctagttggaagagaagtagctgatctccagaaagcatcatgagttcactaagaacacgttatgcctaacgaactgcatgccctctttctccacgattattacactggcgaatttgga

SEQ ID NO: 50157 - DNA, 1423 bp, Homo sapiens
tcagaggagcgaggatgtggcctgtgtgccgcctaatcatgcctagaactgtctgcacctgctgatcttttgcttctgcgaactggctgcacctgctgttctcctgctcataccctagcccgtgcttaccctaattccctgttctcctgcctcaccaccagaggcccgggttgtctgcacagtctcattttccacgttattcctgtaatgaacccgtcctcccacccccaccagcagttacagggctgggtgcggagaccaactctggccagacacagaggagcagcaagaacccggggcaacggtcctgtgagtgagtgcatgtgggggagagaaatggaatgaacagaaataatttaggaagcactttttacagagcactcaggttctgcctgaggaggtggggcgggcgctggtaacatttggacaatcgtggttaaaagtgaccccatcagcacccgctgatccttcttgaacttgataaccttggtgaaaacgccaagcgttggagaaattcaaggaatggctgttgtaatgtacatttcacgcttagcctttcctccccgcgctgggaagaagtgctgcgcaccgcggctccgccagggggcaggagaagtcacattacacagagaactaaaaaaaaaaaaaattccccaactttttcccccaaaccttgttcctcctgaagaaaccgaatcctcccgcttcggcgtcccaggagcccgcccctcgcccgccgcctcccctgcgtccccgccccgcgcagccgccgcgctcctgcgctccgaggtccgaggttcccgagatgaaggtctggctgctgcttggtcttctgctggtgcacgaagcgctggaggatggtgagtgactctgggcgcggggccacctagcttgtgccctgactttagccgggacccgaagcccccgccgccctcctgccagctcttggtctaacgttcggccctcggtggctcagcccccgcgccactgcctgcccggtgcacctgccccctcctggtggggtctcctttcctcccactctttgcctgcccggagagccctctaggggtggtggcagctaccccgacccttaggagcccaccaggacctctccaagtccccatctccgggcgaaccaagcatccccagccagcgcctggtccagcccccagtgtcaacgtgtcggtctgggaggtggggcgggagcctcggatcgcttccacctcccagcggcgtggctgggacctctgctgctgagagcgagtgccacctaagctcggcaatcgctgattcggttgcagagttccaggtgacctccccctcccctcgcagttctgggcgtgttttcgtctaccaccttttgcttgaatcctgcaagatctgcctagatcttcgaacaaaaatgtcagtgtatgaaacttca

SEQ ID NO: 50158 - DNA, 534 bp, Homo sapiens
gtgccttcctgctcaaagactttgcttggattgcctttgggagttcatcctgatttgcccctggtctctgcctttcagaccacatcctactgtccaaagcactcctctctctccatcccactgcctagatcccagatgagatctggtgtctcagttacattggagcagaggtcagaaagcaccagctcacccttccctgtaacagcactgttgtttgtgaacttgacttcatagctgggaaaaggtagggggttgggggccctgtgagtcaaccaacattgatacaagtgaatcaatgttgaacgtgccctcatgcgtttatttacccaggtggctcgtgcattggcacaatatatcacatcagctggtaggcatcctggggaaggaggcagagggaggcactgtcccatacaagagccggaggggtgaccagagcgagtgtgtcacagccttcagttcagtgttggtctgctgaggagaatgcacgctaaatagcattaacgtttgcttaatgtatatataaaggcagtctac

SEQ ID NO: 50159 - DNA, 1129 bp, Homo sapiens
aagaactatattcactttgaagtcctttagtttgcatatttgtttccctgagatcatcatgcatattttttctttcttttttaaagaaacataaacagtgacagtttcagtatgttttacccagctgtctgtttcccaggatctgtactctgttcatatggcacgtttcctgcatatcattcagccattcttctctgacacgttctgagacggagacttacaggaaatacaggccctgtgtaaacacttgaaacacagacaagcaaatacccacgagtctttatcgctcttgattcttggcacagttccttgcatgtggtagaggcctaacagtttttcacatgaatgtagaataaggaggatatttatgttttaattttgtaaacttgtttagagacaaggtctccctctgttgcccaggctggagtgtagtggcacaatcctaggtcactgcagcctccagctcccaggctcaagtgatcatcccacctcagcctcccaagtagctgggactataggctggcatcgtgacatccagctaatttttaacatttttgtagagatgggggtctctctttttccaacagaggcagcacagagcgttcaaagcagaaaatctttgtttatctacctgaggcaccctgggaaagttgtttgaactgagcttcaaattcttctctggcagctccaacacttcctgtgtagccttgggaaagttacctaacctctccagcctgtttgttcacctgccacgtggggttaataatagcacttatctctcagggcttcatgaggatcaaatgagtcaaaatgggtaaagggcttacagcattgcttagcacatattaaacactgcttaagtttcagttattgttataagtctcatcattgccatctcacgggattgagaaaaagtaaagtgtctcttccgtattgccagttatgaagtcgatgcttaataactgatgggtgtcccattcttgtttcctttaattaattaccggatggtttagtgttgacttaatagaaaacagtgtaccgtttctactatggaatttaaaattctgagctcatttaactggatctctcatatttttgtttgtgatttgggagtgtgtgtgtgtgcata

SEQ ID NO: 50160 - DNA, 2120 bp, Homo sapiens
taatgctgctatgaacaccgggggacaaatacatgcccgagtccctgctttcaattctttggtgtatatacccagaaggaattgctgactcatatggcaattctattattaattatttgaaggactatggtactcttttccatagtggttgaaccattctacattcccatcagcagtactacacacaagggttccaatttctccacatgctcaccagaacctatttgattttttcaaatatatgtaacagccatcctaatgagtacatcactgtggttatgatttggtcagtagattttcaaattaagccatatgatagaaataaaattgaggcatcaaggatgaaaatcctatcccagcatgagcaatgatgggcgacagaacggtgagccttggtgattaagaaactcacaaagcagagaagatagaacccaaaaagacagacggaggccagattacaggggccatcgcacgcaactcaagcctttgggactgaatattaaaagtttcttttctcctttaaaagaatttagtgaaagatagtgatggtcttgactgctggagaacattctctgcacattcacttttccttctattacactagtaaccacagaagaaaaaatgactcaagaagtccaatgttagtcaaacgagtaaacactgcattagcttctgccaagtaactttccgactctgaaggctcctcgtgtgaatctcgtattagaactttctatgaaaacctacaacagaaacatactttgcaagccgttggtgaaggtatcaaatagcttctagtcagagaaattctagtttcacgcaggcttttcacttgcttctcttaaaatttccggtatttccaaagttaaaaaataaaaaagcaggaacaagatctgaacccatctggaagctcatatctgggacagaaacatctaagtgaactcagggactcagcaataaacaagagactgcctccaagccctgggctagaagagcttcgaagctgacgttaatagcagactaccctggctgattttaacacatctgtttatgataaaaatactgtcgctttgaatatgtaattgtggcacatcagcctttaaaaccaaataggatacacagaagtcctttcctattagccatgggacagggctgtttccctctattcaccaaaaaaaaaaaaggcagctctgacgttttgataagtgaggtgaagagaggacacatgggaagaaacgggaaagagaaagggagaaaatgggtcagatgggggaacaggaggttcactgctgttattgtaatagtccaaagcagcaggcccagccccagacagtgacatcagcctgcagctgtgcacagacctttgctctgtttactggcccggtgtgctgctggggaacagctgggctgcagtaatcgctcacactaatggctttcgtttgaaggaagtggcctgggctgcgaaggaaacatttatttggcataaagactcatgaagtattttttaaaggatgcacatgtaaacgctgtattaaaggttctcagagtgctcctcggcagctgtgacataaacgtgtgtgtgtggcggtggggggcgtgcataaccccgattttaggccatggactttcctgtgcactgactacagcttaggagagatttatggtgccacctgtgtgtgctctcactcctatcctcagcctagtctcttcttgctcattctccagaattccactcactttcaattaatcagacaccccacaaagccaaaaccaaacataaaattgtttcgaatttgcaacaagcaagcatggacatgcgaatgtttgaaagaaggtattagacaaacacaaagtcaaagtagtctttttgtccctattttttttttttttttttttttttgagatagagtctcgcactgtcacctgggctagaatgcagtggcacgatctcggctcactgcaacctccacctcccgggttcatgcgattctcttgccacagcctcccgagtagctgggactacaggtgcacaccaccacacttggctaattttttgttttttagtagagatggggtttcactatgtgggtaagactggtctcgaacttctggcctcatgatcc

SEQ ID NO: 50161 - DNA, 761 bp, Homo sapiens
ctattttttaaaaaagcacatatatgattaggaacaccaacagaccaccatctgtaggagaactgctgggcaacttttgtatacatgtttgtaaaccatgaaagctatctccagcaatctagcttaaaagaggaaatacagttctcaggatttaaggaaaaagagaaaaaaaaaaaaagaaaaaggaagaaaggaggaagggagggaaggggaggaaggagaagaaggaaaggaaggcaaactcatgtacaaaaacatctctaaaatgtaaggccacattgagattagaagtcagtattttcactctgcaatgaatcacccaagaagaattctaggccagtgaccctccctgacagtttaaatcatggatatctcagcaagaaaaaaaaatcgtaatcagtgaaatgctttaagttttgcttttcaagtaattatcaagatgatatgtggaaaatgcccagtgccacagtcaaacataatctctggaaaacagagctggagtcctcccaggtccttcattacttagccctgcagaactggagtggagccattacttaattagtcctcatggctttttctcagaggggaaggtcagacttttattatttccatctcacagagactcatttccctttgttgattgataaatgtactgtttacagagaaaagcattacacagccatggcccgacattgttaatattcttttgaaatgatacagtgctttcctagtttttatatctgagtagcatggttcattat

SEQ ID NO: 50162 - DNA, 596 bp, Homo sapiens
agaactccagcctctttgagagcctaaccacagaacacccagcgggatctgactggctatttttcccagcctgagatgtagaagacaaagttaattcacacgtaccatggatgcctcagggtagtagggcttaattctcttgtggaagcactgctgaaaagattccaagataaggcaggtaaaaaaatgacctttccccccctatactgggtagtgctgacaaagtgtgactcacaggtgggaagacaattccacccagccagcctgtcttccatctccatcttggtgcctaggtaccagccgggcctcccctaaggttctagcctctccctgccagtgttcctcctcccacccttgaagagaagcctgcaaaggccatttgctgtttttcagctcattcactggccagcatgctgcagaacagatgcttttttttttttttttttttttttaaatcacaacagcaaacactccgtgtataaacgaacacatttaggaataaaagtgggttggaggcgagagcacagctgaatatctgacaatatgttctaagattcaggcctgagaaaaagtgaggctgactttaaaggaatcct

SEQ ID NO: 50163 - DNA, 602 bp, Homo sapiens
ttcagccaagttgccttcatggacagcatcctttcaacttcatactcactactcacaaaccaacccttggaagtacaacggatttactgtttatcaagaggggaaactttcactattctcatatgaaaagtgcttcagaaaaaaaaatgacaacattatttaacaggaattcacacaattacaaaaataactctgtccctctcttcagcaagagaaatattttgctcatcagaagttctgctaggcttagtcagatcagtgccaggaattctgtgaactgaaggtcaagctgccaagattcaaaagaaatgtcgatagtaagtgtttgcccagatactagacagggagtgccaacagctcccagcatgcaactccagccacaacgcagacaggacaaccacattttccagtgttccccttgtcccataaaatttaacaacaacaacaaaaagctcttacctagctctccccggaggttaacaagttcttgagatagggttttgtgttgtttcagtgcttcctcccgctgcggaaaacacacatcaagttactcatgctttcaagagggtccctttcagtaaggtacacatttgttatcacta

SEQ ID NO: 50164 - DNA, 1127 bp, Homo sapiens
taccattttctaaggattatgatattttggatcagtgataattctaaatcgatgttagagaaacaaaccaaagaaaaccggatggctgtttttagtatcagagaagcaagtatcaaccttgagctgaagaataatgttcaagttaccagcaactcccggcaatcacacatacacacatacttacacaaatacagtaattacatacagttccttaaaaggtagattccctagcaccagggagtaactaaaaaaaaaatgaagaatttcaaagctcgctgaaaaatgccctcacgaggatcacccaagacggagctcccaccacatcctgatcacagcgttgcagagatcatgagacccggcctttgcaggcaagagttgcttgtcattcaaagcattttccctgaattccagacagcctctgcagtagtcctgacattcttccagaaaagcactataaacaaatactaattacccttgttgctgcacatggagaatagaggcacagtttgctgctggggcagcccattttccagcttctgtctccaagtccccccacccctcgcactgtgcaagaagcatacaggtggccgcgccacccaccagtcgggtctgtctacattcaaagctctagcaggaggcgcgccattggccctcgggcgtcttacttcatgtcctgcaggttaccgtgtgcctcggattcctcactcacagaagctgatactgcagcttctgcctttggcacaggcagcctgtgattacttaaagccacagcctttcatttatgaaaaacgagaggcaggcattagactgatcgattgccatttagttaaatatcagctgcaacggaggaaagaaaaaactgaccccctctgcatggataatggagttatttttagacttgtgagcctttttcttcccctctctaattgtggtcattatttgatcacacttactaatagaaaagggaaacttgttcttcgaagcccatatactaaatgaggttatgaactaggtgaagagcaaggaaaggggcatgctgtcgtttacaaatttaaatgacattatgaaatgagaggtgtttcaaaataagtctgaagtgctgatctgagagttggagatcccatata

SEQ ID NO: 50165 - DNA, 2504 bp, Homo sapiens
gcaccaaaaattggttcttacttttcacaaatcctctccactaattatcatttaagatatcatttactatatgaaattatatactttacatactataaattatacactacaaattaagagacctttatgctagcattagtttacctttgtttaaataaaaaagcttaattgtcactttagaggcattttaagactggttgacactgggtgccgatttagtgaatttttgtcaccaagttcaagtttgctacagctgtcaaagatcataaaactgaaagcatacggtattagcaaaaacaagtcttatcagtatccatgcaattttaaaaagaacagaaacttggcaactaatgggtaattaaatgtctgcagaccatcacatgtgagtacacccagtacacaagtaatcatcatccttaatgagaatgagaaaatgtttaattcccactcatgccaaaggccacatacaagtctccttcctccatgagatctcctcctactactcaacatggctatcttttttcaagtttaataggcaaacctctctcagcacttgactggaataactgttgcaccatttgggagttatttttcttttagacatttgcagatcttatctgaaggtgactaagagcccagagttaagtatttgtgaggcaatctatgcgaactctgaacttacctagttggcttatatgaaatttgtagaacgcatggcaggagcctgtgtaagaaagtattgtcctggttttctggtggtttgttgttgttgtggggtctgagaatgtacagccaacccctcttttataacagagaattgattttgatacatattttaaaatatgatagtgcagagttaatggatgttaaaattttattttcttgttttggtaggtagattgaattgagaatcatataatcagtatatctgagaattgtatgaccagtatattttaaaatatgatctttcttttaatcatattttaaagtatgatagtgcagagttaatggatgttaaaattttattttcttcttttagtaggtagactgaattgacaatcatatgatcagtatatttgagaattatatgaccagtatataataagactggcacaaccatttgccatcttttcctgttatcatcacatagtgtgggtggggagaatgaatggaaatcactccagaataatgacaaatggtttttaaaactctatgctgaatacattccagctgataatgaccgacttttcttttttcactttggtgatatcatcctcagggtaaaaaaaaaaaaaaaaaaaaaaaaggcatttataaaaaacagtttcataaatcttttagttataaacaggaaagttttatattatgtgtcatttcatttctagactgttgatgatgatgataaggaatttggggccaattttgatatatgaatgtattgtttttccatgtggtgattaaagcttccattagcagtttaaaaaaaaagagtgagaggaggtaaaaggggctgggtacagtggctcatagctgtaatcccaaaacattaggagtccaaggcaggaggattgcttgaggcctggagtttgagactagcctgggcaacacagcaaaaccccatctctttaaaaaaaaaaaaaaatcaaccaggcatgggggtgcacacctatggtcccagctactctgaaggctgagggcaggaggactgcctgagcccaggatttcgaggttacagtgagccatgatcacgctactgcactccagcctgggtgatagagcaagaccctgtctcttaaaaaaaaaaaaaaaaaacggtgtgaaagagactgaagtgcagcaagatgctccaagtttgggggttggggaacatgaagataaagagccaacggtttggtcagctcaagagtttggcttctactctgagagcaatgggagtctgccaaaggagttatgatggagactgatgcttcgaattggctaaaggtggaagatgtcctagtgaggagagactagacgcacgaaactgctagggcagatgggaactcctggcagtggcagcacgaggcaaaggagaggacaagccagacacgcttaaaaggccactgctgtgtcctctgccctgagcagcagagaggctggcacacaatatgtgcccaatacaggtctgttgaattaaacattattttaaaagactacttcacttacattaatatttaaagaaggaagccacagcagatagtatcagagagctgtataaataatgtatcacattctagagagatacacgaaggatttacgctttgagtataaactaggagagttttataatgttctctcttctctttcttcaaataaactaatatgtgagctcaggatattaattcaggattttccagggtcttgaaggtcttttactcaatccaaaataaataaaagagaggttcaaaacatgaataagagatctgggttaaaatgaataatttattaagcatagagacagatac

SEQ ID NO: 50166 - DNA, 1068 bp, Homo sapiens
ctctacaagtgaggtgaaatgaggatgtgtgaggcagttgggttataaagaaataaagttccatttggggtcacaatgtgaatgtgtaagtgtcccacctgcttccgtagttgagagactggctggggctggaagaaatggatccacccgagcggtatgaaggagctgggtttcatatgtgatattaagagttaaggtgctacgttaacaaccaacatttaacactgcaggggtagcgctttatcacaagagactttcgctcaggccacagtacatcagttcttcggatcccttatgaactcttccacctcaaaccagcatatactgttttgtatcacagctatacatttcagaaagaaaataaaagttgaatttttaaaaaagactctttcctagtacacttgacaagcattgtggagtgaggctgacctcattgctgaaaagcgatcggaagcttcaggacatcataagggctggtgagagaaagcgctgtgtaaacacagtgtttggcaaatccaaggactgccaaggaggggccaccgctccctgacaccctgtcaattccactgctccacgccaggccagcacagtttgtgaggccaggatgaggaacaggccacagcctccagcatgggtaaagataacgacatcagtgcacagctcttcaaagtccacagtgttcccacagtcatcctcccagtagacagtcccatgtgacagacaggtcacatgacagtcacattcccccatccctcctcctctgagatgctaaacctgatgtttccagaagttgagtaccttgctcaaaacacagagttaataaatagcagcaatggacattaaactctactccaatgtgtaatcttgatctatttccaccttccttctcacaataacgaaatcacctaaacacctggtaggtctgcacagctatggaccttatagccacctgatatgagaagcatacgtttatcaaggagctcctaaactgactcaggaactgggttacctgttacaagccaaaaatattcttcgcctcattttcctcatggacaaaaactgattcaa

SEQ ID NO: 50167 - DNA, 1582 bp, Homo sapiens
tagtgaacagcagtgtgtattctgagacatattcatgaattcttattggaatctacagattttttccgcattctttttctgtaatctgcttgccaactaatccttcctacccaacagaaacccttaaatgttgacgatagctactagttaccgtttctgtctctttactcagaatttcatgttttactgttacatcctgaacatattcatctagaaccttccactgaagtaggtctctgtccacaacccagtagggtacgacagccacagactaaaccaccaccttgaaaagcaggctaggaaggatcatgtgccagctgcctgcagtcctaactcagccgacttctgagaatctcaactatatttctcaatctaagtcaacattccttcaacagtttattgaacaaaaataaaaagcacaattctaaatactcctcccagaggaaggaacaaaataaagcccttgctctcttagatatcacatcatattgtagatgattttcaaaattccatcagaaagtaacctttgtcatgaaaatcagtaaaaaagaacaagaggcaaaacagtaagtttcaggatagtactgggtccaaagtatttacttttatacaatgagctgtttgtatagaagtaaataattaaaagcaccatctacccccagggcttatcaaaggcactctcaaagactgtacagttatgctaaagaaatgatttgatgtacagactgtgcatgcttttagttgtctttttttttttttgagacggagtttcactcttattgcccaggctggaatgcaatggcacgatctcagctcaccacaacctccgcctcccaggttcaagcgattctcctgcctcagcctgaccagtagctaggattacaggaatgagccacctcacctggctacttttgtaattttagtagatacagggtttctccatttggtcaggctggtctccaactcccaatctcaggtgatctgcccgccttggcctcccaaagtgctgggattacaggtgtcagccactgcccccggccacttttagtttttaaattatatgcagttagtttttaaaaactacctaaaaggtagctcagactgtttgagggacgtgggggtagatcgcgtgggcagggcagagtttacagctgaaatataaaatctttaccccaaagtgttaaatgaccatgaacatttccttgtttagaaacttcagagttgtcctctctctccaaagtccacttggtgaaaaggaaataattttccatttgaatcacgccaacaccaaatggaaaatgtctttatgtgtgtgtagttacgcaagttggcacctcaccttatacctcccaacctttattaaacatcgacttcctgcacccttttcttgaaaatgattacctatgttaggctttctgctagcaagagttctttaacagaaggtgactgtatatacacatttaactcacagcagcagcccaacgatagccaacctccaaccagggcctatttatacagtcctaaccctatatattccttagaagacaatttggaaatagagaactgatgacttttagggcta

SEQ ID NO: 50168 - DNA, 945 bp, Homo sapiens
caatatccttctaccctatcctgacccaccagcaaggaggacttctgcaatcctcacttcaattaaagcctgttggcttagggtcacagtaataagcaaatatggttcaattctgtaatttgattaacaacgaaatgattaacagtatagcagtttacagtataataaaaaataagattttaacagtgcaaggtgacttaatcagaattctgggaaatatgactcaaccaccttgacacagaggtcaggggaagggggtaggtctatgtttcaatgtcatctcagaaactgctcatatctatgctggcttctattttcattccgtaaagctagccaagggagctatgttttacgaggacatgcagtttcaacttcgtatcattcatagctaacaatcatgcaaaaatctacaaaataaacattaaggaaaataaatttcttatttgtcactgaacactgctgaatacctcctatgaactgcttatctgaaataaggtgaagaaatattgattcttttcatccagattggtatatgtgtaaataacacctgagttaaatattaccatgtttccaatgtacaaaaagcataaaagataagctaactacccaacagtcaagacttaatgaacactgtcacaaacattatttacacaagaatgtatgttacgcctcttcttcctagtctcctgataagtatgagtctttcccaagattcccttttcaatgtcattttaggacacaaaatgtccttaaatgttttagttaacagtagaagatcagaataattatatttgattagtcctcaaatttaaatactaattttcttttcttctgcatcatgcttaagacacaatttacttataaggtacacatttatgcatttaaaagaataaggtcatttaatggtttaaaaacctcttccaatacatcttacctgaaagactg

SEQ ID NO: 50169 - DNA, 6430 bp, Homo sapiens
ttctacactgtaaagcactgtactaacaggacatcaccattttaagttgtgtatcatttcctgccctaaccatccctgaaaaagcaaactgtctacagaattgcaattccgtttatgcaattccttttaaagttgtccatgcactgttatcttgtatataccctccttaaagaggtcactggttcccaggaagcaatgactctcttttttaatcccctccctcctgcattgcctcccttcctcctgaaattcactggtaacacccctactcccaccctccagccccagcgctgtgatttagtgatgattgactttcgatcacctgcacctggcaaaacttgaaagcttccacgcaccgttttgcctaagactttggtttcattgaaacaaacaaaacacactggatttcctttcttagaacactgactacttcaaacaaacagtatttaacagagtatgtgtaactacgcaggctaaatgaattaacctcttccttcctagtcccaaattactccaagtcaaaaatcaacaaacaacttggtagaaaggagtacgtcttcaaaaaagaacaaaaacgttcctcagtgaacacctaagtccactaagcactatagagtagtcaataaggtcaccttaattaagatgagatttttctagagcgtgaaaaagtgcaaacaagctgcagaaagtagcgaggcgccacgaggggtctttgggacctgcagcaaccctattccacccgctttctcggccccgcttgcttctgctgagaaggggccctgcgagaaggctgggaccgccgggcccgggtgggcggcgtaaggagtccacagtcaagcccctcggtcactttcaaggtgacagcgacgagatccgcatccgtcccttccgcaggctctgcgctggcccacgtgagacccgcctccgctccgccggcgctgccgccccctttagccctcagcttcggcccccaggcccctggaacgccccctcccctccccgaggaccggtcccgtcaccctgggcggcgcgctcgcctgtcccctccccaccccggccgccgggcagcgggaacagattccagcgcgcacttacccgcagctccttcaagcgctccgggagcaaagacgcagaggcggggagggctggcgccctttgcaccactggcggggtcgccgagaacccgccccggaggtctcgggggcggcgtctgcacctgggggcgcgcggcgcggcaccaccccacgcctgcggcggctaccaggcgggacccggagccccggcctccccgcctccccgcctccggggccgccagggggtggagcagggcggggagttcgggaaacttgtaaatagccgaactcgggcctcccgccccaacccggggcggctccttccgaaggctccactccagcggctcgctgcgggagaccaaggccagccgccgtcccaggggacggccctcggggaacctgaatgacgtgcgaggccgtacctcggggcgctggactccgctcgggcgctcccgctctccgctcccgctctcgggtcccaatcccgacgctccgcgcgctcccggactaagtgcggacgcgccccacgccccccggcgccagcccgggacagcgctgcacctgttgccacgtgcgacgcggcgctcagcggctgccactgccgccggcgcacctggctgcaccgcgcgtcccgggaccacgctcgtccccgcaggagcccggggctccgccgcacccagcgctagggcccaggccgggccgcggtaggtgggggatctgactcctgcttgcctctggccacctgcaggccgaggggcctcgcaccgcggggcgtatagaaggtgggaaggttgcagaattatcagggcggaagcttgcaaggaaggagtcgtgattgtctcttagaagggctgattcgcagtctgtattatcttcatgcttctagcaagtttactagcaagtgtgtattaaaggttaaagaaagtagctttccagctattagagcttgagatacaacgtggaaaggagtctagaaccccagggagataaactaggctcgacctacttttctctaaacacaaacacagtccttgctgtttgctaaactgagcaaatttcatcgacagctgtcttctaggtccgtaaaatattttcttctataaagcatatttttaatagaaaacttgtccgaagatgctattctgcctgtgagagatgtcacattgctgaaccgtgaaatgtcagacaacctgagaacaaaattttaatatttcctttttaattacctggattgtggtttgctaaaagcttttaaagagaagtgaacttttttggagaatagacgtaaggactctgtatttcacagttttctataccatgaatattagaataactgacagatgtcttgccattgatagttgtaaagacttttcatatgtacaatgatccattatttcctgactacaaaacccaggggtatataggtcagattatctccattattcaaatgaggaattgaagctcagaaaggtcaagtgactagcgcaaggtcacacagccagtgagggcaagtgcaaacccagccagcctaactcctaatcttctcttttaattccattacataatgacacctctcatttgcttcagaaatccctgttgtaaagatagatgcaactagcatgatccgtgttgttaggaaaggcatgtgattaattttaaatagatatagtatttaacaccaccagatgagtctccctctgaaaaagcacacaaaaacaaaacaaaacgctgacatagtttccgcaagtcacgaggcaattatgctaattagcaacaagcctccatccctaagcagaatagttcttgtgtgaaacatatcatttaatctttataaccctgatgtgacctagatgatttggtctaaaccccacaatcctattgtgtggcttagttatatctataaatatagaacctgttttacttcatttttgtgtcaggtggtttgaaggggggaaacatacaatgctctgctaagtaattagagctacttacgcaggcattggggaatctgaaacttagcttctaattgtctccacataaaaacagaagttaacttctagggacatcttcagggactcctcaaggcaaatattcatgaaatggggcctattggcttttcttttcatcttggttctgggcatgttgccatgttcctgatctctgaactctgatgctgacctgctacagactccaggagcaatattaaggataaaataataactcacataactttgtggctctttattctaaaaaaaaaaaaaaaagttggctcaattttttttcctccataagaaaatgcaaattgcaactgtattgagaaaccattttttcacttatcagattgtcaaagattagaaagtttgataatcacagtgttggtaaaagtgtagactagcagtcacaatgaaaatgtaaatgtaaattataatgacctccctagggggaaggtcaggatacctaacaatattgcaactatacgtataagagtttatcttggccctgcgtggtggcacggtgactcatgcctgcaatcccagcacttggggaggccgaggcgggcagatcacctgaggtcaggagttggagaccagcctggccaacatggtgaaaccctgtctcaactaaaaatacaaaaattagccagacatgatagcaggcgcctgtaatcccagctacttgggaggctgaggcaggagaatcccttgaacctggaaagcgaagtttgcagtgagccgagattgtgacactgcactccagcctgggcaacgcaccgcgactctgtctcaaaaaaaaaaaaagagtttatcttacaacacacaggagaaatggtatgtatctacaaccttgtttatttcagcattgtttataataagatatatttcaaatacaaatattctttagtaaaggactgataaatcatgatataggcataaaatgaaatcttatgaaagcttttaaaaagactgagaaagctctttgtacttttatgagatgatcttcaatctatgtcatgtgcattttttaacacaaaacaattacctaatagtatgctacaatttctactaaaagggaggaaatgatacaaacttgtatagatacatatatagatatgtttgtataagcataaactaagcataagccaccaggcatggtggcttgcacctttaatcccagctatttgggaagtctaagggggaggataatttgaacccaagagtttgagacctgccagggcaacttagaccctgtctctataaaaaatacaaaaattagctgcgcatggtggcatgcgcttatagtcccagctactctggaggctgaggtgggaggatggcttgagtccaagaggttgaggccatcgtgagccatgattgtgccactgcattgcaagctggtgacagagcaagaccctgtgtcaaaagaaaacaaaacaaaaacccataaaatatctggagagatataccagaagcagataacattggttgtgtcttgagatgggagttggatagttaaatggcagcattagaagagaaatttgttactaaatacaattttgtactttttttggattttgagccatataaataacagaacccattctaatattttaaaatgttttaccgcatgaagttttgccatcaggaatgaccaaagtttctctgtgaacgaatttcacttatagataaaataaatgattggtcaggcatggtgccgtggtaggtgtatcacctgaggttcggagttcgacagcagcttgaccaacttggagaaaccccgtctctgctaaaaatacaaaaattagcgggggcatggtggtgcatgcctgtaatcccagctactagggaggctgaggcgggagaatcgcttgaacctgggaggcggaggttgcggtaagcagagacctcgccattgcactccagcctgggcaacaagagcgaaactccatctcaaaaaaaaaaaaaaatgttcaatagatgcttctgaccctatttcttctctagtttatctaaaaaagacaactttggtacataaaactctaacacaagtgtggtgaaaacgatgaattagcaaattgtaaattccttgcaatttgattagcagtgacatctcccttgggtagggcttccagataactttaccaaagttgcattcaatcagaaatgaaaaaagtattccaggccttaattctcaaggggaactccatggagtcattgcctttgttcccaatccgggtccctttttttttatttatgtttccttatggcaccatctcactgagaagggagttgaacatctttaaaagacagaaacagtacattttaaaaataaatatttcaaagtgtaagtatttttagtataaaatggtattcccggaaaagcatacaggtaatagtaaacatactattgagcaacgaattaaaacactgagcttcctgagacccaggtacgccaaccgcttacataattgtcattttcaaaagaggctgaaagtttctcaaaggaagaaaaacttttcctagcactgaattttaagaaaaatttttgtcactcattttcaattcaagactacaaaatggaaaatgacaatatactattaaaataccataaggaacttcatgtggctatttttcatagtgactgtgaataaaactagaagtttttttcttctttttttttaatagagacggggtctcgctatgttgcccatcctgggctcaagcaattctccagacttggcctcccaaagtgctgggattacaggcgtgagccactgtgcctggccaaaaaaacaaaagtattgtaataaaactcaacttgaggaagttactcacccagacagggaccggtcttataacagcataatgagatcaaggattggctgtaaatagaagtgtggaaagacggcagcttcttcagatatacttctgaaagtcaaatatgctcatggtaaaacgtgaacatctccacaaatcccttaccacagaggtaaacacagttgctttatacaacattccagaaattttctagtgagcactcattagacaggtgctgaagcattgtcagaagttgcggtaatctctggcaaagtcccagaatgctggaattttgtgatactgtcgatgaccttttctttgtttttgtgaagagaatgtgtatattacacatagtcatatgatttttttttttttttgagacagagtttcgctcttgttgcccagactggagggcaatggcgtgatctcggctcaccacaacctctacctcctaggttcaagcaattctcctgcctcagcctcccaaataactgggactacaggcatgcaccaccatgcccagctattttgtatttttagtag

SEQ ID NO: 50170 - DNA, 2688 bp, Homo sapiens
cctgtctctgcaaaaaatacaaacaaaattagccaggtgtggtggcacaagcctgtagtctcagctacgtgggaggctgaggcaggaggatcgactgaggttgaggctgcagtgagccatgatcacaccactgcactctagtctgggctactgagtaagacccagacatttatattgctttttccaggtatgttttttatatacacatatatatattacatatgttatataatgtacataatgtatattacatatgttatataatgtacataatgtatattacatatgttatataatgtacataatgtatattacatatgttatataatgtacataatgtatattacatatgttacataatgtacataatgtatattacatatgttatataatgtacataatgtatattacatatgttatataatgtacataatgtatattacatatgttatataatgtacataatgtatattacatatgttatataatgtacataatgtatattacatatgttatataatgtacataatgtatattatatgttatatacgtatattaatatgtatatacatattaatatacatattaatatatgtatattatatatgtatatgtatatagacataatgtatattatatatgtatatacatatgtatacatgtttattatatacgtatgttatataacatatataatatacgtatgttatataacatatataatatacgtatgttatataacatatataatatacgtatgttatataacatatataatatacgtatgttatataacatatacgtatgttatataacatatataatatacgtatgttatataacatataatatacgtatgttatataacatatataatatatgtatattatataacatataatatacatatgttatataacatatataatatacgtatgttatataacatatataatatacgtatgttatataacataatatacgtgttatataacatatataatatacgtatgttatatatgtatatatgtacacatatgtttatatgtatacatatatgtatatgtacacatatgtttatatgtatacatatatgtatatgtacacatatgtttatatgtatacatatatgtatatgtatagatctacacacatatacatatatatgtgtatatatatatgacagcatcagtcttaatagcttagatgatttctatttgctaattgctttaattgacctccaaattctggtccttacatctcatgtctacatctccattcatttctctagtgtgaaaaaaaaggaaaaaactgaaaatctcaagaggattccaggaaatcaaaacaatgaattattgaatcaagaatttgaaagagaaaatagatgcatactgaaaaaagaattttgtttagtgagatagatgtaataatgaaggcatgttgataacgggggagctatgtatatatgaggggagggatatattggaaatctctgtatcttcctctcaatcttgctgtgatcctaaaactgctctaaaaaatattttgagaaggaataatgatgtggtaaacatgttctgttatttaaaaagagagacttttcatagccgcctccctccccctctacacacacacagagtcctgtccgtcttcattcccttactcaataatttgtacagacacagccactgggctccagtaatcctaaagtttctagaaaatcaagcacagaaaaaggttaaaaccctgagggaataaaagaattcctttgcatccattgcatttctcaggaagtgaactaacaaattcactgcttttaaatgaggaaattttctcagtgaaattgattccaaaccttcgttaggtcaactgttcccagatttcttagctgatgcctgatctgactattccttatctttagtacagaaaccaaggtgaatgacctttaaaaaacatattagactgttgacgtgtcttctatgttgtactctaggtaaaaacgataaaccaggaaaaagaaagtaaaattcaaccttaggctcatggatccagagtggataattatgagtctgtagtatctacatgcatgtgatgaggttcaaggacaataaccataaagcaaagacttaaaaggttttatcattagaataattgtaattcacttgatctctcaatgtaacaatacttcggtctactgtctcaagccattattatgtcttacactcagcatattggtttgtctaccattaaatatttattttctacagtgctttctggaaggcaaacaaagcagccactctgctactttatattgattcctgagttgtccttcggaaacgctttcaggaagtttaataggtttgaaagatatttagacctgtgactggcaaatatacttccttctttttatttcaataagagagtactagaacttagatctttattgtttaatctagtcagtgctgtcattgtcaatcaagttctcaaatgacacttgtcctgagctgtaactgatctattcagaagaatatgaaaatagtaaagacggcaactatgcatgtttttaccggacacgattttaattgctttaaaatgaagttatgcaaccaatgaggaatggagcttttggagtggcctgaagctaaaggtttcaggtgtatttttgctttctttgaagaaagaaccaaa

SEQ ID NO: 50171 - DNA, 2097 bp, Homo sapiens
cctgagtaactgggattacaggcacccaccaccatgcccggctaatttttgtagttttagttgagatggggtttcatcatgttggccaggctggtctcgaactcctgacctcaagtgatccgcccacctgggcctctcaaagtgctgggattacaggcatgagccgctgcgcccaggcacttgtgctttgattaacattattttcctgtgaaacaaattaaagtgatcaatgagctccagggattcatttttaattaaatcatgaagcagctggcattcatggcctcttggcaggtagtccagcctgggcttgctgactggaggaatgagagtggggaacttaccagctgtctaagcgtcttggttccaggtaaatgatacttatcaggctgttgaagaatttagggagcacacctgatagataaatctgcacacagctttattgaattactcttttcttgctctgtttcagaaaactgtatgagaatataaatccaaacttttcacataaacttttatcgcttttaggtttgttcagaaagattgtccttgaactgaaatgaacacatcaaaactgctcagcttctctgaatgggaagtattgagaaatgatctttaaactttgcggtgaatcagatttatttatggaactttttaaaaatgaagcagcccaggcttaaaacttggtatgaaaaccagccttgagagtaaaatacccagttcctccaaactcctagttcctctgcgttacttatcctaccgcgtggtgactcacatacaaacaatatacagatgttctttgaacctggatttcaaaagatccgtattcagaaagaattctcaatcacattcaccatattcctaatagactccaaaagttctcagagttttctttttcccaatcctgctgatctctgagtcaacatggagcgcccttgttaaaattttattttaatttggcattgctttattttgcgtaatcattgtctaagtaaaagtctatctgcttctgacttttcagaaagagataattttatagaaagtgttatttatttcctatctgttcaacatgagtaaatgtatgaggacattaagattctttcgaacacaattattagcatattacacaagttgaaagggattggtgattttccaccccaaagcgacttcctgtagtttcaaatgtaactttcctgtaactagggaagcatgagctatttttaagctttctttttttttttaaatagtgattaaaaagctagtattctctataaaggattttctttgaagagcatgtgattcctaagaatctcaattagttggtcaccagaaaggacagggaaggctttatagctagcagacttttctaaggtttcattttacaattcaggagctctgtgttctaataccactcaactgtcaagagatgctgtaggtggaataaagcagggaaataaaagagatgaaacagctggcatatgttagccagctttaagagctccaaaattacccggtattctagaaaattatgacgtgcgtgatcattctctctgggagagaagctgctgcagaaagcaaacagtgacgtagtatgcaacaaaggggcatctgtgtggcaccctgaagaaaaatatcaaattacccccacatctagacagtctgggtaaggttatcatcttctaataaacgtaaaattctagttcttctaagatatgctcctggccccattccaattactgtatgaccttggagaaatgtcttttgaagtgtttctgtgtctgtaaaacctggataataatactgtctgtcccagatggttggaattgtatgaattaattagttcaagctggaaaggtctttgataatgttaagtgctgaatattgttattattatagatacaggtggaggcagtgctgcacagcacatctataattagaaaggcctagaaactgaaagtcgtgccaacaccgcgggagttaaggagacaataccttgtgtcattttctcccgagactcagtcagcttgctatgatggaatacttaattcgctcttatcctcttcgaaaggttgaagcttgtcttggacttgccaacca

SEQ ID NO: 50172 - DNA, 2118 bp, Homo sapiens
tcaaaaaggcaccccctagtctggtagcatataaacaataaagcatttcaaaatgtaattatacatatttagaaagtcattatattactttgattagctttagaataattcctgagaatatcttaagttctctaaaattttccattttcctcatttgtaattctaacataccttatttgtatatctgtatatttgtatatctgtatatctgtaacaaaagatacataattctaaatctcttctccaagtagcagaagcagactccttgctagtcaacctgacttcttgcaaaagctaatggttgttacctgagttttggttactatcatacctgtgaaataaattagcattattacaagcatgtcaaaaatgcagagacattaaataacttgcctaaagtcagaagtgagtcagagacccagctcaggttccatccagacactctgcttcccaggatcctgtaactgcattgggaatttgtaattatttctccattatttgattagaaatagggacaatgttgattctggcttcaatccagaaacaaacatgtggacacaggtttaactgaaagaaagctaaaagagaagattcaaggacaaatcccaatactctgatatttttcttttttccccacttgtatgactttttgtgaaagatccaataatatatctttataaagatatatatattttacaacttattattatgttcattcagagaatttttgtactgtaacttcaataatgttccattgaagattaagtaaaaacgaagtccagctgaaactttgctttgtattaagggtaataacattttacccacaaaaatatgaattaatatgtcatctcaactaaaatatggagataagccaaatttttcctagttataaaaaacaaggcaggttaataattgccaaggtgaaatggtcagtttatttgctctctaagaaaaacaaaagtattccctgaggtgcaaaattgtgaaatttaactggaagcatcgattatactctggacaagttgttccttttgttttaaaatcctctagaagattttctaatgtgtaataggcacttgttagctccattaatcgtattgtgtaacagtttcttactggaaatctgggttcatcatttcttctttccttctgatgtaactcaagcagttgtttgccatttgtcctgtggtccctatttattcactcagattccagtaaaataccaaagttttgttttctttctgttctttgttatctactggacttgagcactgacgatgtttggtcttcccattaaacatcttcctgtccttcacgtggacattttgaagattattaagggaaaggtaatcctgttgatttactggaaaaaagaaggaaaaaaaaagccagttagactgaagtgatttgcacacacacagaagaagtggaaattatacattcataattgtagagaattcaagctgctaatgttaaatttcaaaagcaaaaatatgggattattcggctaattcaataatgatctctgtggtaaaatgacatattttgaaatacaaacttatctttccttcttgtatgcctttagctttgtccccattcaagcaataatttagccttgtgttcatttcctcactggagggacataacattaacagcagctaacatgtggtatacttatcatgtgctaaacatggtaattttatcaactcactcagccacacagccctataagtaggtactgttaatgatctccatttcacaaatgacgaaactgagacacagaggtttaagtgacttgcacgaggtcacacagctaacaagaggtatagctgggctcaaaggcaatcctgctcagaatctgtcctcttttctactaaaggtagactatgctgtctttcggaaacttggctagcatcattacctcaggagaaacttgcaaaagttaatcaggcagtaaggactactctagggccaatactttgtggaggaattccaaaagccaaattttcttggagtaacattattccatggatgtactgccataacatggtggaagaactatcatcaggaaaggtcaaaattatggccaggtgcggtggctcacgcctgtaatcccaa

SEQ ID NO: 50173 - DNA, 2832 bp, Homo sapiens
cacagcactttttcttacaacacaaactttatttacatcacactccacttccgcatccttcactaaaatatgagctcttcaagggcagggactatatttttgctaccgcagtagttagcgatacacacacagaatatgaggaaaaagtgtctgaccaacgatcaatgcactcacgactgaacctacggtggcagattgcagtgggatagaagagctttatgtgaattgcgtactgagatgcagacctactattttgggaacaatttgtttttgttgttgaaacccagaatgcaattcttctttttacctttattttgcttaaaaagttattccataattataaactgcgtaaaactagaagaatgcccttgcactcaactaaaactgacaggtgttttacctttccagtcaggcacattgaaggccttgtgactttattgatttttgttttttaaagggaggacctgccaatttattaatcttaatagagctgtaacaggagagtataaataaaaagatagttcagagaaaatttactgaaattaagtttggattaaaatcatctggctcttttaaggaaaagggacattaaccaaaagtggcgttaactatcaacaatatttatgattctctcactcagtagatacataatgacgtctggcaaattgtttaacttccgtggaacaatcccctcatatgtaaaatcaggaggttggactacattgtaagtgtccttttgtttccacctcttcgtgaccgaatgtggggtgaggaaggggcaaaaaagcgatcccggtcttggctccttcttccggcacgggccggagctgacacccccacggaaaaccgcacagcgcctccgctctttctccacgggctgagggatcaatgcacttccgcataggcctagggccccacgctccgcgatcagcgccggaagcgcacggcatgctgggatttgtagtcctccacctgtggccggcaggcgtttagaacgcgaggtctagttggcattctgggatacatagttcctgggcgggtgggggcggattcgttggtgtaatctcttttcggcttaaagagccagaagcgacaccacagactccggcgggtcacatgactccagtctagctcgcattgcggctcccgcccgggcgagttctcgcccccgcgcggccgttgccgaggagacggcgcatgtcccgccgcgcgttgccccctctgcagtacccccgcccctcttctcccaccacaatgagatcctaagatggcggtggctgcggcggttggcgctgcgtagctgaggtcgaaaaggcggccactggggccgaggcagccaggaaacgtgtgggcctctctgctgcggtctccgagggccgaccgctgccggcggcgggtcgtgggggctgactgtcgctctgcctttgacaggagaggctgcttcttgtagaggtaatgcctgcgcgtccccagcccttggcaacctagggcggcgcgccccagaggcgggagagtaacggctccgggacactcggccctgttgggtctggccacgggcccacgcctcctctgtaggttcccgggtcttcctgccccgggcttcccgtgccctaggcggtcagtccgcccgctccctcaggactgatcgccgggatccccgggtgagcacctcgcgacgcgttggtgattgcaggactcccttcttgcctcctcgcccctcctgctggccctgtcggggaggctgttctgcgtcccggtggctccggctataccccttgcgggcggaggaagcggagcggggactctggtttgggtgctaggggcactgggtcgagttcttagagaaacaggccttggtggccatagttcttccccgcgttccctctgtggaactctcggtgtccagagtttggggtgtagaagggcggatgaggagcgacgcgactctgaagagttgcagttgggctgtgagctgcaggatttccgccgtctctggtgctgtgggagccgatgggccgggggaggcgttcctgggaaggttaatggagtaattattgccccttctttctcccttcctacctatctagttagaattgggcctagaaccgggaaagactaaatgccaagtgggactgggggaaacgttgtttggtttacagaaactggcgtttggggattaggccccgccagggaggctgggcgcgccaactttgcatccctcagcctactccccaggaactcgcctggtttaattttttttgttttgttttgtttttttgagcgagttgaggtctgtattgtgtgtcttacgggtgacggttcgtgtttgggcgctggaaggagcgggctttctgggcgcccctaccacccccgccccataaccgctttccagactccgcctgctggtgttctctggttaccggagtgggtgttgcagagcctcgggtgcacctgctcctttctttccctagcaccttcctggtgaggacccctgaacaccaatataatacagagtttttgaattgaaggtaaacctggtatttatgtagtgacgaggttattttattatgaagtacagtagcttttaaatgagcaaacatttttaaaatcatcggatatacgaggttgttacatagtttgagtaacaggaagctcgatcaatcagaggagtaaactttggcatagactattaaaggatagttagggctaaccatctttgttacactgttccgaaatagatatcactttgctgtttggtaagatttcagaagtttaggggatttaagcatttatgcatatcacactattttccaaaagaattgaggtaactta

SEQ ID NO: 50174 - DNA, 472 bp, Homo sapiens
taccctacaaggttgaggaagaaaggtctcatgtttcattagaacctgagaggagatgggaaactctcctgacagaagcatcctggggcaagagagaggtgagtggaaaacgtccatccatatagcaacttctcacaagcctctcttgtccatgttccaggatgattccatggccttctgccaagacagcttgcactgtgattcagaccttaacctctctgcgctctttggacatgtgcaaggtctccagagtgccatggctgatctctttcccttcagtggaggctcaagtagaagtactgtttcttctactaatgtcaccccctcatgctgagaaaaacagaatgagaaagggaaagagtggtgaagtggcataggcgataacatccttatctctcatcagtcacacattagtaccttaactttggaaatctagcctttgatgtttttaatttgggactcatatataaaa

SEQ ID NO: 50175 - DNA, 2630 bp, Homo sapiens
caccatgattttaaagaatttctccttacaggtataaaagaagacaatgcacatcttgcttccactttcaataacctacctaaactattcaagaccatcaccatctagcctcaggccagatgcgccaggttcctacttatccgattctgttggcaaagacaaacgcagtctgattgctttataaagaaatgaattatgaaagagtactgggcgtcaagaggctcggacgttacgcatgttcagtaaacaacagtgtaacctctggctaaatattttctcactctaggtctacttcctcttctgtaaaatgaaagagtcacgctcgtccctcactgtctcttgcagttaggaagtccgtagccctgtgacttgctcgtgggaaagagccacgggacaggcgatcccatgacttgggtgcaaaaggccacagggggccctttggggcctgctctgggctgctcgcaccgcccaagcttgggaccactcagcgtttcccacggccctgcagtatcctgggctgaactcctgaacttcttcgggagaaagcacctgaccatcaggcagtctgtccttgattgagtaatgcacacaggtccaccggaacattttatttaaacacttcaaaatgcaagggcctggaactggttattcaagtacactcactcaaatctaagaatgtgcgaatcacacccaggtatcctgcagagactaggatttcctttaaaggagttctagttgcaggtagcaccgaatctaccgaggacggggttcgccagcccgctctgcacccacacccctgtgcacgaaaccacagacccccgtaaagaagctgcccagcacgaggtgttccttgtacccgctcgcgccgccacacctgcgcctccatccgcgcccgcacctgcacgcccctctctgcgcctcggctcaagctcactcaccggcggcgcgtgctgcgcgacggcacagctgacggcggcagccaggaggactaaggcgacgcaactccggcccggcatcgctctagcagccaacgccactccccggactccagcagaggcaaagaagagccggctgggccgggggcaggccacgccccctccgccgcgtgacccgcgacctgggaccgcaccattccaggcagtagggggaacgctcggaggaggcgggactgggaggagaggacggggcttttcagtgccacgaaaagggtggcgtagagaaagagagagagccttccaggctacctgcagaaggagagtcgcgatcgcctttggcgcgtggcgtgatccatccccctcccccaccgcgggcaatagtcggaccgagccggagccccgccccgtaggtggggccgggagcttcacccgtggcgcctcgatggggcgcctctagcaggcgggtgcagcctgtcccgcgtacccaggcgtcctcggtacccacgaaacggatccaaagagtctcaacactaatgtaacatcccaccctgacccatctttgccctctgagaaaagcggcccgaaatgagttgagttattcatccccaccgcggagtcagggacaaggagcagttgagtggccgaggagtgagagagaatcgaatccactcgggtcctccaagctgttggttacccacttgggctttcacagcaaagctgccaaatcccagaattgaggcctcggtgaaaagcgcgctgagacttgggtaggaggcccggtgggacccgcgagctttctctcccagcccgatgcagcagttcattaagcggctgtgtttcctcctaactggcgaaggactcaggtgggcggagcagagctcagcttgggaggaggcggacgcgagtagctcggcagggggactcgcttggctttcgtgccatccgtggacacagtcgcgcgggtaggtgaccgggttggatttcaaagtccagcaggaaatcctgccctctgggttgcacttcctggatgagcctctgacgtctcaagcagcattgttttaatgctttgatgaagctcagcacgctgccgaaatctcggcagtattttttcttttctttttgcatgtgagagaaaggacaacaaattgcagttttatccatttgtattatttctttagaaaactcaacactctttttgttggaggtggggaaatgagaaggtgatgttttgttttgctttttttcctattttttttttttaaaggaggagaagatgacagtgttctccctaaggatgaagtttgacttttgaaacatatcacatgcttaaagcacatttgagctcctgcatgaacagtaagctagcagatggtagaaatattctttattaattcaaaaaatatttactgcggacctacaatgtgccaagcatgtctcctgacactggggataagcagtgaacaacaacaaaaagacaaacttcttccaccctgaggcgtatgttctcggtgagaaatgggcaataaacataatacctaagaaaattatacgggatgttagtgacaaatgcagtggaggaaaagggaggccaggggcatcaagtgtggagatcagaagtggtagagttacaattttaaataagagggacagatagacatgattaaggaggtgaagtttgagcagacagttgaggga

SEQ ID NO: 50176 - DNA, 2458 bp, Homo sapiens
aaacagaaatacaaatagcaaattctcacttatttgtataatttaaaacaatcaacatcaaataaacagagtaggatggtgatcaaaagatgctggcacgggatgttgggggaatgggaagatggtggtcaaagggtacaaagtctcaattagacagaaggaatacatttttacaatttttcagtttttagagatagtgtcttgctctgtggcccaggctggagtacagtggtgcaatcatagctaactgactgcagtgttgaactcctgggctcaagtgatcctcccaccccagcctccggagcagctgggactatgggtgcacactaccacaccagctaaagtgttggtttcttttttccttggtgatgttttcagtgggttaaatacagtgttagatttaagtttggctcaaagtgtcctttgtactggggtaatacggtttgtcccctgttggtctccttactttgtgaactttaccttagttgatgtgtaaacaagttgtaacctaacctaggagtttacctttgtaaccaagtgatcccaggctgaaaactaacacattctgctcaaataaagcctaggccaaactgcacaaatcaggtagtctctttatgtcattgcttgttctctggttataaatgtagctcacctcatcggaggtgggggcattctgaaccatcttcagtgtagagggctgcttggttctagaatccttttcttgctcaaataaagtttgttaaatttaatttaacttggacttttctttaacagattgacccagtcgacaggatctgaacttccagtgaccatcccaggaacagaaagcaactgtgtaagtgccctccagggcccattgagcccagggatctcttttctgggcctgaattgctgggtgagcctctctctgggattctaacttccacttattttgtgttctgagctctccacgtttatctcagcgacctttgttcctttttctctctctccttttttttttctttcttttttctcctgttttactgaattggatttcacttaagaggccaggcatctgattaagttagagtctgaacagggttcaaaatcaaattggattcaacagttaactagattggatccagttaaaggccttggggtaggtaattttgatcttttcggcatttgaatccagggttttgtgcttgagagagcatttgagaatcatgacagaaacaggacccagtcctacagggaggcctcagtctgactgggtcagacagaactcaactgggctctgtagataggtagagttagcctttctaaaggtaatctaaaattaaagtggccacagtggtgacatttaatttggacagaattgtttacttgtgaggcatattcagaaaaaacagagatcagaaccacccccccaaaatactgggatgtattttttaattggtactgggaggcacgcaaaagactaaattaatccaaattgcctccttaaaagatttctttgcaaaaggcaaacaaaaagcttaagcaacagactaaggacatgaagaaagaggggtgcagtttgaccgaattaaccctgttttgcttcctacatgtttttacctcaagtttctgaatctgttaaccttttggctcaattacctttttgccagaaagagctaggaggaattgttgaaaacctcttacatttaattcctaatagctaaggtatttctgcacaaacaaaacaaaaaaacctccaaaagaaaacaaaacaaaacaaaaaaaaccacacctgattggtctgttacacaattctgcagacaaaaggacaaaccagactgcagagtttatttagaaacattgtggaacattctgagctagaaacgcaacaaggagtatttcctttagggactgaaacagtattaacttatagcctgcaattagacccagtagctaagccataacctaattacttaaaagtaagtagcagtggttgccaaactggtagcgatcttctctgaggtagtttagggaaaaatttttcttgcatgttccacatgctatggaaagcctcttgaattccattctaactcactgtctttcagcaaacagactaacatcttatgaaattcttcttttgtcttctaagcatcatttaaaacactgaaatatacttaatcctcctgctctactacctctaaggacaacagtgaaaactgcccttgtgtgagtgtagcgtcacaagtaacaaccacttgtgttgatttataagattctccattagctaatcgggagttaatgctttgtgttaatgggtcttaagccaaacactagaagaagagaatagcaggcagtgtatgctgttacaatagaaacttttaagctccacatgttttataagactgttgacatttaactgcttctacctcccgacatgccactttcctcaactttagcttttcaaactgacttctgatca

SEQ ID NO: 50177 - DNA, 1515 bp, Homo sapiens
tcatccaaaacccttctgcccacaaagccctaaagctctgggcctgtgattagaggggcagccttgaagacctccaaaatgcctttgggatcattctcccactttcttgatgagtaacacttggctttcttttatccatttaatctacaaattactggaattaatcagtgtaattagcaaggttgttgaatatgaggtcaatacataataatcaagaataacaataattaacagcattttaagtaatgctattatttgaatgtttgtcccttcccaaattcatgttgaaacaatctcccatccaacagtagtgggaggcagggcctaacaagaggtgtttaggtcatgaggcctctccagtctatgaatggattaatgctgttgcaaacagagctttcaagagtgggctttctctcttggcccttccactttctgccatatgtggatcctgcattctacttccctctagaacatttcaccagtttttgcgtgcactcatttttctaatgcatgcttgtgcaaaattctatgacattttatcaaatgtacagtgatatttgactagtaagcttatctcaaattcctggaataaattcaacttggttgtgggctgctatcttttttagttgttgctggcaaatctaaacattggttaaacaaatgtttaaatgttatttttttcaggtttcaggagtgcttgtttcggtttcaggagtgcttgtttcagtttcaggagtgattgttctgtaatttttccttcgggaatgtccgtatcaagtttgtgtaccgacattagattaacttcataaaagaagttaggggaagagttcttattttttctattctcttgaaaagtttataaaagttttgtaaatatttagtacaattcgccagcaaagccatctaggccggatgttctgtttgtgtgaattttttaaatttatagattccattcctttaatagtttcaggattatttagaatttctatttttcttgtgacagttttatgcattatattttttcagaaatgtgttaagtttaccaaaattttcaaacttattgccataatactggtcataatgtggtgtaattttgttttttactgcttctgagtctgtgacaatattccccttttcaatcctatattgttggtctttgtgcgttccctctctgtatctgtcttttggtcagtctcatcagggtttatccatattactagtctttaaaaacaaaacaaatcttaatgttgttgttttctttttcataatttccactatctttattcttttcattcattcttcttttaaaattccttgggtttaattcacaactttcttattcatttcttgagctagatattttagatctttatttttcaccctttctacttttcttacgtatgcttaaaattcatataaatgcatataaattattcctttaagtattgcttcggctatgtccccaaaatttgatatgttacattttgttatactttcaaaatattttctattttt

SEQ ID NO: 50178 - DNA, 827 bp, Homo sapiens
actcactcactatcgtaagaacagcatgggggaaccaccccatgatccaatcacctcccaccgggtctctccctcagcacgtggggattatggggattacaattcaagttgagatttgggtggggacacagagccaaaccatattagattttgtctgtaaacaagttaaagattaaacaaactgagctggtactccaggccacaccaccatgcagggtgtggctggccagccctgagggatgggagaagcaaagactaggaaagaacagccaatgagggctgtccctgcattccgtggtgaccagcctctagcagcccagccccagggtagtgaacaaagtctgcttcctccaggagtgttgacctcctatgtgaggagcagccaccagggtgcctgctagatacggtgaaaccaaaatttcaaagggcaagaaaagagggttcggccaaggggcagactccagcgtggcaggctggcaggctgaagactgcagattgcagcataaacaaatactgaggaagtcaggaaaaaggtcacactgagccattaggattgctctgcttcagtctctggcgtgggaactacaagcttccaggagacagggacatggatgaaaacggatggacaggaagggagggatgggcttggctgccatgaggtgggaggctgtagagctggtgagtctgaggagcagcaaaacaattcggactgaatttcactcccgtgcaatgaaaagccaatccctgcatttgttcaacacccaggaaacgtatgccaagctcctcagtcaggcactgtgagaaatgagacagacaaagccttcact

SEQ ID NO: 50179 - DNA, 1239 bp, Homo sapiens
ctggttcactctttccctagggtctgaaggatctgcgccctgtgttcaaggacgacgctgaaacattcttttctgcgtgcctgatctgaggcctcacaactcaggtgagcaagactgtgtccctttcacatggagaagccgagttccacggaggttgagtgaggagccggcatcacacaaggactcggaggggctcctcgagactcgcgggacagagacggcagccccaggtgggaaaggcccaggccagggacacgctgggcctggggtgggggaaggggggagccctcgggcgcccccacgaggccggcgcgctccaggtcctggacgggatcgtccccttgcgggcccagtgcagggagcgcggggagctggccgccttcttcctgcttaggttttggcgccgccgcttcttctccacctcgtccgccccgcgctcctcccgctggcggcgccgccgccgccgctcccgcgcttctccctgcgcctcaagcccctagggcaggcgctaggcgttccggattgtcgcgccctccgcctggttcggcaggtctgtccgcggccccttcacgttggcctccagctctcgtgccttccgctggtcccggccccggagttcagcagcgcccggacttcctccctttccgctgcgcgaggctccccttcagctcctgcctgttcctcctctttgcgccttgctggccggctcgtgctcattcacctccaccttgtggacgaccagccccgacggctcctgcggctccttgcaggccacctctgggtgggcttgatcgccgccccggccctcggccctctcggccttggcctttgctcccttccctttttgccgcagctctttcgcttcctcttccggtcccgctccttctctcgtcgccttttctccaaagcgcttggcctcagctccttagcattgtcctggccccgggcctcctgtatttcctcctgcagtcgcagtggttttaatgtatgggggaaagagaaccattgtacaggcctttgatgaggtcgctatcttctagtgagcgtttgccctgggacgtgactttcgaaagtgcttctcagcatccattcccccctcccctccacttaggtctgagacaggaatgctagaagggttggagttgaatgtttctcttacctcacttcagttaggcccttgtaatttcccttaagggaaggaggaccagaatgctctggacttatatcacaatggttatt

SEQ ID NO: 50180 - DNA, 936 bp, Homo sapiens
tctgccgcttctaagttattggttctgctgttccttgacctgtttcaagctctcaccttctatatcacacatgggaagtctggcatcagacttccagagagcaagaactaggtgaaatacaagggcacagctctcctagcctgtggcatgggtatcatcagataatataattatccacaccatttttaacaaaaagatttgcgtaagagattcacagaggcaacctgaggccctgcaactacatttcccagagatccctgaggtgatcctaactagactctggtgtcagggtgatacggaattccagtgagatcacttcccttgcagactttggaagggagagcactttattacagaccttggaagcaagaggattgcattcagcctagttcctggttgctggccaaagtaagtagaactttgtaagtaatttgcagtgtactttgaaagtggggtataaattaaaaataaaatcaagtccccctactgactgaatggatcccctcttgtcctaggcgaccccagagaaacctggaaaactaaattccaggccataatggaaagggaggtcagacacgcctcattatacacactcccttttggagttcaggcacaactgaccagcattaacattgaaacagtgatcataagactgtcaaaatggactgtttgtgggaataagataccaaattccaatctgactctggtttagcatcacatgacaatagcagaccctgaaggaaatcaatatatttaatccccaaaatatatttctttgacacatattgaaatggtcttgcaaaaccatcttttatggggaaatttgctggtttctggctctgctctgattgaggagagaataaatgagagtctgacaccttaaaaatctgaaaagagatatttaccatctgttttctctaaggctgctagctggag

SEQ ID NO: 50181 - DNA, 966 bp, Homo sapiens
gggtggcaaatctttccagtttcctatacacctgagttcagctgagaaaacaagtacttaaatcttaagtgtgagctcagattaagtatgagatatgctttaggttcttgataaaattacatttcacagagccatatgagagagctgtcctagtccattttgtgttgctaaaacagaattccactggctgaggagtttatcacgaatggtgacttatttcttacagttctggagactgggaagtccaaagtcaagggtcctgaatctgatgagggactcccttgctacatcatcccattgtggaaggtgcaagggcaagaaagtgtgagagaggaagagggctgtgaacttggttttataagaaacccactcctgcagtaacaaccttaatccactcatagccctcatgacctaagcacctcttatgaagccttgcctaatggttgggggacatattcaaaccatagtattctgtctgtggcctctgaaatacattcatttcatcacagtgaccccagttttaactctttctagcaccaactcagaagtccgaagtccaaactctgacctaaatcagatacaggtcaatttgaggcatgattcatccttaggcaaatttcccaccagctgtgggcctgtgaaatcaaacaagttatctacttcaaatactatggtgagacagacatagatgctcccattccaaaagggagaaataggcaagaaaaaagaatgaacaaaacccaactccaaaaccaaatagggaaaacaacattaagacttaaagctggagaatagtttcctttgatgtcccaaatcctgaaaacactggaattggggttgggcccccaaggcctcaggcagccccaatcctatgacttcactgggcttagacgacccagcagctgtcatggaatatcccacatcttttgaaatctaggtaaagaaagccatgcctctacagctctt

SEQ ID NO: 50182 - DNA, 1036 bp, Homo sapiens
agttccagggtcagtccctaggacaaacagtctttccccacagtggtcttatctaaagatgtgacagtgcacaagaaaatcaaccgaggaatttttaaaaacactgattattgtgccctgtcctagatctaccacatcagctccttggacgaggaaactgcatgaatatttctaaatgctccacatgtaactctgattggaagccttggttaaaaaatcactgctttgcaagcttaccaatcttttatctaactgtaatttctgtaacttaaccccagagccagatcacaatcacatacctctctcgacactagccaggacagaatgactctttgaatttgaagatcatcatttttaagaataacaaagcaaagaaaattgcttaaattacagaggtaaacatattctggtctaaatttaattttaagtcgttgttcctcacttttggttgcttctcagagacgataaaatgcaattttattcaaggctttagtgctgtcattgccagcccacacagggctctctgaagcttttctacattaccatgcattgtgtaaccgtgagtctctctttctctctccaacatattttgcacagttgatggaattcgtgtattttagttcaatcatctctaaactccaatgaatttttttctctgtggttcctgaatcattatgaaaagtatggaggatatcacagcttccactttcagtgaaactgacagtgaccgcagtggaatttgtactcagaaagaattatgacaccatccgtaccacaattctctctttcaaatgctatgctggctctcatgcagatacttagatcaagcagactgttaagtatagaattaaatatgcaccactctggcagtgttatcagagaaagagcatgtttgaaaaagacactggttaaaaattaatgataaaaccagttattagataaatatcaaaatggttagaaaaactcaaaatactttgcaatggtcttcaacttctactatcgtctctatgccttaaaataatattgaaaaactgca

SEQ ID NO: 50183 - DNA, 1394 bp, Homo sapiens
aaatctttcatgaaagagtctacagctgggtgtgggtggcgtgcatgccaatggtctcagctatttgagaggctgaggtgagaagactgtttgagcctgggagatcaaggctgcagtgagctgtgatcgtgccactgcacttcagcctgggtgagacagcgagacccagtcttaaaaaacaaacaaacaaaactaatgatgcagcaagcttaattactgccttttcagaaattgccacagtcatatcaaccttcagcagccaccaccctgattagtcagcagccatcaacatcaaggtgagaccctccataagcaaaacgatgacaacttgctgaaggctccaatgacacacataataaactacagtatagtgtaaacatacctttttttttgagacagtcttgtgtgtcacccaggctggactgcagtgtggcacgatctccacttactgcaacttctgcctcctgggttcaagtggttctcttgccttagcctcctgagtagctggaattataggggcacgccactgtgtcctgtttatttttgtatttttagtagagacagggtttcgccatgttggccaggctggtcttgaactcctgacctcaggtgatccgcccgctttggcatcccaaagttctgtgattaaaggcgtgagccacctcacccagctgtgtaaacataacttctaaatgcatacggacaccaaaaaattcctgtggcttgctttatcgcggtatttgttttattgctgtggtctagaactgaacctgtagtatctccaaggtctgcctgtttaaagaatttttcccctagttacaactgtaaacatctaatgaactgattagaacattaagtccaaatgctggttcatcatcaaaaaacaaactaagagttacaactcaaatatctcgtaacagataagtcaggaaggccagggagagactccgggggtttggagaaagctccatgtacaaggtaagctagcactcagctgtagcctgatttcaaccaagtgggaatgtagcttcactattgcttttttttggggggtggggggaagtagctggaagcacacattattcaaggctggcaaatgttcaagtatgtcaacagagagagcaatgtaaactactgtgggtgagacaagcacatccactatcaaagaggacaccaattttgaaacagattggaatgctattgtgtccagaattggtgggttcttggtctcactgacttccctcgcggtcagtgttacagttcttaaaggagacgtgtccgcagtttgttcattcctcccggtgggttcatggtcttgctggatgtgttgggagttttttccttcttgtgggttcgtggtctcgctggcttcaggagtgaagctgcagaccttt

SEQ ID NO: 50184 - DNA, 4324 bp, Homo sapiens
agaaaaggtcaatttaaaaattgttccagaatgggagtgaggagttcttgctataagtacatgcctagtttagcaactattatgcttctgccaggagcatttattactgttatgaggtcacccattataaatgtggtctgaatgttctaatttgcttttctttatacaatgttaatgttgcaagcttttgagccaaaacatattttgctccagttaaaaaaaaaccaaccatgaagcaaaattgcagaaagggaatcaattttaaacaaatttgttatattatatattttatatgtttgtatgttaaatttaatttcttttactttctccaaagcagccacaatactggctttgatgaagggtcacactataaccacttgagtcaactcctgactttttgactcagttagaaagataaaaaagcaaaacaaaatattccctttgccttctctccatacagcctgccttgtaattcttttcacacataaatctgaactattcattttctttgtatttcataaacttttgcctgctctagctcccttacgaacattaaattctctgcggtgagacttggtaaatagaacacaaaaaatgctccataggattagactaaatgctgaagctggctcagtgggactggtgatggccagcttccaagacggcacccagcggcctgcctctgggactcatgtgcttgtgtattgcctcccacttctgtccaagggtttaacagtctttcttcaagcacattcggcagaaatggaattagtttcaccctgccctagtgagcccttgaagctctgactgtatcttacctcctggagcagctgccacacccctaccctgtcgccatttcctaaaacaacaccctcaacaaggttaccttgtatgtaatagtcttctaccctcacaatcttttattttattaattcctctattcatctacattcatctagaatcacagcaatatttacctattttcccatgttatccattacatgctcaaattaactttacttttccccatagggaattataaaagaagatttgtagctttagcatattattatgtgtgtgctttggtttgtttgttcttgcagtgaagtaggcagagacagggattacaaagaggttagatcatttagcttcatagacagatatacaggactagaagggaatattcaaacacagttatctcagctttgggaatactgatgcatttttaaaactttacagatttgctaaaacaaatgtttaatacattttataatcagaagaatattaacaaaaagtatcacatgtattcatgtattagctgtgcttttgaacatagcactctcctaagacccgaaatgtcatataatctgaagaaaaccgctaaaaacctttaggagatgacatatggtacaagaaaaacaggaaatgatgacagaagagagtaggaggtcaaggaaattttataatttagagacattaataatgagtttgaaagtcgtttggtgcaaaaaaaccccacctaaactaaaatgggaaaatcaggttttacaaaaaggaggcaatggggagagcagagttcagcacaaaagccaagacaacattcaaaaaaagacatcacagaccttcagtctccacttgactgctacaattatctgtggagctgtcaaccagctgatgtagagatcttgtgggaataaagcattaaagaatgtaagtgataacagagttatcctagatcaggagaatgaggctaaaaggaaaaagctaagacagagatcgaaaattaggtggctgtgacttcggatagtcccgcagcctgcttcagaagcgctctgctctgtttggccaataaacgagtgtctagaaggcaccctggaagatgggtatgagtggacgccactgagattgtcaaagtgaaaagtttcctgggtacaatacacagagttcctctaaacaagactgcattctgaccttgactttttaactgaaattttaaaaatctgaaactgagtttatggcttgtacaaactactaaatccagacttttgctttattccatgttttagagaactccagagaaaaagaattttctcaagccacatacacaaccctggcagaagcaaaagacaggtcaaggacattatctttattatgtgctactagtcatactgctttaaaacaatattcatatttgtataaaactgtatcaaaacagatactatagaatctcacttgaacaagactttaaaaatcatttactccaaatactcatttactcgtttagctgagccccttgttcaacatcctaattgcacaactattcttgaacatttgcaggtcaaggaacccactatttcccgagatagtatgatctattcatggacacctccaactttgagaaagcctgacttgtttattctagtttattttatttttaatcttcaagttacctaaatctattctttagagctggtttcattttaaccagaaagctctgtaggaatatagcatatatctagatagcaaaactctgtatattttgctttgtcaaagattttttagacaatagttcttttgtatatcaggctctataaacacgaaggattaaagaataccaaccaggcctcttctgttcatagcgatatatgcatcatatttctcatatcgaaacccaaaaaggtaaagatacgtaagttttcttgcccttaatgccctaaaatgtaaaatagaattccatgggcagttatgactgccccattctgacccaactcattagggactactgccatttccaatgtatgggaaactcatatatgtagagaaaatctgcagatattcccttgcaagcagagaagttggaaaacaaaaacaaaaaaacaaaaaaccctcaaagctcctgctttgaatccaaaaacataaccatattttattaaaatggtcattaaagtaccaggcacattccaatcattcctggcaacatgaaccaccagatgtttactggattacacattttaccacaattggattctctgagcctcttaaggtgactctttggattgacaacacattttaataaaatatctaggaaaagggtataattttattaagtcaaggatgagcaatctaagaaaccagagttaaaaacaacaacaaaagcaaacctctatccatatcctcagactacctggaattatatgtgtttacagcaattaacaattggcaagaattagaagatcttgagtgggacataaatacaaaatacatgcaaaatgaccaaaaagtgaaatgaaaattgattcttacagaagtacatactgaatgtgccagtaaaattaaaagaaaaatccagtgtttagtacaaacccatcctccctgcctggccacccccacagtgctctgcagatggcatacaataccagtcacaggagcgccgatgcatttgctcagtgcgttttaaacacacacataattacaacaatccaagtcttcaggaaaataaaatgaggttaaagggtcacattccaaagcagtgatttattatttgtagtgatgccttaaaggttttattttttcctatttgatatcactctctcccaaaccccaggatctgagggcaaaaacaagcctctatttaaaaaagacaagatgaagaaaaaaattcatactgaggagaaaggttcatctgtcaatgtgaacaaggagtttacatcactagcattctactggttttcttggggaaagaagtctctgcagaaaagcccacaatccacatcccactcggagcaaaggcccttctcacccgaagagccctagtgattcatgtcatcgccatctgtcccaccggacacccctgaaaactcacttctggctagcaaaacaaggtgtgtgcaatttctgatactgttttatcaatcactgatttctctttaaggattatttcattaaaaaaaaaaaacctgccaatgttccaatacaggctccaaaggggtggggaaggcacccaggggtgctatgtaagactcattttgagacatgcctacaaatgtctatcagaatgaactaactgtatcccaagtaactaggaccaagtgcttgagccacccaagaccaggaactgctgtatttatccttttgtttttccttgaagttctatagcatagctgggaccattaaagccttagaagttaaaaagattgacgtttattgagacaataatgcaatgtctcattttatacatgaggaaggtgatattgtataaggttaggtgacatgctcaaggccatgaagctgtgtaacaacaagaccagagatgggcctgggtctt

SEQ ID NO: 50185 - DNA, 498 bp, Homo sapiens
taaaatgttttaaataacagtaaaaatccaacattgacagggaacagagttcaagaatggttttagatagagaaatgaattatcctacattagcgcattttctgattgaaggtaatttctttaaatgccaaaaaatctttataagatagttttactggcaatctttccaatctatttcacactccctgtctccttaatcaaaccaagtaaacaaaatgtaacatttttgatgactcactaagtacatccattactttgcagtgctgtaatgcagccattctgagaggctactgacgacacagatttgactgcctctcttcaaaacaactccagatgtaccatttggagacctagtgccctttaaggttgcaacattttctctttacctcattagcaaatcacttcttgctactgcccctctatctgaggaacatcacttccttgaactccattcttctaattcatggccaaactgagaaaacaattgtttctttaaaa

SEQ ID NO: 50186 - DNA, 439 bp, Homo sapiens
atcaaaaaacttcagatattcttctgcaactagtttgctaaattcgttgctataagaaaacagaatagacttggttattgaaaggtaaactatttaaaacacacacaaaacaggagagaattcagactccagcaatgggtcagaacgtacttcttgccaaggtgttttgcaacatctgatcttttgaatctgtccagctgataaaggcgtttggccaaccttttggctgcttccacattgctgctggtaccattactgagattttctggggtctccttttccaaaatttcagtgctccccatttcagaatgagcttctagccgtgttgttttcaccccagcattgctatgataattgataaagagagaaaataatagatttttcttatatggcaaaaaggaaaatatctgatgaaatattgatagttttcttttagttc

SEQ ID NO: 50187 - DNA, 1128 bp, Homo sapiens
acgaatgtccttgaggcttttgaagaaaaatcagatgaacagaaacgtagggggcggaaactaacgatagaacagtttctaccacgccctgcagggaaacatgttccttgtgaaggtacaggggttcgaaggttctactgctactcctggggaaactcacaccaggaagccatgaatgtctctgggaggttgtattcctggcagagagggtcacggactgctgacaaatgatcaacaaatgccaacaaatcagtacactgaccaaaagtaacaatcaactttcaaacatcttgtggtaacctggacttagtgctgtgcagaaattaaaagacggcctctgcctggatagaagttgcaggatgcacgggaggcgccggcaaaaccgactggtctcaactccctttgccctcacttgccacatctctctaggggtcttgctcatgaagagggaaattacagattatggcaggttggtgctggaaaaaaccctaaattgtttggcttggcccaacaacctcattttaaagatgaggtcagctcagaaacgggtaggtgacacagccaaagacagagctcatgtgaagtaccaggaaaaccccaggccccaccctgccaatcccatgctcccttaactctaaagggagaaaaattcgcctcaatttgtgcctacaatacccatgtcctggataagcaagagtcaagaaattcccgatttggcctcgacactgcctttcacctcttacatgctggtttcacttccgctgctgaggcgcacacttctgctttcatgcgagaaaccaggcccctctgaaaagggatggagaagaggcaccatcaaccagtcacttgagccaaggaaaagagactgcagtatgatctcctactgtcctggtgcttcccttcctggaaaaggtgcaattggggtttcaaagtaaatatctcccatcagtcaactcagagtgaagataaccagtggatgttacttccatgaaagaacaatgcaaaacgtcaagctgtgtaggcagcccaggaagactgcaaaccagccaaaagcactctctccctccctccccttgctctgccttaatcactgggcaagctatgcacactgttgctacttttttggta

SEQ ID NO: 50188 - DNA, 941 bp, Homo sapiens
tgtccaagatcacacggctaacgctggcacaaccacgattcaaacacaggcaatgtgcctctaaagtccaccctccctacccctaagctaaagtgcctccagggggattccttgccaagtaaaagaagtctaaagaaagaatataattttcaggattcagaaccatcgcaagccaaaaatatccacctctcaagaagcctggcccaaatataagaggatatagatgagagtgtgcacctagagacagcaccagggtagtggaaatacacccagaaacagaagctcagtgccgactaccggcatgaccttgggccaatgccttaaaactttccagctttagcttccttatctctgagctagagatgtttaaattacagatcagtataaccacgtggttaaagcaaacaatctcggctattaatctggattccgtcactttccaattatgttaccttgagcaagttatttaacctctgtgagcctcaatttccatctgaaaaaaaaaaacgggaataataatggggttttctgaggactaaatgaactgtacatagaaatacataaagcactcagagtagcaaccagtatagaataaaagctcaaggttttattactgatactataatcactatgacttttagtagaattacattttttataaaactacccacttcttcccttttcaaaatcctctcaaagaagagctattttttgagttggtttcaacagcagaaaggacaacctttgctggcttcatacaagcactaaccagtccgtgaatcaccaattccctatgagatgtaagctggatttgttgggcaagccttctaagaccgctccttccaaggggaggaaagagtggtaagcgcccttttgttctccctcttccttatgcctggaattcagaagatggagctggaagtgaagcagccctgaggaat

SEQ ID NO: 50189 - DNA, 1579 bp, Homo sapiens
accatcttaaggaccatctgtattagccataaatattaacacggcacataaacatgcatagaaaaaaatctggaaaaaataaaaaaccaagatacctgtggcacagtggatatgaggggcccaagatttggggaggggttcaatgctgaatttgacctcatcagtaatgctttaaatttctatgagaatgtactcatgaattaattatgtaactaaaatttaatttttataagaaaaaaaaagagtagtatggaaaaagtatatcagttgaggtactcattcattttacttgtcaagtgttatgtagttcttgaatcaaatctggctaaaattttctcataaagatgaccaatgtttagttccctaatctagaagcaatcaaccatccatccatccatccatccatccatcacaaaaaagagttctggtcggagaagaataccaagggacactgtctatcatattccaatttcagtggtggaggggatgcacaaagtaacatcctgatgtagtatttgtctagcttcaagtccagtgtttcctaaacttgggtatatctgagaattccttgaaacctcaccccaaatattctgttttcgcaggcctgcagtgggggctcaagattctgtatccctgccaaaccccacaggattctgatacagacggttcaaggaccacacactgagaaacactgctctaatccaagggaattacaacattaatctttccaccctcatcccaagttcaatgaactgcatcaactttgtaagtgacgtcacgttaggatggacagacgccaaaaaaagagataacatcaaggtgcaggcagacaacgagggagtcaaataagcagagtacacaatgtgctagtcagctttcactagattagttgtggcagtagcaaatcaccttcaaatgttagtggcttaaagtgaaggtttatttcttgctcagatgttgtggctgcttgagggccaactgtggctctgctccaggtgtgggtaggctgaagaagattcccccggcatctccttcattctggaatctatctgaaggggcagcaccacactagacacctgatatacatgacgtctcttttgtgtttttagagacagggtctcactctgtcacccaggctggaatgcagtggcacgatcatagttcactgcagccttgaactccaggactcaagggatcctccctcctcagcctcctgagtagctgggactataggcacaccacagggcctgtctttgtctattttaataatataattgttaatgttgatatattttcattttggttacatatatattactttcttggctatataaaagtttatgcataacaattattcatttatcaattttttactattatagtgttgcaacaatcaaccttctacacatttctttacattcttttctgattattcgtttatgaaaatctcctagaggagacaacattgagatcaaaggaaatgcatattcaatactcttgatacacgttgctgagctgtcctccagagaggctgtcccaggagtggacagggactgtgttttcagtcatgtctgaatct

SEQ ID NO: 50190 - DNA, 2940 bp, Homo sapiens
aggctggagtgtagtggtgcgaacttggctcacttcaacctccgcctcccgggttcaagtgattctccagcctcagcatcccaagttgctaggactacaggcacatgacactgcctcggctaatttttgtattttcagtagacaatgagtttcaccatgttggccaggctagtctcgaacccctgacctcaggtgatccacctgcctcagcctcccaaagtgctgggattacagaagtgagccaccatgcccggcctatattttagacccctaatcaactgaatgaatggaaggaagaaggaagctgaaagaaaaagacttttctgaggaagctgtatgatttaaggaaaggcagatcactggagaagtgtaaaacacgcttagaaaatgagagctaggcccgttcagcagattgtatcacatgaaggaaggctgaggagaatgaagtataagagatcagggcttctcaaactggggtgggcatgcacaacactggtatcccgctaaaactctggttctgatccagcaggtctggggtggggcctgacagtctgcatttctaacaagatcccaggtgatggtgatgctgctggtccatgaacttcactgcaaatcataagaaagtagatgattacactggagaggcagattctctctaaaaagtttccaatgtcaggctcaagagtttagagtatatttagttggtagtcaatttaaggaaaggggtgtgatgaaggtttctgagcaagggagacctaatcaccttaaaagaatcagattaataaaaatctttatatacattaccaaccgagtcttgcttagaggaccacttattttgttttgtttttgtcactttaatattttctcagttttggtaaatatagcacacaaccttgaggctattttagcaaagtttcagtgctttacatatatccctctctagcttaaaaatgattgttaataacagaagggacaattaacaaaggatccatggtttggcttttcctggcctccctacccctaatctcctctgacctcatcagctgaggccacaccccaaggctcctgggtgttgctttctcactgtttctggtggcaaccaggactccagttggggatcctgtttataaaaataacatagggataaccaagagttacatgcccccatcacttctcctctcccaagatgaaatcttaactacttattcagtaagcagtgactgccaattcttggggcatctatcacctcaacacacctggatttaagagtaaacaatcggctgggcatggtggctttcacctctaattccaacactctgggaggccaaggtgggcggatcacaaggtcaaagagattgagaccatcctggccaacacagtgaaaccccatctctaccaaaaatacaaaaattagctgggcatggtggcgcgcgcctgtagtcccagctactcgggaggctgaggcaggagaatcacttgaaccagggaggcggaggttatggtgagcggagatcacgtcactgcactctagcctggtaacagaacaagactccgtctcaaaaaaaaaaaaaaagaataaacaaccacacaggaaacaacagtgactgtacaatgtgagcaatgacttcaactcaggcaaacagtgaaaggtaagaacaccctagacagaatccacgggcccaacagctaattccacatctcatccatctctgttccctccagtcactagcattggaatgctgacagaagatggccagcatttgctacaattctttcacctattccattacagcctagacagggagggctgtaaaaaaagactcaggaataaggtaggcagaacggcctcagtaccttatgtctgggcattttgccaacatcctctcagatcctgctcatctagaacacagcagtttccgaggttcttatgaggctctctagcaggaagccactgcttgccaaagctcatgagatcaccaagttaataatgaatgcacttgtgggtggggtgaagtgtggtgcagctagcatgactgagacttcaaatgacctgggctgtgggaaatgagtcttggccagaacacttcagatatttgccacagcacgctcatacactgttagagtgtaaggaggtataacctttttcgaagataattaagctattgctaccacaatttgaaacacatatgcccttttatccagcaactcaactcttaataatttattccacagacacataccaaagaggaaggtacaatgatgttcatttcagcaaaatatgagaacttaaatgtcatcaagggcctggctaatatacaaaaatataataaaatataaggtagatattaaaaaagaatgagaaaaaccttgtgtgctacactgaaactaccgccaagatatactgttacatatataataatgtatgcatataatgtatcatctacataattatgtatgcacacaaacacacaggctaccctctgttaacagagattgtcttaggggaactgggtttctgaggttagagaaaggcctttgttttatagctcctgcccttttgttttatttatttatcatacacatgtattactatttcccttttttgtttactttcttttgggggaatatctatttatttacttttgggttcccaggacatagattctttctgagcactcaaggaattacagaaaacatttacaatgaaaaatgcaggtcaagctagcaagattaaatgcaaaaatcttaagatattagcaaagttaattcaacatcaaaaagataatctatcatgaccaacttggctttatcctaagaatgccaagctgttttaattttagaactcaatcaatataatttaccacactgatagatgaaaaagaaaaacccatatggttagcagaatacatgcataaaattatatgcaataaatgtgaatgt

SEQ ID NO: 50191 - DNA, 718 bp, Homo sapiens
caccgcgcctggccaggattttctattaaaaaatcttaagattactagtagtaaaatgctatttccatattaaacctgacaacatcaaagctacctattgactcacttaactatttccagaaagcccagcagataccagacttgccctgctgaaggcctttatgagctggtccacaaaacatcttagaacctttgaccatcagggtagggttctctttactatttcaaccagaaaattagaaaatcaaggaaaggcaaatgacctcagatgttggtaggaggaattcctttatatttactaaaaatatctactagctgccaaaagagtcacatgataaagttggtaaccagaaatggaggcatgtgaaagatacacacaggttatcaggaaaatcaggtgacggaagatacaggcttctcccaacacagactttttccaagtgctcagaattagaattgggtatcgagggcccattcacatattcctgggagctgcgaggagaattgcttccaatatccaagttctacaaaaggctagcaaaagatccaaacctaaaccaccaaaaccagactggtaactgctttgaggaactcactgagcactctgaccacagcagacattcatctcaagctcctcacggtggctccagatttataaacagaaatttatgtccacatttctatagttcctgaaattgccagagaaggaaattctgca

SEQ ID NO: 50192 - DNA, 486 bp, Homo sapiens
attatccaccccagggaatgcattccttaatgagaccatgcagacctcacatgtgcttaggcaggaatgaaaaaaccccagaatcctaggccacaagtttaaaacagtcaaataaggaccttcctatgtagattacaaattaaaaacaaaatggactcaagttagtttaggtagaaaaggtgtgtgtttactggcaaggtttggggaagctccctgtctctgggagggccggacacccaggctcaggcgggaacaagcagggcaaagctcagccaaggtcctgccacaccacaggctgaccgagtcactgcagccaccacggcctcccctcagtggacagtcccctcccatgcgcctgggctctggaccctgaatactgtcatgaggacaataccccatcaactggcctagctggccccaagagtcttcacaaacagaaccactctcctgagaaaataccagaatgggtggggctgattgtgctca

SEQ ID NO: 50193 - DNA, 2570 bp, Homo sapiens
aaaaattgggttcttgagccagactatctgagctcatttcctactagctgtatggctttgggaattaaacacttagcctcagtatcctcatctgtaaaacaggattaataatagcaactacttctgatggcttttgtggggattaaaggagctaacagataaaacagtccccctggcatatagtcagcagccaactaatgttatttgctttattactaatcattttaacatgtcacatggactgagagataatgggcctttttattttctttatgcttatctgtatttaaaaagatagagagatttgtcttttgaaaatacaaaattgtattctgatatgagagatgtatagaacatgtcatatgagaaatgttagtaaaaaacagtatatacagcccaaagtcatttttattaaaatatatttaatgttatgtaaataagtgtacattaaaaatttagacatgcactaaaatattaccagtggtctctctgggagatggattataaattatttatattttcttctttttacttatccctattttctgattttcctaaaatcaacacacattacttatgcaataagattttaactgtcgtaatttatttccaagcatagaagtcacaaaggaagaggttaaactgagaggcttccaatgatgtaaccagagatggacttttgagcaaaaacaagtgaacaatacatgatttactgagaacccatacgttcgatatcatgacgctagcaaggaaaacagcaattgatcatcagtacctaagactgccattctccattgggccaggctcccacctgactttagggaggaatttgaaagccagaatctcgccccaggtaaatgcaataggagccaaagcaggtaacacagctcagagctgaagtttgctgaaaaggccagagggcactgcctgcaaggctaaaagcaacactgcacgtccacacgctgggtttcaacacttttttcacagcagcaaatccataacggactctgagtgaactgggaaagaataactaaaacattcaaaatacttccagaaaatcattttgcatgatgacttctcttactatgtccagctctgagtaagcaaggaaggtcacaggattttgttcagatttggaagtagaaagggaaacgtgaggttatactcaggaaatccttttgctaagattcaaaaaatctgaaaattaacaaattctaaaacatgcacctttcaatttgcccctcctctccttaacatctctccataacctgagatggctacatctatggttggactggactagaggcaataaacacagacacagtaacctcaacatggggtttacagcgcaggaatgaggaggagccagtggcaggtatagaatgttcccacacctcaaccactgccaggctccgcagctcactgatgcagcagacactgcttcagagcactgctttattggtaccacttctgagaagcagcaaagcagacatacgtctttctctatcatcttctctgtctctcaatccctctcaatgacaatgactcattctctctttcaacctctctcccttcctctctcctaccctctaccctcattcccacccccttatcactacactaaggccagcaagaagccacaaccacagaagagcttccaggcagcagtgaagcagttcagtctcaaagaaagccagacaggagtccagatgcctgtgttccttctggagttcgctatatgacctcactataatccctttaccactgtgggcttattttctcatctggaggacgaatgggtaagaagagacttctgaggtctttttcctgctttaaaattctgtgatttcacaataactgaatacagtcactaaacgggaaaccaccaagacactggggggcggccagcacatagccatctttgttgtatttttcattgcaggcttccaaaatgtctgttgccaagaagtatatccaactagaccctcggcccatgttttaatttttatacactgtaattaaaagcagaatgacttgctttcactttggattatgtaatttctttctattcataatgagcagctcttacatgatgccaagtgagttttctcttagggagcacattcttactcaaccagagaactgttggcatttggattaatagaatcaatagtatctttcattccaaaaccagaaattgctgttttgatatggtctgcccacagttcttccaaggaaaatatttttattattttactactaatatctccttacagcttatacatgagtgaagcatttatttttatattaaataaatcatgctctttaaaataaaaatgaatatattcttcttgttagagctcggagttgaggccagtgactggccaatgaactcacaagtgtagacagggtgttacgcaagggacaagtttttcactaacaccacaagagtctctggcccaatgagaggagtttaatagaaattcttgctacaactaaaagaaagaaaagaacaaataaaagaatatactctcctactgtaaaatctacttaagaaaaagtaggttatc

SEQ ID NO: 50194 - DNA, 717 bp, Homo sapiens
tctcctgcctcagcttcccaagtagctgggattacaggcacctgccaccatgcccagctaatttttgtatttttagtaaaaacaaggcttcaccatgacagccaggctggtctcaactccgctgacctcaggcgatccacccgcctcgggctcccaaagtgctgggattacaggcgtgagccatggcgcccggccaagggagatttttatagggagatataagcatcagcgggtggggaaggtggctgacagaccttttgtagccactagaaatgaatcggcgaaacataaaaatctgcccaaaagtaactttgctattcaaacaaagtttcagatgcaagaaatatcttgcctcttcaaacactcactacttgcaccttgtagggacatgaaggcagagtcagaggagacactctggaagatcacaaagcctgctgtcaatttccaagcatttttccaatataacttcgccagaaaataacacagtcacgaagacagcagccatctaatggcatcgtctgtgccatcactcttatacctaaatttccactctcctagtgtcctatgactcaatcaaaactgtgcctatcaaataacttcttgaaagtacaagtttttgaaaatctacattcaaaaaagcatgtaagtttccatatacagagaaaagcagttccactggcccttaaccagtaatctcctagaggccaaacaaaagaa

SEQ ID NO: 50195 - DNA, 1854 bp, Homo sapiens
aaattaagctgggcgcagtggcgtgtacctgtggtcccagccactcgggaggctgagacaggagaattgcttgagtctgagaggcaggggttgcagtgagctgagatcgcaccattgcactccagcctgggtgacagagtgagatcttgtgtcaacaacaacaacagaaaaatcaggacttaacaagaaacttagaaaatgctgctttctcagaagacccgtgtgaaaataccatgtaagaaaagaacaccagcttaggtcaaaatgttaattttcccagttatcctaaatccctaactccaataataatcttttaaaaatatccttcaacatgtataaattattctgattcatctcactgatgtacactcagaggaaagggaatttcaaaccagatggctcaggagtgagtggtcctcaagtaagcctcaaggagtgagtggtctgccatggccgcagcctgacatgcaggaaggggagaagagcgggcggatccctcacaccaccggtgtcaccaagagagaaaatgctctgccacctctgtgccctgatgtgtcaacaaagtccctccccactaggcaccaactgggcccaagtttgttgaccttctgggcgcagtgaaaaacctttcttttggtagagcaaacaagcactgcagggacatgcactgtttttatataaataagatagcacacgcaaagattcattattaatgttgagttatgccttattttcaaatgaggcatggacatttggtaatttggatttaagaataacttgttaactatatgctgcaaattatcctttttctccattgtaaattgcaacagccactacaacactacttaatttggagcttgtgaaaaatgtccttgaaagatggtcaacgtaactcagaaacactctttgaaaaaataatgccaccacttaaattctttccagcaaatccctgagtctgcatacaatatcacaaacaacacaagctgtcaagatatgggcactccgaacaaatgctctggagaatttcacatggatcctgtactctcctaaatgaaagccaggctggtttaactgtaaaagaactaggaagaactgagaggcaatattcaaagtgaaaacacttccactcttagcaaagggaagccaaggacctctgtgcttggcccagacggtccgggaagaacccctaaatggtgagaatcacaacagcagtaattcaaggtcacactagatccccagcctcctataagcctgattcacatactaaactccacagactttggtcaccagattattttttacagtctgacccaacttcaatcatgtctgaattcctttccaaaaattggaaacgatcactatccataactcacctcccaatccaacccaaacccaaagacactcttttcataatgtccaaatgacattaccccatgtaaacctcaaacaaaccagtctttaagccaaagcagatacacattttaatattcacatggttttgcctcagcatctcttaaccaagactgcaattaacctatcaccacactggtgtcttagtttatgaataatgcatgacaaatcacacctgaatttctataaaagaaaaaaaatcacctccaaaagtagtagtaccatggacatgttttttcaatgtaatgccacgctaaattccactcaaataattttccatcagggctggcaaacaaatatgtaaatatcaaggttttagaaagagggcagagccattgactgaaagtacctttaaatttttctttttcaatgagctacttccatcttactttatttttttatttccaaattcccaagatttactagcctgtaagaatttccaag

SEQ ID NO: 50196 - DNA, 3268 bp, Homo sapiens
aaaaaaaaaaaaacaacaacaacattcaaccacggaatttggccgtaataaggttattttagctttgtagctctaatcactctcccacattcaatggtcaggataagagtgctgatccattcacagaacacacaaacagatatttagaatgtgaaattaagagtacatcactgaataagtaatgcataaaacgtgtctaggcatggaaatatcaaatggtagggctagaaggctctgaaagagcatctacctaatcccctcaccctaccaggaaactgtagcgacagaagttaaataatttgcccaagacggtggcaaaaactcacccagtcagtggcaaagcctctaagctaggtgtcctacctacagatccaagtccctttcttgataccactctactccttttagtacaaaaagcttctattaatgaaatatcttacaagacaaatcacttgtggatggatataaaaaggttgtggaaggacatccagccagccactaaaaactggttgaaaaggtgctaatttattttgcatttgcttaactggtgatgttgagcatgttgcacttttaactgctgaagaggaatttcatgactttttgaaaagaaaacctcttggtttgtaaatactctcagaaaagaaaggatcatttcttggaaaagggtagaaagtgaattccctttcctttagcaggggacatcctttccctcacatctcacaaaaatccaatcaacccctccctttcaaggtccagcataactgccagctcctctctgagaacttccaagcccggaggccagaagcttcctctgagatcctccatggtagcctacgcataagtctctcccaggcaagctctcaagcacgcttcttgaaagcagaaatcctatcctacttacctagctaccgggctttgcaaaatcctttgcacatactcaattacaacgaacgcattgaggcatttgttgccagaatcccacttacagtaattttccagatctccgtcttccctacaccaacacctggacccactcaagagttattctggagcggaaatcctggatcccgctatcgggagaaccagtgtctagaaaatgaaatcgtggtgcccattccatcctctgcctagtgggcgtttaacatcctttgacatcgaggggaatggcaaaacgaaacatttattatttaggtcaccaacaacattctaaacccacgtcctctaatcggtgttaatgtgtttaaaaaaaaaattcagaacatcattcgccagaacggaaagctgaaaacggcggataaagttaaatgcatgtaaaacagaatgacttaaacatctgtaaaagctcctgggaattgcaccgaataatcttcccttgtccgtttgctcgctcaattcaagtttgtttagtttagtctttttttctttctttctgacagaaacgtgatagtccctaaatacaagctgaccgggcaaagaaagatcggcatacgaggtcctctttcatgttgccttcttttgatagcttttctccaaagtctgaggttttcaaagccgaggtatgaactaaaacccctaaaccttaacaccacaaagttgaccctgctgggctcctaaaaaacacaaagcaagcaagcgcgaagagaaaaatcgcaccctgcacctatccagacagcacaaacccaggtggccccgggatcctgggggacagagcggcgacaaagcaacacaaaccccacgtcgaacagcggcgccgcgtgcgcaccccgcgcccgcgccccggccccggagctcaccgctgcgctccttccttccatcttccatcgccagcccggccgcgcgccgaaaccgccgccgggcgctccggggccgcagcctcagggcgcgagtgccggcggccagcgccgcgtgctctttgttgagctcccgggactgccgagaggcggcggcccgcgcgcaccctggcggaggctggcgaggctgcgagcccgcggcagccgcccgcccggcccccagtaacgtcaaagcgaaggcggcgcaggcgggccggcggtggcgggccccgggggcggagggcggagggcggagaggcggggccgacgcctcggggaggggggaggtggctgggcctccgaggcgggggcggggtctccagggcaggggcggggcctccgggggaggctggaggcgatccagaccctcgcagtgcagccctcgagcggcccggaccgtccgctgcctcccgcagccgcgcgcccgccctgggcccagcctccagcccgcgagcgaaaacctgcctgttgctttgtcttcttccttcacagttttcccaccctgagaaaagtgagaggtgctttccctggtgtttcctctcaggaagggccgtgtgactggagccgcgagttgggcgccgtctcgccggggctggaggtacgcgggcttcgggacacgcacctaggcgtccctcggggtcccggcctctctgaccgggctcccccggcaccgatccgcggccggagcgtttagtcccggggacccgtcgagccctgaaagggccatttccccctgaggcgagtccccccaggcgccccgcagcctggcctcgggactgcccccaccgacagtgcgtgcgcggggagaggtcacttaaaactgcattttcgaacattagtgccccggacccgcaccttttttcctccgtcctttgatctgtgccgcagaggcaagggctggaacggcgccctcccctggtagagggacggagagaccgcaaatctttccccctgggaggtccgttaagtagatccaagcacctggaggcggaacctgtgtggccggctacagggtggtcctgtgtatgtgttaccgccttattgttccaaagaacagtctttttcaagtgacaggtagaagacgccccaataacgagaagtgactgacttggccaagcttagagatgggagtggagtcaggttccctggtggccccacgatctcgcccaccatgtcagcatgggctgcccggtgagcatagctgagatgcaccaaggccacataagtcacctactttgccttggctgccccatctgcatctatcaaaggaagccttggacacccaccagaggagccagcatgagggagtgtatgcctttatacaaattcactccaacttcagaaaaacgtccgcagctcatgctccccctgccagagcagcagtgtgagcagctgtgtaggtttggaagcaccccagtcacttgggcattgatatggtt

SEQ ID NO: 50197 - DNA, 896 bp, Homo sapiens
cttgcgtggtacagtatgttcatatctatcattccagctcaggctcacagaatctgagagttgggaagaaattcaagcatcacctcatccaaggcttcatttgagggataagaaaatggaaagacatcattgcaccaagagtcattgcattctccaggatgcctcccacagaaggcaccagaacagcccttggactctgaccatgtgttctttgaacaaaaaagtcgggatcataactctctgagtataactcgaacagcttgtgaaaggatgggaaatccaacataagtgggctggtagaaccagaaggtggaaccacagtcgggtggttcaggcacagaggcttcccagggtgtcacaagccagcagcaaggggtgtcactcaaggctcaggatggaagctgttgtcttatgaactgcagggagccacagcaggggtcaatgaagcaggcaggagctgttctccagagacccacagcagttgcgtctgcatgactcatttcctcccactggagccaactgggtgactactgggcttatcaaacccagccctctggacctttttctggccaccttggaggaatgttcctggcatatctacccatgcactctatcttttcagctgaccgcagctatctgcctttaaatttccaacgtgggacccttgtgggtacgaaggaaaatccctccatcagtcaggcacatgggaagtgatttctgatcaagatgtggaagagagtgattttccacaagcctgaaagttcaacccagctcatcagttcacagctcaggtctgtgtgctgggaatacaggactggctgcacaatcccttggttttggctcccctgcagcctacatagaggtgatatctgccagagtccccaggacacatgaga

SEQ ID NO: 50198 - DNA, 1483 bp, Homo sapiens
acattttacattcgtcacttctaatctttagaacgaagtaaatattagaatctctgtctcaaagacatggacacaagtctgcagaagtgaaactctttccctgaagtgacagcaatggagtggatgcgggtccacgttgttcaggctccaaagtccagctgtttccatgatgccaggctgcttcctaattagtatatttaggagataactgtattttagagataaagacctgagatttggagaggggaagaaaagaagaaaacattttcacctcctctccaggaaccagggcccgtcatcccctcaacctcttaaactcgtgctttttccaaactgagtccctggtgaccattttttgcctctccctgaaaagcaagcccagttcatttcttcaggagatgacactgtgtcagatatttccccttgtgatgattatttctggaagaaccagatgggaaagcttgggaaacattctaattagaaagagtctttcatttccatccggtttctatttcccttccagccccgatccccatcccatgcacacattggcacgttctgagcacttctttgtatttcaggtcgatatgtgcctaccctggcagctgatcacacaggcagactgcttttgaagtaaatggaaagactgcccaaacagacaagagtactgagccacggggagtttgaatgccctgttctgtgtcaagcccagacggccggttctcttattcatggttactgaagctctttatgctaaagagtgctgggcagtgagagacagggtcctttagccaggcagggctcaggttccacaccatgaagtgagtgggaagctgcggtagatgccatttgagtgtgaggagtgaggtgtggggtggctgtgctctaagccacccaggcaggagccaggggctgtacctcctccccttaacctctcattgctcctcagtgaggtcatcctcacagtgttgtgcatttactggaagcagccttcacaaaaccttgattagatgaataggaattacttctaagagcacattttctaagtagtcagctcatgtctgttgaccttggcaatggctgcagttgtatctagtgcccctgtgagacaagcagttcccattggctgctcgatttaatactccccgggctacagcgatgaagtaactgaggcctgagagctgaagcaacttgcccaaggtcactaacaagaggcaaagccagttcttgaaccttttttgtcctaactccaacctggggctctgaagtcctgccgctccactggaagggccctcagtgccgtctatgcccagggcggggcactcaggttgggtggggatgcagccaccctgagtgggcccgtgatctgcttcacctctgcctggcagaactggaggtatggacaaccttggcagggtatgagtgggataggagcacatgtgctcagctcacatgctctatgcctttcagaagcaaatctcgc

SEQ ID NO: 50199 - DNA, 2395 bp, Homo sapiens
acttttgtaaagcaacttgtaaaatctgaaaccatatcaataaactttctaaatctctttacaacaaacccttcagtacattttctaccttgaatggctgttttatccattcgtgattttgtttcatcatttgccatttggaaaatatttgtttgctacattacaaaaacattctaaatgttgacacatttcattacataacattgaaaaatcttattagtcaacatcactggtgatctcatcagaaaagtttcatgtatggaaactatcaaacgcatggtggcagatattagtttcctaaaatgctaatttttacttgaaacctcaaatattattatttgcaacaaatattgcccattgttgtgctctaagtgatctgcttgactcactttgctcatttttgagaaactatctgtgaaatatccaagtctaaataaccataatttgtgagtcatttgtttcaagtaaaaatagtgttccattttaagaagtggcatgtttaccttgcaacctgaataatcatacaagtacttctccctgagaatcaatcaagtgcatttttggttggcaacagaactttatgtgtattttcccctttgtcccacagaatagtaaagatatgtgtgctcaaggggttgatttaataaaattaataattattattgctttattaagtaaattttattttttgagatggagtttcactctcgttgcccaggctggagtgtaatggtgcaatctctgcctcctgggttcaagtgattctcctgctcagcttcctaagtagctgggattacaggcatgtgacaccatgcctggctaatttattttttgcatttagtagagacagggtttcaccatgttggccagactggtcttgaacttttgatctcaggtgactcacccacttcggcctcccaaagcactgggattacaggcatgagccaccaggcctggccaagtacgttcttaagtaaaattagcatttccttcattaaaagtgcatggtagcgaggaatactatgacaactaatacagtttggtgccatgtcattgttcaatgtgccagcagtttgacaccattattgcttttgcaccattagtgccatgacaaacacagcaaaaaagggcaaataatgtcttagtattattacgaagatagttctgatcttatggatcctctgagaggatcttggagattccacagaagtctacaaaccgtgttttgagaatgactgaactgaaggtctatacactgatagacttttgatttacattcaattccttcagaggctctaggcaagtccatcacactttggaagtaagaggtgagctttgtacattctttttttcatggccaaaaactctagcctagtgcttaacacactgtttaaactctcccatagtattcaaaacaagaaagatttgatggtccattatgagtcactgatcaaatttggcaataggattgagttccagatcctacacattgaaagggattgtaacaaaccagaaaccctgatgcacaagaaatgaggaaagatacagaaagactttgtccccgagaagagaaaatgaatgaaaatgcataactattttcaactaatatatgagttgtcatatgtaagagacaatgaactcagcctttgtggcttcagagggcaagatatcataatgactaataaggaggtacattcttactcaaccaaataacttcctaataagtagggttactaaagaagaacaagctagttcatgaggtcactggttcctgtcattacaaggctataaactgaactcaagtgactgccaaacaccaaacaggacatccttggatagggaccaagtcctgtactccaagcgtaaccttgggagtggtgagtgagcttccaggaagcagttatcaacaaggctggccactcacactctgaggtcactctctcaaggtgaaatcaatgcctaactaaaggcatttatgcaattattggaataattcatgtaccacacagcagacatattggatgaaagtcctgccataatccagtatgacctcatcttaactaattgcatctgcaaccacactatctccaataaggccacatactaggggctaggacttgaaaacatcttttgtgggggacacaattcaacccgtaacaattactagtgaagaataggttctagtgagattccttattatattttaattaatgaaatctgtttctcttttatttaaattacagaaaaacctaggcaacattgcctatattccctttccctcttatcaatccccattcaatatgatttttagagtatggatgtaatcattgcatagtaattggattcctaatactacctgatggcaaaatgcttccaatgtggacactagaattga

SEQ ID NO: 50200 - DNA, 648 bp, Homo sapiens
gaaggttgtactcctgcttccttttggggtctgtggtcagtcttctcttgttcttcaggatcagtgactcattggacaccttaattcaggagataacaacaatggtagctcctgaaatgccccacgaaagctcaggtggactatagtgttcctcctgacgtaagccataaaacaaaacatgcttgacctgggtatagagaaccctgaatgagcttcaatattcctttttggtttgttagtaacaagagccagccaagggcagatatgagtcagactatggtgtcacgtacatcccaggctgaccttgaacttgctctgcctgttagaggcccagggacagcaaagagaagcttcccctgccttgttctgggcatgatcactttgcagaggacaatctaatcctttcaacttgacttgttttcatttgtgattttttttttccctcttcctatcaaggctcctaaggacatctgacagcctgatgacaaccaccttaaggttcatcaagacccagacaaaacagaatttcacatcagcagaaagccgagcacctcctgtcttctttccaggactgacatgtttagtcatacacccttctaagttttcttcttggttttacttacttgtgtggtatggccaggggccaag

SEQ ID NO: 50201 - DNA, 1041 bp, Homo sapiens
cggatactaggcttaatacctgggtgattaaataatctatacaacaaaccaacacgcatgacacatgtttacctaggtaacaaacctgcacatcctgcccatgaagccctgaacttaaaataagttttttttttttaaaaaaagaatcactgtatcatcaaatgctctatttatacttaaatcgtttggtttgcttggttcattgatttgttttcccccctttagtcagcccagtttctgttaacacagcatatctgaaaccactaacatttggagttttgccaggcttattctcaatgcatgcatttggcaaactcattcttatttattcaggattgcagtacttaagaaggttgtattcaccaatttcctgcatggcctcaattgagtcttgtctgtaaaaggatcatatgacgccgctgttggattccaggataaaaacccgggcatgcatctctgtccttgaacgaactgagaaagcgggtctcctttccgactgtagccctcagaggacttctgtgtattcccggagccggtggcttccagagcctccagaagcctccagtgccgcctgctggaagaacattttatttcatgcaactttacgaggttgaatgcggtgaacccgggaaacttggaaattcccataaaaaggcaaaggctgtaagccacccaattcatattctcttaatgtcagcaaatagaggcccaccctaaagggagattctgcaaaaaggagagagggaggagagggctggagagagggaagcaggaagaaaggaaaaatcagttgctgctctttggctaggcagtcacctggttaggtgccctacatactctatctctcagccaatgcacagctgggcagctttatgggatgcatagaaataacaatatcaatatcatatggaaaacatatgccctaaaacaacaaaagcaagatattagaacccatggacctgatccacattgaataaatattatattgtatgccaacatcggctctaagccaatcaaaacagctctcaactcaataagtct

SEQ ID NO: 50202 - DNA, 1107 bp, Homo sapiens
taaaaccccatctctacaaaaaatacaaaaattagcttggcgtgttggcaggtgcctgtaatcccagctacttgggaggctgaggcagcagaatcgcttgaacccaggatgtggaggttccagtgagctgaggtcaggccattgcactccagcctggggaacaagagcgaaactccatctcaaaatcaatcaatcaatcataaaaagagaatcctgtggttagaggacgccctcttcaggtagtgacccttctcttgcaacatcatgtttattcaaggttgctcattcctgttcatccatgtgtggaatgtctcttggacagcctgggagtttgagggctgaaattgaagtgaagctactatgtgtccagtcatgggtggctgataagagcctgggattttattttattttattttttttgagacagtctccctctgtcgcccaggctggagtgcagtgacacaatctcggctcactgcaagctccgcctcccgggttcatgccattctcctgcctcagcctcccgagtagctgggactacagtcgcccgccaccacgcctggctaatttttgtatttttagtacagacggggtttcaccatgttagccaggatggtgtcgatctcctgacctcgtgatccacctgcctcggcctcccaaagtgctgggattgcaggggccgggatttaaatacatcttctgcaaaggggcttccacgtgtagaaattttctgtcatgcctaaaattcaacccccagagagtcattccttctgcatctggagaacatggtcttccagggagcattattacatggcactactcctagagaaatcactcctgaaggtgccattacaatagcagcagcataagaagagaagtgaatatcatttgcacattaatatcattatcttatgccaggcacagcgctgagccctttatgtgcatgatctcactatattccaacagtttgaggtgggcatggccagccccatttttatacataaggaaactgtgcttcagggagattaggaaacatgagctaagtcatgcaattagtaggtggtggacctgggcacagtgccaaaaactgggtgggtgaaaacaata

SEQ ID NO: 50203 - DNA, 716 bp, Homo sapiens
ttcacatccattattcaatttaatccttgtagtggccctttggataggccgatgtggtttaaaaagtatgtaaatgagaaagcttgtgtgactgacttacccacagccatgcacttcccgcaaggtagatcaagggccagtggccctgtctgttaaccttttgcccgggacaccttggttctaatgctagttttaccacaaactaaactgacttgagccactttatttatcttggcctcactttcctcatgtatagaaaaagacagagttgagccaggtgacttttgagatgtcttctagctctgagattctacagttcagatcttgggaccagttcagacccaggcatttagcctcttaccgttggctgggagcaagagaggagagccgggacacagcacagggatgtgggagtggtgtcgaagcatcccagactttacctctgtcatcatttggccctggagcagtgaagtgccgctgtgcaaacagcaaacaatacacactgcactgcactcgcccctaaaactagagaatggtgccaaggaatcttgctgggaacgcccttctcatcagctcacactcacacacgccaagagcatgtacgcacaccgtacacacaaagtcaaaggaccgagactcttcaggttctatatgagagccttattaaggacgcttcaaaattctcaccatcagccagtggacagggggtcagcagc

SEQ ID NO: 50204 - DNA, 1342 bp, Homo sapiens
gttcacaccattctcctgcctcagcatcccgagtagctgggactacatgcacccaccaccatgcccggctaattttttgtacttttagtagagacggggtttcaccgtgttagccaggatggtctcgatctcctgacctcgtgatctccccgcctcggcctcccaaagtgctggtattagaggcatgagccacggcgcccagccattttgtctgctttgttactgctacatctccacagcccggagcagtgaccaacacgtggtggatattcctgaatatttctcacatgaatgaactaattgcctcttgcttctcttgcactgtgcgaagtgctttatgtaagacgtgtatttgaacactcttggcaattccatgaggcagatgttatttggaggaattacaatgtgtcccctcgggcccacagcaatgttttagagtcctcatcagggcaaggtctgttggatgtttcccataaggtttcacagggcagtgttcctcactttggtaaatttactctggaccaaggtgtatggactttggcctcgctggatcagaaacactttttcaaattgccaacgttttcattaacagtgagagagaaaactgcccaatgaacaggcgtgaacaccacgtgctgagtatattcctttctatgaagtcagacccacatgggaagccaaccgaacaacagcaccactgcaagcctccagcatttatctctacgttaggactttcccccacaaagctcagcccaagtcaaagctccctctgctttgggcagagcttggtgagagagctgattcatctcctttgctcctgttttcattctccatgcttctctttcctgctctgtgccccaagaccccagcctttacagcttgcctgctgggtttatttcttttgacttctggtcagacaccagtgggagtcaccagcaggacagttgatgaacaggaagagaaggaatcgggatatttccccaaacttcccactgcaggctcatcaatttggcggtggctattttcatgtacagccgagctctatctagccaggtccagtgatgtcatttctccttccaagcctggggcagcggcggaggaggggatagctcccaactgtgcaaaagccctggaggttccaccatctcttgttggttctcttaggtctatccacacctttgttaacctccttatgaaactctcttcaattaatctttaagtgtgctacctgttttctaccagcacccagactgatacaatgtcactgccagggattgacttgaaggctttccattgtctgtacttcaaagattaatcaactcaccaactcgtctatgaatta

SEQ ID NO: 50205 - DNA, 893 bp, Homo sapiens
gtcaagaagcaggaaatgattactattaataaatacgcttacgattttcagagaatggtttccctttcaaaagcattatactgattgaccattcaacaatccaaataatgaagcatacttgacggaggcaaaacattttgcaatgactaaaaattgttatgcttcattcactacgtctctaagtatttaaatcaaagaatacttttcaagctgtgtttcataaccactcaaacaatacgactatccaaggaagttataaaagtaaagagtcgccttgaaaaattatttccccatgcgatgtcagttgaaaagctggttagacagcttcactttcagacaggcatgctggcttggaaacagtaagtgctagccagatgctcacgccaacagtgactcagagatatgctgttgcttcatggcagggaggccagcgttgcagatagattagattctgtggatgatgctgtggatgccgagcatactttaggtttgcaactttgctgacacaaattcaagaggaatgtgaaatgtgacaaagaagactcctaatccatttttcattccaggaaggcataatgcataaaggttaaggacacaaacatgcgaatctaacaacctggactgatatccaagcgcttccactcttaatctttggcaagtaacttctctgccttcttttcctcatctgtaacacagatataacaaaaggtttactttgacggttaaatgaattaaaacacgtaagatactcagtgtccagcacatagtaaatgttcaattagtgtaagcttttcttgtttcatggaaggctacttgaattgtttcttctccccccaccccccacccaccgcctgtgccaagtggagactcgttctgttgcccaggctggagtg

SEQ ID NO: 50206 - DNA, 2385 bp, Homo sapiens
cagaggttagtagcacagtgataaagctgttataaggaaggacttgccaggacctggagagagactgggtgtgaggaaggtaggctgtcacagtgtcctgtgggatttttcctaactgataaaccaccctgtatggttcaactgatgcatccatgcagggctaggattcattctgacctcgtcatagcagctttccaggggccaatcccactccagcctaaagcaccccatatgctatcatttaaactgcagtaggaactaagccttacaccagaaattcctccctgatgggattcctggaattgttcctaaatagctgggtcttatttcctgacaatgccgcctgccccgaggcttgatgtaactctgcacagcttctgcagtttggagaggcagggaaatgccattttgtgtttgaatccagcaggtcaggctcctaaagaggtcaggtagtccgtggagaggactactggtgtttactgtttattacatctctcccaatacacaaaatctggggttcaccaaagcaggcggttttcttccacatgctcctctaggatggaaaatgccctccagtggaaatgcctttccactgtgcttctgctcaattttcctccaagatttcctctaactgtggactgccagctcctccctgacgtcttcaggcaccaagccaacctgttcttgttgcaatcctcaagactcctttcagcatcttaacttttcccccagttttctttcattttctccacctgtctgtgttgactgcggtctccttccttccagccttttccttccttcatcttgtcctacaaagccacacgtgtaccgacaagtgccaaagagtttgatcatttacttaatgtcaacaaaagaaaaaaaaaaaaagctccagagtcgccttggcctgcagcacccaagcagagtgaacaagtggggcctgcgcaccctcctaccctacacctagcaaggaaccccgagctctgaaacgtggaaaggcccagatctgcagatttaatctaagtcctgcagtccccaagagatcacagactgcagatccctgtctcatgaactaagagaggagaggacaagcctaccccggactaccgcagctcggggacagcgcgcgggccaggcggcccgagatgcgcaggccacgcagcctcgccgacgagtggccctggagagcctccaggcgcccgggtggggccgcgattgcgccccgccagtcaccccggcatgtgggcgcggcggggcggcgcgggcgggacggctacaagagctgttttgcgtccgggccggagtatttgctcagcccgcctgcgccgcttgggacgcctctgcctttccctccctcccttccccgacggcttctggcggccaagtggatgtggcgggtgatcgagccaccctgcccaggggcgcccagcactggtaggtgctgggggtggggcgaggctttggggagagtgtgcgtggggtgggagtagggggaagggaatttcctcggaggttgcatgggtgcatgggaggcgcaggggccagagcgggcgggcggaagcctcacccccgcctccaccccttcgcggcgcccggggcgggctcaggtgcggggttgggcggcgagagcggccgcggcgggtgtccggtgtccggtgtccggtgtccggtgtctggagccgctggctaggtgagcggcggtccccggggcctgggggcttgcagggggtggcgggggaacttcgagggagagggtctgccggggctgaggaccttcggggaagttctggaatccggcagggacacgcggcgcgtgcttccacccgcggggagtgcaggccccgggagggtccgggctggcctagagtttctagactcctagcaggagcacgtcctcgacttgcgcatggaaatcttccaggagggaagtcccgggaaacggtggcagctggcgcagcacccccgcagcacgttccccgcgcaccggcacccaggggcgcccccacgtggggtctgggagcgcgcggaggccagtgcagcgccgcctccctcgggctgcagcggcggggctggcccagacccagaccgggtgcccagtgcgctcagccaagcggcgcccctgcccgctcctggactcgggggtcacgcgggcaccggaaggagctacagtttgtaggttttctgagttgtctctcccttcccagggagcttagagaagcagcaagcgtggcacctccccctttcaaacagatgctcctcatcgctccaaaggctttcgtttgattgctggtttaatagaaacaacgacttgggtacgattattttaaaatagtgaataaataagtggaaagcatacaggggcatagatttggcatatgagtggaa

SEQ ID NO: 50207 - DNA, 1363 bp, Homo sapiens
aagtcttttgttttccagaatagatatatttacatagtttcctgctgattacaaaagtatgatggtttatgggacttagaaattgtttaaaaatagagagagaaagtatgacagtgtggtaatatttttaagccaatattttaaaatagaaatgtggaaagtagaatgaaacctcagtaggatttccaaccacaggagaacttctaggaggccactgtgcactctcgctttatggtttctctttcaaggagccatgcggtaaagtcatataaatgaaggatcctttgttatgaacctaatgacctcttcatccccctagtttatctggtctgtccatttagattttattaaactaggttatctggaaaaagcacacctaaaactcggtgaccttccagaatgtagatggatgttctctcttgcacctgccctgattttcatggctctagtaggttatctggaaattacattatccttttgtgaagaggaaagtacataattttgtttatttaatgctactttttagggaaattgcagaaaatgcatggtggtctagtttttatttcttcctttttcttccttgagcatggctctattttggtttggtttgggatgagttactctgtgacatatcaaaagtggtattttcttttgaaataggtactttgcagagagccttttaatttcttcctgtgacttttttttttctttcttttttcagccacacagttggtggtttgttaggctctggggtaataatgtgtttgcttagttgggagctggacaaacctctgtgaactttttttgtttgcctgagattgacctgtataaagttagggtttgttttctttttttttttgacagagtatctttagaaattacaggatagaggttatacaaactcttaacaaagtgtgcctcagattttcttcttctcttttctctctgaactgaaaagtgatactgtgtttcctcctagcttttttttttaaacccgtcctagccagtgtccacacattttaacacgctgcctgaatgtgggctctttctctctgcaggttcagtgaacagcattttggacaggacatttggtgccaggtctgagtagccagtttgctgaattattgtcccagtcagccaggattgtgagctgtttgggaagtttcgtggaaacgcccaagtgccagcacaggtggagggacacctggaggccagtttcaggaacttttgccacaagtataaaagacttcagaagtgcaaagatgctgaaacagatactgtcggagatgtacatagatcctgatctactggcagagctcagcgaagaacagaaacagatcctgttcttcaagatgagagagga

SEQ ID NO: 50208 - DNA, 829 bp, Homo sapiens
ctgtcattgcagcactttgggtggccgaggtaggaggatcacttgagtccaggagttctgaccagcctggaaatatagtgagaccttttctttaggaaaaataaaaaattagctgggcatggtggtacatgcctatagtcccaactacttgggaggctgaggtggtgtaattgcttgagctcaggagatcgaggccacactgaactgaaatcacacctttgcactccaccctgggtgacagagtgagactgtgtgtcaaaaaaaaaaaaaaaaaaaaaaagacttaaagcatatacacatacagacacagaaaaatacacattgtccaccctcctcactccgttctcactaacccccacacccccgccttgctgtttacatgcgaagtctgtcatgggtgaataccaaagttgtgaaaacacagcacacttttcaaggtcacttgcagaggcatctaagaccgtctcttttcatgtttcattaaaccaggaaaataaaattttgtaaaatcacatatggtttcaaagattgagaaaatgaatctctcttgcatccctggtatatgcccaggttcacaaaggaggtcagtgtagcgtcctttactttttactgtcttttattaaaacttttttccagtgatgcctttatcatgacaaggaaataaacagaaatatgtcatttcctcttgttatgatcaatacaactatttatgaaacacctcctgtttcagacactatgtgaagcacatttatgcatataatgcctaaccttcacaaaacttctgcaaagtcagcagtgacagtcctgttttacagatgatgagacttag

SEQ ID NO: 50209 - DNA, 1099 bp, Homo sapiens
ttatttcatatactacaatttccctgaattttatcaggactaagagttttttggtgcagcttctagggttttctgtatgtaagatcaggtcatctgcaaacagacaatttgagttcctcttttccaatttggatgtgcttcattgctttctcttgactcattcctgtgcctaggactttcagtactatgttgaataaaagtgatgaaagtggacattcttgttttgttccaagttttaaaggaaaaactttccatttttcctctttcagcatgtaaactgtgattttgtcatatatgacctgtattgggttgaggtacattccttctgtacttaatgtgtttaaaggttttatcatgaagggatattgaattttagtaaatgctttacctgtgtctgttgagatgatcttgtggtctttgtcttttattctgttaatgtgatgtgtcatgttcattgattcgtttatgttgaaccatccttgcgtccctgagatgaatttcctttgaacatggtgaaggatgtttttgatgtgctgttggatttggtttgctagtattttgttgtggatttttgtatctatgttcatcatcatcaggaatattggcctctagatttctttttttgttgtgtctttgtctggttttgatatcaaggtaatgctgacttcatagaatgagttaggaagaattcctccaacttcagttttttgcagtagtttgagaagaattggtattagtatttctttaaatgattgataggatttggtagtgaatccatcaggtcctgggctttttttgataggacactttattaatgattcagtctcgttagtcattattggtctgttaagttttctgttttttcatgagtgaattttggtaggttgtatgtgtccaggaatttattgatttacttccaagttttccattttgttgacatacagttgttgataatagtctctagtgatctttttatttctgtggtatcagttgtgatgtctcctttttcatctctgattttatttatttgagtcatctctttttctttgtgtagctaaacttatgtgagttttgttattaaaaccactcttcatttcat

SEQ ID NO: 50210 - DNA, 968 bp, Homo sapiens
gaggggaaaactagctgagtacacagatggaggtaagtacaggtgaaaccctgcattgaccacttgagtgctcagatggaggtgggagcaggtgctcagcaggtctaggagaaactgagactgactgcctagactaggatcaggacacgtcatgttctggagttgaatcttgcagagtgagtaggagttttccaggaggaagctgtggagaaaaataccattgaactgccctgtggggcagtccctgccacttggatttccaaccagagcctgctggtgtttgagttacttctgggctcttgggtctgtttaccatctcctatgcaaaaaatgtttccccggggcctttcctgggcaaaatgtttattctagagaggtttagagctacgctgtccagttagggtagcccctaaacacatgtggcttttcccatcaaaatgaatcacaagccctatttcagagttcagtagcacatgtggcaatattttcattatcacacacagagaggagtgggacctcctccagctgcgacggacccttgtgctgctgctgttttgtagggtgtaggctcaggagtttcagttcctgctctgccccaggctcttcagggccagacactgcccatcagacctcacgcagtgacatctactttcttgtgggctgccagagttctgccagtcctggcctggattcaactctaaaatcaacagactgttgcctgggtgaagatataggtcactaaactgatagcctaaaatattccaacctgggcaacatggcgaaaccccatctctatgaaaattggccaggcatggtggcacgtgcttgcagtcccaggtacccaggaggttgaggctgcagtgagctgagattgtgccacactgctccagcttgggcaatggagtaagaccctgtcttaaaaaaacaaataaaaattactgcttttctctagcacagaaatcctccta

SEQ ID NO: 50211 - DNA, 903 bp, Homo sapiens
tagctgggcatggtagtgggctcctgtaatcccagctacacaggaggctaaggcatgagaatcgcttgaacccaggagtcagaagttgcagtgagccgagatcgcaccactgcactgcagcttgagtgactgtttaaaaaaaagaaaacgtggaataagtcctcagtaatcaatatctaacattagattttggttttgtgctcaagaattccctatcccagcagatgaacctcattgcttggcagtaatcacagccaggacaccccaaatgcacacagtgcccctgatggattcatgacagatggattcatgacaaactgtacattgacctgtgtatttagctgcaccaagccagtttgctattaaggaatagtaatcctcttacaaagcaaaaaaagcaaagacaaactaccacttggatcattcaaagcctaggctccagggcactgccctttggaacctgccctctgtcccatggtgtacaaggagtctccactatgacctgtgctttgccatcaacatgattgattgggtcctggtgtcccaggagattagatggcaccaagatctatgcgtaaggctaaggggcttttggaaagtttcagttacagtcactacgacctcattttaaaaggaatttgaccttacttagccgaggtttggttataaatttccagaatagctttaattttaggaatccagattcatctggataatttccagatgtcataaattgtaacacctgccccatctgttgaaacagcctggaatttcatagtgagccgtcagcctaggaggagggagagatctttttccaagatgctgcttctcctccggtcgtggctccttgtttctgaaggggacttttcagggtcattgaaaacatccctgggtttcggagtc

SEQ ID NO: 50212 - DNA, 851 bp, Homo sapiens
atggcacaaggaccgttcaggtttgtttgtttgttttgtttttgttttttgaggcagagtcttgctctgtcgcccaggctggagtgcagtggtgccatctcagctcattgcaacctctgcctcctgggttcaagcgaatctcctgcttcaccctcccaagtagctgggtctacaggtgcatgccaccacacctggctaattttttttttttttttagtagagacgggatttcaccatgttggccaggatggtcttgatctcctgaccttgtgatctgcccacctcagcctcccaaagtgttgggattagaggcgtaagccaccactcccaggaggaccattcagttctgtcacccaggagccacaaggcctctcccagagcctcatctctccagccttgcaatggcctggaaactgggcagggactctgcctagagcatgtgaagatgagtcacctactgctgtcacctggcccagttcctgaatggaatgctgcaaagtcctaagttctcctgcatggcactgacgaaagggatttattaaatgaaggtaaaaactctcaatgaaaaactgtcttcaatctaaggaatgcaccaaacccacagtgcttgtatgagggttggtattctggcccatagctgctccaggacctttcaaatgttctgtaatacagtactattcccgctatgtggagtttaagtaatacaagtgacttgtggcccggattgcatgggacataggatagccatcccagatcttcattcatgatcatctatgccatgctctttatgacaatgggacaagcacatggaatattctgttcacatgggaggatatggccattcctttcca

SEQ ID NO: 50213 - DNA, 780 bp, Homo sapiens
tcactacaagtaaatatattcagagcaaattttaagtttaaagcagtcaatgactaacatcccaattttcctttccccctagcacgagaggttcctacaagcaactctgttccaaagagcgtagcattcatgcttccacagggaagaaacaggcaattctagagctgacagcctgggtacagtggtacctccttaagcttcaaattcacatcctgtacaaagatttgaggaatgattaccaattggggaggaagacagacactagggaaaagtacatacaacatacttaaagagacaaatgtattacctggaataacttgaggaaaacgcaatactacatttctattgtgcaaacagtttcaattcatcaagaaggaatctcaggcatgagaacagataagagccagatagataatgcagcccttctcctccatcccacaattctctcctcttcatgtttgatatggtcccaacatgaccttcagatgtgggttcagatgccagaccctggcagttttaaaacagacaaatgtcactcttgtacaaagagtagaagtgacaccatcttcacagagaaatcttttccaattaccagcagacaggccgactcccagctggtgaaagcgcgggccaggggtaggccaggaaaccctccacaccctgccaggtgcccacacaatggctcggcccaggctcctggaaagagtttatttgccattacttcttgatattgatatcctctcctaaatgttccttagactcacattttatgttgaacgt

SEQ ID NO: 50214 - DNA, 1196 bp, Homo sapiens
acacaggtcaaatactgcattttctcgcttataagtgtgagctaaataatgtatatacatggatacagagtgtaaaacaatagacattggagattactaatgggaggatggggggtgagagacaacaaattacgtaatgggtacaatgtatactatttgggtgatggctacagtaaaagtacagacttaccactatgtagtacattcatgtaacaaaaatgcacttgtactctatttattttttgagagggagtttcactcttgttgcccaggctggagtgcactgagatgaccttggctcactgcaacctctaactcccaagttcaagcgattcttctccatcaacctcctgagtaggtgggattacaggcatgtgccaccacgcttggctaatttttgtatttttagtgcagacggtgtcgtaccccttaaatttatacaaaatcaaagaaaaaaataccatttttactcagcttcaaaatatactgataggtaaatccagggattaaaaagacaaacttctttgtagaagtattcacagccaagttacattaaatgccacggctcttttgggcttccaacacagtattttaagtggttacaaatgtctgtttatgaacagcttgcttcctaagataacgtccggggccaaaactcagaaggagtaagaggcaactgcctcaaaggtactcaggctgcgggtaaacatttgacggaataaatgctctttattcacagcctgtgttgaaatctccctgaggatgactcaccatgccttttcccaacatcaggcccaggaagccacggactttcccatgtcatcactgacttgcaagcctggggcaaaaccacagtccacccagcacagaacttggttctgcgaccagaaccaaagatgaacttgtaccctaggaagatgtggtcttctaagcctgacaaaggacgtcaattttccccattcctctctcttaattcataatagaagggtttggttaattacacctgggataatgaataactaaaaatgtgttcttcgctacgtaaacagaacacattctctattcatttacagttaacatttcaacttcctcttagtctcacctcccaggacaagatcaatggacctacattcatctaaccacattgtcgattttccaggcttcttattttctccatcttttttctagttgaagat

SEQ ID NO: 50215 - DNA, 1517 bp, Homo sapiens
gatattaaggaaaggtgagatgttgaaggttgaggagaaaggtaaagccagagagtttctggactagggaaataggtaaagcagaaattcagcaggggcataggtaggaatttttagggaatgttaaaggtcacagatgactgcaattttcaaattgtctgaaaaacaattagaagactgtttttcaataaaacaattactggccaacatggtgattccccaactctactgaaaaacaaaaaattagctggatgtggtggtgggcacctataatcccagctacttgggaggctgacatgcttgagcccaggaggtggaagctgcagtgagcagaatcgtgccactgcattctagccttggccaccctgagactcttatctcaaacaaacaaaaaaaaaaattaccccactaaatgctacttagtcatactgcaaatatgtttcctaaattgttttctcagggactaatcccaagttttagggaatcactattaaccttaacactcagcataccggggcaaaaaggcctaacaagaagtatccagacatctctgcatagagggctctttagaattagcatgtaatactgaaacctaacaaacaggcaaagttttcggattgggactccagactgagaattcttcaaataaccaacgacagagtacaaaaatgattccaggataagtcaccaggaagggtaactattacagaaaggtagaactcattttgtcctcatagctaagcagttactgattatgtctgacgtaaatgcaagtcaggcacgtaatagaaaatgtaaataggctccaggaatgtccctgtgtccccagctcattaagcagagaagaaagtccaagacaaacagtgtaaaggaaaatgtcaacaataaagtcatcactggtgggacctcaaggcagcagagtggaatcacaactagatcctgcaatgtaactaatcaaaatcttatgaatttttttttacaaagcagaaattccatacgttttgacccacgaaggggagagcttcagcacatgaaacagattcgtctggagtaataggaagtatgtccaaatgagggaggaggcatccaaaaggacaagacctggtaagtgacaccaagcaggtaagaccaggaagccctcattataatgacagtaactacaacaataatagaaaccaatgcaattagtggttactcactaacggccatcccatgctgggagcttgactgtctcctctggtatcacttaatcctgacataaagattaagtaggagatatcattatccctattctatgaataaggaaacagtcttacaaacgttatgcaatcaatagtgtagaaaaatttcataaagacttgaaaaactttcataattattctatgtacaggaactcttcttaaaggtaaggaaattcaagacagcagcaaagccataagaaacttcctcttgggtgcagtggctcacacctcttatcccagcactttgggaggccgagtaacgtggatcgcttgagc

SEQ ID NO: 50216 - DNA, 1838 bp, Homo sapiens
ctgtgggtttcacgtccagaacatttaaaacatataaaacccttgctgggtcagggttttagtcatctttgcagctcccacggacggcatccaccaaagcgctttccaagtacttcgttgctcaataaacgtttgttggagaaaccggtgcataaaggtgaaataataaaacgtggacggatttcggaaagagaaggaaccccggagctcacgctttgcacgatcacccccaccagccccaggagttttcgcgtaaatcgaagcccggggagtgagtcgcaggcagcggcccccggggaaggtgtttcaggccggcccgggtggagagtgcttcccgccgcctccccgaccctctgctgttcctctcaaacttcttctcaaccttccacgccggggggacgcccagggaccgcccattccccgggaccgcccgtctccccgcccccgcctccgcccccgcccccgacaaactgagcaatacccagagaggatggaaatggcgaagaggcctggcgcctgcccgctcccgcgcatgctccctgacttcaccaaggtcacgctgcagcccgcaggaatgaaaatccacttctccgcattttcgaggtgacctggaagcggttcaactgctctggcttctcagaagaggaggggaccgggcggtaacgaggagccaaggggaggagactgctcgcaaaacccggaaaagctttcccgatccactctgccagcctccgtgcgcctccagacatgcgcagtagcctcccccgcggtggcggcggcggcggcggtggctgccgtggcggctgagagtccagagccggacgttccggccgcttcgggctggcggctggagagcgctcgggtcatgtctgcccagggggactgcgagttcctggtgcagcgagcccgggagttggtgccgcaagacctgtgggcagccaaggcgtggctgatcacggcccgcagcctctacccggcagactttaacatccaggtgaggtcccggctgtgcatgcggccgctctgcgtggaggtgcgcgctcccgtcgcccgggctgccctggcccagagctgcgcctgcctgggggctgccgcctcctgcccggccccctgctttctcccctcccaccccctcctctctcccctcccatcctacaccttgctcctacacctttcacccgccttgctcctacaccttccaggagccctctccccagcacttgagagacggccgatcccgcttgaggtcgggtgtgcttaggtccctggggctcagcgtgccatctggcctagacagcacatgatcgccactagcaaaaggccattcgctccttcattcatcataatggcagcagtttgttcagggcctgcgactttggaaatattatcctacttaatcctgggagcctgagattgcaggtgaaccccagggtcacactctaagcccaatggcaagtctgccatgtatgtggcgctgtgtcaccaggcggagcttcactctcaggccctcccttcctgcaggagggccaacgagcgatgctggatgagctgggagccttctgggcaggggtgagtgaccagggtgcctgatgtgtgttgcagtatgagatgtacaccatcgagcggaatgcagagcggaccgccaccgccgggaggctgctgtacgacatgtgagtgggacgcttgacatcacttttactgcactgaatctctccatgaggttttgtttctctctgcagaagtgggagttgggggaagatcttcaagttcatctatatcttcgatacctaaagcaaacctagtaaggagtccaggcctgccataaattgctgacatgg

SEQ ID NO: 50217 - DNA, 1826 bp, Homo sapiens
aataatcactgaaacatgttttccattgcttctgtttttcaaagcggttttcacagcttgagttctctccattcagcgtcacgaaagcccattcgaaatggatatcagctgacgttggcctgcacgcgtttgccttcctcccctcactccgcttgtgcgcctctctttcggctggctttcctctctccttccatctcccctctttcgcttcccttccctctgcgcccgcgcgcgcctcccagcacgctggtcagctcctcttgctcgcaagcaggtctggccccagcggcgcgaagtcacgaggctgggggcggccggcggcgaagggggcggggcgaggccggggcgccgcagcgcgcataggcggagcctcgggccgcgggccgccttggtatatctgcgcgtgcgcggcgtcgctgctgggccagtcgggacagaggagacaagatggcgctgcgggcgatgcgggggattgtcaacggggccgcacccgagctacccgtgcccaccggtgggccggcggtgggagctcgggagcaggcgctggcagtcagtcggaactacctctcccagcctcgcctcagtgagtatcagagagtaatacgtctccggtctttgctccctagcctagccctttgctcccagtcacctgcttagccagcgggtagggggtaggatttgtttttccctcccgcgtctcccctccgaccctgacccacttgtctctttagaaggagatttgcctgtacctaatatttccaggagatgggctgagggcaagagcaccagcgggaactttttcctggggttggtgggctcctggctgttgccctaccccctcccctccccagcttccctaggctggagccttcttaggcacttgcttcccgtccccgagggccacttcttgccactccgatcttaatcttcccctgacttcatttggatatctaggggtcgagggaacgccccttctcccctccccctggtgaggacctcaatggggtcttcaactcctgcggagggcagacggtagagccttcgctgacgtggtcaggcctttcgtggatggaggtcaggccagtagccagagggagatgtggcttggtgtttggtggaggggctgctccgcagaaggacacctagatatcagagaacgctagagctgaaaagtaccttgcaggtcatccagtccaaccctatcattttacaggtgagaagcctaaggttctggaaggggtaggatttgccatgcttcagacacttaattattggcagagcagggactaaaaatccaggttcttaaattctcgctgggcctttttctaccgttgcctcttcatttactgaccagttaaccaaacttggttgagtgcagggttctttggggaagccaggtggctttgcccataggtggtgtgtgtgcataggcttgtttaaatgttgtgattttttaaataaaaaggccttaatgaactaggtttaagtggatagctcagcaattccaaaagaaatggttcttgattactagagaatgcagttgtgtagcatccaacttcttcacagctttcttcggaactggcaatgagccctcgaaatagactttttaaaaaactgggaaaagcacatgatgtttccccaggtggtgagactgcattttcactggttaattgccagagtgtctgtctctaggtggccgactgattaaaaaggatttcagatgaagggtgttagtctgggcgatctgaagcctgactaatccacatcctgatctgtcactgggtcatgtgatagcactgcagtgtgaagaaaaaggaaaacatttg

SEQ ID NO: 50218 - DNA, 422 bp, Homo sapiens
cagagccagccctgcaaaaagtcaaaataggaatcttctccttgcttttttcctagaacctcttcttcaggtgctcactgctcatcatgcagatctctactcttcttgtacaagggaagatgattgctctgggtttttgttttgctaataaggcagaggctaaaagactaggacacttattatgcaatggctgtcaactttttctgagtatttcgtaatcattaaatggtgttactagtgttgagcaatatcctatcctgcaggaggaagaggatgtcatctgataaaatatgtgctccttaaaacccgtgtagattttgggttttagatgttacttcataaatacttgtctggctcatatgatagttcagaatcaaagccaagacattttggttgtaaaatatgttaagaaggtaatataa

SEQ ID NO: 50219 - DNA, 649 bp, Homo sapiens
tgcttgtatgccttttagggttgttgtaaggactggagatttttgtgtgtaaaacactaggacagtgcctggtccatagcaggccactgttactagtaaaccttttttaagatgaatttgccttattactgttacataatacttaggaattgttggttatatagcactcttgttagtttgtaacttattttttagtgaaaacattttctgaaggagcctttttataccagaataagacctaatgaaaagacctgctacgaagccaagtgtcctcaaaggtcaggctaactaaaatgactcattcggcatttattcttgcagttgactgccacttcattgtgtaagatttcatgtaagtgaaaaaatgttttcagactaatgtcataaatacctcgctaagatgttttattttcagcaagtgtgagggtacaaatcgtctgaggtcaacaaagcatcctctgctcttgaaattttttgttactatcataagggcaagttagcttaattcagtattaggagccaacggaaaatagttccccagactacatttaaaatagcatttagagactacaacaagaaatacttggcaaggcagttcttgagggaaaattatcctttgtgggaaaacttaagaaggaagtgggttttt

SEQ ID NO: 50220 - DNA, 1267 bp, Homo sapiens
tggaaagatgctagaattagatcctcgcatttcttgaagtcaaaagagcaggtcctttagaaggactccccacccccacccccacccccacccccactcccatctcaccaggcctgcctctgggcctccaggagggcagctgctcttgcagagatgtgagaacagtccccaggcatctgccagctggggctggggggcccaggctgcaccagactggtgggcgggcctccagccagctccccagcagaggtctctctggggctgaatggggcacgtgcccagggctaattgactccccttttatgatgattctccccgttccccctccccccatacatactctgcccgattcagctttccttatctggaattcctcctcctgtttgtattccttgtccttgacccttcctcccatttgctgctctagatgagggggaaaggggttgggggccagggctggggcaggggtgagcctttgagctagttaatcatctcagcccaggctgcaaacctccccgtgctcagtttgcagacgcctgaaggcctacatgagcaaagctcgatacagattttctgagtgaatgcatgaatgaaaaagaggcgagagtggaggaggaagggggtgggggaacgtgggcaacatgaggaggggctgaggttgctgaggtgctggggggagaggctgctggtgggttgggagcaggggcccacgcagctctcaattaagtgcacttggattccatggaaaggcagaaagtgaaagggaaatcgctggcaggctgagtcattccatcgggtcgaacaatcggaagcaattcggcttcccactgctctggaggaatcaaaagccactctgccgggcgggcttttgtgcacaggtcgtcagcgttcagctgccggggagtcttcctccatcccggtgggcagcttgtgtcttagcagcattgattgacatttctccccaagaacaagattacccaccaatcccagcctgcccttcccccttccaaaaataaagccacagttacatgcaaagctcatgcaaatttcaccctgctgctgtttgtgctgcggctggtcccacgtgagagagcagaaggcaggctcatccacattcatggcttggaccccagggcccaagtgagccgggcaccgctggataaagggagcctcttctgacgacccgtgatacagatcttaaacaggggagtgggtgcaatctccagaggagggctgggcatctggctagactccctcccgtcttacc

SEQ ID NO: 50221 - DNA, 1072 bp, Homo sapiens
tgcacttgttccactcataataggacctcttgcctgctgcctgggcagattaggccagtgaatgcgtgtatgtcagtgtgtcggtgcgtgggtgtccgtgtgtatgtccgtggcagcacgcgtgtctttcatagctgcatgtgttttattttcttcgggtattttatgtgcttacatagtcaaaattaatgggatcaggttgagattcagatgacatcacatgggtgactcacatcttgatagatagatagattttcctcctctgcattcctttcaaggtaacctggacttgtcacacaaccactgggggatgccaggaagagagatttttttcatggacatttgacatggtcattacagttaacaatcctggctgtggggaaaagggcagggagcaaagtccatggctagtccttaccaggggcagagagatgggctgattagtggagtcatcaacccagcacaggcaaatattgagtaccctgtccgtccttcgcaggaccaccaaggggccacctcattgcaatctgcattgctctcgctcctggaaatgacctttcttcagccaccctttttatggctcaccctttcctcctggaaagtaaacaggtactgaaggggaaataaatagttatagcagctggaaaacattgcaacaacagatcaaggtggcaattacgcaatcatttccgctactagaatttctttgagggaaattttcattgggaaaatgcaaagcagaggggctgactcatactcttttcgactcaactcgcccagaatgcaggaacccacaggtcacactgacaaggcaggatgacctctaattttcaaagactaaagataccaacgaagtctttctctcctcgctctttctacgtggtgtttctccatctttgcagcagctcttttttcctggggtttggggagcttttccttcctaaaacattaacttgcagacccagagccaagttaaatcaagcgatctaggtttttaaaaacaagctgcttgtttgtttgtttgttttcatgctagactagctctaggagcaaaactctgtctgtgtataca

SEQ ID NO: 50222 - DNA, 552 bp, Homo sapiens
gctcgtgtggcattatcttgatggaaagacaagaacaggggaactatctgcccaccccagcatatggcaaaagctagccttgtttgcgggtaggcaaaggagtgaagtaacctggcagggccctggcccatttcagtcaactctacaaaccacctgccccatatgaagtgaagggaatgcagccagatgcaattctgtgccagggatgagtcacttcattgcagaagtttttgactccccctccctggaagctgggcactggttcctattaaagcaggaagagtacaaagggcatcctatgtgggcagactttgcctccacctctatcttttcttgcttctgaggtattacatccattgctgctttcatgaatgtttttttaaagacaatgggtataccagtcttatgcacgttccacattggaaggaacttgcgaagtctaagtccacccctttaaaaaaaaatacatacacgcacaaagaatttggcagcaatttcaagggcctcacgtattgcactgatgaacccaatgtcagaaatctctggttcagc

SEQ ID NO: 50223 - DNA, 1634 bp, Homo sapiens
tggtgggcagggaaggagaggggcggggtcagtccactgtgctgggctggaaaaaatcaaagagtttttcctggaagactctcttctggctgtaagagcttcaacacacgcagtcacgctcaccacggtggttgtgcaaacctcccacagagatgtttgatgagattagtcactttctgccagggtggttggtccatgcgtaggagacttcatgacctctgatgctgggcagtgtctaggtcaaggtggtgactcaagtgtgccctcctccagggagggaggccaggcgggggctgagtcattgcttcacatggccccagaggttggcttcccaagaaatgctgtcttgaaggagtgggaacaggccagcgtgtaaggtgccacgcacagagcaagctctaaggtggcagtccacagctctggactagaggctcagagaaaaattgaagcaaccaagcatgtggcggtgtttgctgaaagggagatgaattctgcctcctttcaagtcatttttccccaggccggtgagttcaggaatggctgccagtcacagaatcacagaatcccattgccgagggaaggttggggagcagcccctctgacctctccctctgaagatgagggcaggagagtccagggagggtaagtgacttgcccacagccatgcagcgctctcaggggcttctctgtgcactcaggacccttgtcccctccccagccactggggtggcagctccatttgctcttggccacaagttctccgcaagcacacagagaaaccttggtgcaaattagagaatgatgccccctcctcggggctgaggcccaggttgggtgcacagatgggtgagttgagggtggctggctttcagccccattcgccctgcttaccagatgcccctgatcagagtacaatctcacagtggcaagcaaagtccccacattccagcccacacctatgtgtgcctggtccacaggctacctgccttctctccttgcacctctggaccgcatgcaggacggttcctcccagctttctcctccaccaactcccatgtgagttcacctccctttgcacaatgggccagtgtgccctctctcttcctccaacttaaggatgatttcagccctgtcacccatcagtcactccccgctgcaaaccctcagagttccaactgcctggggtggacagcttggtctcagaggtcatctagagcaggggttggcaaactacagcccatgagccaaatctggcctgtgcctgtttctgtaaataaagttttgttggaacacagccatgcctagtcattgacattgcctatgactgctttggaactacagcagaacagttgctagttgcaatggaaatggcatagcacacaaggcctgtcattttcaccatctggccctttacagagaaagtgtgcccatccctgacctagagcaaactttccaaggctcagagaagttcagtgacctagctgatgtcaccagctgctggatggcaaagccagcatttgaacctggatcccctgatactccttctggtatattccagactccttgagaaaagaaatgactttactatgtcatcagactctcaccccgttgccaaactttttgttgttgttgtt

SEQ ID NO: 50224 - DNA, 2140 bp, Homo sapiens
tccaccaagggtgtgtaattcactaccaccatcatttgcatatgatggtagtcccctgtaaatacaaacttcaaacaatcagtgctctcagaatccagctatgatctaacctgggggccttaaaaggaagccacagtggaatccaatggaaaacaggaaccggcattatctaacagataattcctagtgaggaagactggaattggcctcagcatgcaggggctgaccttatctgacccagagagatggctttcccactcatacctccacaagaccgagcctaggggtcctaaccaccagccccgctgcctcttccagcatctgaccctctcgggaggcagtctagagtattggcaacgaggacaatgtctttgggaagccagaactgtgccttcgtatgttttgatcatcaccaccattcggtggttatttccatgaatgtttatcaaggacgaaaggacagaaatgaaaaacacgagatcaaccactggggttgctggtgaaatccagaccagagagcgatggccctggtccagaaagctagacagacacaagcacagaatcggcccccgttgagtagagggcattggaaagtaaggaatctcgcaggcagcctaggtggggtgtggggggtccccgtagctgcagggtggggtgggggtgggggtgggagacgtccaggggcgagtcaagggggaagacggttgggaagagaggaagccactgggtgcaggggtcccggggcggcgacagacctcggcccccatccaggagccctcaccacgcaaacgagcagaaggcagcgccaactcccactccagcgcccgcctgccggagcgagcgcggcccctttaaaaaccatgtaaacaaagctttgttcccccagctgcccctccttcgcgctcccccggcccgctccttcctcccacccggcgtctccgggccgctgacgttgcccgcgcctttacgccgtcccagcggtgctgcgcattctccaaccacggcccgggccgccggggcctgcgcagctgagcggcgctacgccacgagcgcagcgcgacgagtccccagcgcgcaggcgcagcggcgacggcgtcggcggcggcggcggcagcggctccggccgaggtgcgcgctgggggggagggggggccggagaggagcatgaatggagcaaaatggcggatcatgtgcaggtgagaggagccgcgggggggagggggcgaccacgaagagcggcgagtggagtcgggggtgcacacggcccacagggcgccagccggctcgggactcggcaggcccgcgccgccgccactcggggctctggagccgccgcccgtcccggagccccggggcctttcccgcctcccgggccgggggccttctccgtcccctcccacccggtcccacacctcgcgcgcggggctgcagggacaggaacgggcatcccggcgcgcgcagcccacaacgttcgtcagtcactgtcttcgtccccgggggaggcctccgtcaagtcctcgggcccccccgcccgccccccggtgaagcgagggggacccccttgctgactttactgagggggacgcccccatgacgcccgccatccctcagcagataacaaaaaggaaacctcgcgctgataaacctcgctctccggagtctttcccgccgccttcctctcacgccccggaatacgagagaccccccagcaaccccggcctccttccccctcccacggatgcgcccttccctccgacactccaaatcgtacagcccggagggccgagctccccggtcttccaaaatgggtgctcaggcctcggcccgcctcccctcgcgtccccctagccacagtgaaggagttgagcgcccacacctcctatgaaacacggggtggaggggggtgtgtctgaaatgagagatgcagggttgggtgcagacgttgctcgggagggtcttgatccggctcaagagctgctcctagcgtgctgtggggccaggccactctcctcaaagacaggcacaggccctagaaagggacagcccataccaaacccagtagcagatggaggactgcagggtttaatttcttgcaaactagataaagtttttcctgtctgtgccagagatctgatatttt

SEQ ID NO: 50225 - DNA, 1613 bp, Homo sapiens
cttttaagtttagaagaatgcaagccgttatttcattaggaaactaggtatctacccttttaacactttgcagtccagggcatgtgtcacaagttaaaaactttatcagccaagctacgaatgctgcaccagaattcatacattcaactatgtggatgcaactgccatctctgcctccacatcctacccccggcctttgctggtctgcagaaccctctcttctcagtctaaatttacatgccctttgctcgcctacgcttttctagaccccaaatcggacctaatccttctcaagtctccccttactgtgcccattcctaagagccttagggcccacctactcttctgtttggagtgttcctaaccccaacccctgcctgtcccagtagccaaagtgtgcttcttacgagctgggcccagaccatggtgtcatgaccagcgacaaggatgtgcagtttctggggagtgtacagtaaggggagcggtggaattaatttgggtgaagcccctgcagagagacgccagactggtttatgcaggttaaccctcacatcgctgccatagctcgctacgacaatgaaaagagcaaaagctattgacaccatcccgcctgcaccctgcgaaagaaagggagagtttgcaccccacctggcctgacctccccgacagcgctgcagccccggaagtaatttcgcgagtttcttccgccggaaggtggcgcctgcgcactcaggtgtccacggcctctgttccggctctcccccagctttcgccgccgcgcgcaggcgcagtccagactcggtcctggccgggggttctagtgttgccgctggaagagcgaggtcttaattgctttgcgggagcgttcctggggaagtccagagctgggttcctgcggcccttgggcccccacggcgccgtgtgcctggcagaggttcgagttcacacgcaccgtggcttgcagcaggcagccgcagtgctaatcagcggcgctgttcccgggctgggtgcagctgctaaggacaaggcccctgctccgaagaacgcggtggctcggggataccctgaaagggacggccatggcgcacatgggatgccctagggttcgtgggagggcatgcaggcgcagcccccgcaggggttggcctgccagagaaggcaggggagagcactcggggctgcacaaatggtgtggccggagggaaggtgcagccttgtgtgtgtctggatgagggctgggcataggagcttggtatttgatcctgaaagctctgcgtttccaaaggccacttggcaaagcagcctggtgaccagtctttgtttagcccaccagctagtggggaatacggacttggaccaagacaaagactgcggggatagttgggcgatgttaggagaggagggctttgtgatcagttgcatttggagtaaagaggattctggtatgattcccacgttccaggatagagcgccaactgagtcaggaagagggagtgtggagcactttggggatgagggtgcaggagagaaggcgccgcgctgggtgagcctaattgggactcccatccaaagagaattccctgctcttgcaggcagagcgctggggagattgc

SEQ ID NO: 50226 - DNA, 1767 bp, Homo sapiens
gtttgtgggctccgcccccacccgccggaccaagcgcacacggcggccccagcccctcacgtagtctgggaggcagggggcagcagcccctgggccgcctccccacccctttcccttcttaatccaaggactgggctggggtggcgggaggggagccagatccccgagggaggaccctgagggccgcgaagcatccgagcccccagctgggaaggggcaggccggtgccccaggggcggctggcacagtgcccccttcccggacgggtggcaggccctggagaggaactgagtgtcaccctgatctcaggccaccagcctctgccggcctcccagccgggctcctgaagcccgctgaaaggtcagcgactgaaggccttgcagacaaccgtctggaggtggctgtcctcaaaatctgcttctcggatctccctcagtctgcccccagcccccaaactcctcctggctagactgtaggaagggacttttgtttgtttgtttgtttcaggaaaaaagaaagggagagagaggaaaatagagggttgtccactcctcacattccacgacccaggcctgcaccccacccccaactcccagccccggaataaaaccattttcctgcaaatgggttatctgaagcggggcgggggatccgaccaccgaacacccctggaaacgagcctgcccgtccccggccgggcgtggccacggcaggtgcaggcgcggcccgcagcgctggggcccccaggaggccgcgggctcggccccgcgggaggcgggcgcgtccaggccgggcggcccctccctggcgcgggctcgggtttcctgggctcgcgcggcgcggcccgtgctacctgttggggaagaaaacccgagcccccggaggggccggggccggggccgggacgtgcatccagccgggccccgggccccaggccccaggcccgaggcgcaggcgagggccctgcggagcccggcggagcccgggcggcccgcggacgccaggagcctcctcgggcagcgagattgctttttttccggtgaggagggcgggggcgggaagcggggttgggcggccggaaggggggagggggcgagaaggcgtcccctgtcctcccgggtccccgcggggccggggcgggggccacacctgagggcaaatctcaattagaggcagcggcccggcccggatggcccggggggtagggggcgagaggggcggggaggaaggggcggccttgcccccaccccagcttctccggtgggctttcccagggtcctccaggtgtgcgtgtggggagtggaactcgggggccataaaacccgcctcttcagtgcgctggcttttaatcttgtcgagggggaggtcttcctcgcagggacaaccccccccccccgccaccccaccaggtcagctcttcagggggaacaccctcagtgagcgctctcttctgggggtggggccccagcctcagtttcccctaccctcacggagccctctcttctgaggatgtcccccagcctcagtttccccttccctcactgagtcctctcttctgaggatgtaccccttccagcctgtttctcctcctctccctcttctttctgagactaccttgaggagggggattatggagagagaaggatgaaacacatcccttctcctctctgctccctagaatggcctaaaaatgagagaggaagtggggaagggccctcgtccagtgaaaatgggaggtgggtgcagctacagtctcagttgatggcg

SEQ ID NO: 50227 - DNA, 1079 bp, Homo sapiens
ccaggtgccctggctccacctctcccgaagttaatgtttagatagctcccccgcccagcaggttggtgtgtagggtggggccggggggcactggagtgagacagaccagacgtggacagagaagcctatcgacagggcctgggggagggaggaggcagcagggccggagtccacccaggacatctggcaccagtgaccttgtggggaaaggagccaagaacggggcgtcggggggcctgggacccccctgcctgagagatacaggaatcctggccccgtgttgtggacacaagcgcccatcctcaaggtcctgagaactcctgaacttccaaaggtatgagagccctggcagccgcctcctgcctgctcagtatggagcagagctgaggaagcccacccgcctggggcctgagccaacaggcacctgttgttcagtgttgccagctttcaagggggagaatctcccctctcagacaagccatgggggagttcagttcagctggccttgagaggtcagaggccttcccagggggaggaggccggaggcagagtgagtcttcccatgggacaaggacagtgacgaggtagggtcagaggatggcatgggtgagaagggtccccttgcctcccctctgaacgcccaccaccaatacacacacacacacacacacagacacacacacacagcccagatccctggcagcaaaatgaccttggcagctaccactcctcaggtcgacagagggagccctcactctgcagtccccttgggtccaggcctggctgggctgagcactcttcctgcccaaggtggcccgcccgccccacccatggagggacattccgatagaatgtgagactcaggcatggtgggggacagtgggaatggggccttgaggaattggaagagagctgtcccttgctctgagttttctcaggtggaatgagagagggtttgggaccaggtgaaggtgctcacagagacggcagaggtgtggggcccgcagccgcgtgcccagtgcagccagcgcccaggggcctctgaaccctgccggagcaacccctctggcccttcagca

SEQ ID NO: 50228 - DNA, 757 bp, Homo sapiens
gacagacttggagttcaggcttcgcctaagtaagggacacctctgatgagccactggcccagagcaggcctcagcctcctggtgtccttttccagtggcgggggggtgcggggagcaaggtgccctaccccacccacatcacacgcatgcacagcacccatgggagcgcctggcccctgccctgcagcgccgcactgctccaccctccctgcccctccccacccaggatgctgttttgggaactggtgacctagctggattctgcctttatttctggcattgaattgttgccacagtaactgcgggggtggggctgggtaggggagagggtgaaagggaaagagggagggagggagaaaagatgaagaaagccaagaaaagggaccagaagagaaagcagaaagacaggaggaagaaagggagagagggccaggcagtcgcactgtgaacagaacaggagaaggcgaagcggggcaaagttccctgcccaccgacgccagcctgcttggatgacttgcctcgtttcataattcacttactgtctgcaccagccggcctccagcctggctggaccctgctgcctgtgtggcccggagccagaggcccccacactcccagctgctcttctacagatgccatcaacgagcaggactctgggtggctccactgtctaaggttagcacgtgggacccccaagtcccacattttgattgaactgggatctttggtactcattgaaaagagcacttggctttgg

SEQ ID NO: 50229 - DNA, 510 bp, Homo sapiens
ctctctctctttctctctttctgtctcgctctctctctctctctctccccctcacacatgcgcacgcacacacacatatacacacactcttctccacccccattttcccggctggccttctgacagcttaaaatttaaccagtacaaacattatgccttaaggctaggcccacgtttacgtgcaaatgccccacaaggggtaagacaaaatttctgcctctgtggaaataatttatcaaccaacatgctctctaacaaatggcagggggtggcaccagggtgcagggccctggctgaccccaggaagcagacccagatgctaaagcgcaagacccagcagtggggttgtgggcaggaagggactggagacagagcagaggtgagaggccagaggcttagtgactcacaccagctttgcctgggtagtatcctggtgaatggttttagaaatcagacagacctgagcttagattccacacaatactgtgtccttgaccaactacttaactt

SEQ ID NO: 50230 - DNA, 1249 bp, Homo sapiens
tgctgggattgctggcgtgagccacttatgcccgacctatgcagtgttttaaaaataattttttccatgaaacaaagtttgtgtgaagttctgacgtgtggaatttccacctgtgcgtcatggtaggcactcacaaagtttcggagtgcggatgtcaggttttggatgagggatgcagaagccgggctgctcagggaaccctctgtgttaacccttcctgggcgagcgcggggaggtggcggcggggacagtgccccgagcgggagtgggaccagcggccgggaggggagggcctcagccagggccgcaggccgggccggggcggggagggcaggtgcggcggggccaggccgtggaggcctccgcccgggcagccggctgacccctgccgtcatttcctttgaagccagagaacaatggctcaaaaacaagcgcagcccgtccttcggtcgcctcccgtccacgcgcgcgttctccggggctgagcggatgggaagcctcagccgcaaggggcccggctgcctggagagcggccgcccgcggaggccccgcagcctaacgccgccccggcgcggcctccctcccttctccccgcagcctggagagtcaccgccgagggatgaggacgcgccagcccgggggaacgcgccagctgctttcgcggccccaagcgcgcagcgcccagcagccgcgccgagcctgacacgctgtcctctcccctcgcgcacagggctctgcgagtgacccggcgggcgagctccgtgctgcatggaacggctgcagaaggtgcgcggcgccgccccgggccggggccgccgagggcgggtgggggccgcttgggagtccagggcgccacctggtggccacccgccgcgcagcgccgcgcagcgccccgggtcccccaggcctagggccgcccccgccccgctcccgcacacacgcacgtgcccacccgcccgccttctcgctctccccagcaaccacttacctcccccgggagcgtgagcccctcccgagattccagtgtgcctggctctccctccagcatcgtggtgagtacccctctcggccaccagcaacccctggctgggaggggggagggtgggggacccctggctgctagcgtgccttcccgcagagcctccccagtggtggtccctccggtgctggcgggcagagagaacccagaaacccagagaagctcccatatcccccttccactggtctggcctcgttaatccgaagtgct

SEQ ID NO: 50231 - DNA, 2122 bp, Homo sapiens
tgcttggcacggcacatcttggttgggaccagcacatttcaggagctcatcagcccatgtgcctggggctgactgagacttcaattcaggaggaattgtaatttctcttcgaaaacacctcccttagctcccgccttaatcccagctactcaggaggccctggcgggagggtcgcttgaggccaggagctggagatcatcctaggcagcacagtgagacctcccctcccagtaaaaaaacaaaaaaaaaaaacaattggccaggcgtggtggcgcgcgcctgtggacccagctactctggaggccggggttggaggatcgcatgagtccaggagttggaggctgcaatgagcagagatcgcgccactacactccagcctgggcgaccaagcgagaccctgtctcggaagaaaggaaagaaaaaaaaaaaaaaaaaaaacacctcccagccaactctcagggcccaccgctggcggttcccagcccgactgggcgcccccagccggggttagccagcgccacgcagccgggccgggaaggggcggagcggccgggccccgcccccctcgtcgcgccggggccgccggggccacggggctgcctcctccgcctagagcgctgccgccgccgctttcgcccgggagccgggggccgggcgccatcatgctgagccggctcggggcgctgctgcaggaagccgtgggggcggtgaggccggcagggccgggccgggccgccgggagtcgcgggcctaggccgggctgggcgggcgcggagccgggcgcggcccgcaggagggcgggcgggcgcgggccccctcgggcagggacccccgggccgcggcgccccttcctctgcctccccggccgcgccccgcttcccctcgctcttcccagtcccgctcccagactcctcccgaccgccccacctccccggcctgctcccgcgtcgcttcctgtctgtgcgtcctggccccggagtctctcccaattcccgaactcgcctccgccgggacgctccctgtcaccgcttggggtgtttcctgccccccggggccctaggccgcctccccccagtcccggtgggcctgcctccttcctccgctccaccccaccgcctcgcctgggcttgaaaaaatcgccgtcccttcccctcggtctgatctcccagacaactccaggaccttgttggggtgcaggacgcccttcccgtcaccccgggacgtgggaagtgcaggccctgccggtccaagtccccacgaagggtaaagacccggggcaggctggtgggcccccagccggggaaatcgccttctattgggtgcagatgtttccagcgtggctgtgacccctcacaagccaaattgagttagggacatgccgcccgtggtggggcctgggtggccctgtgcggggaggagagtccattgatgtttcacgtgccgtcagtttgtgtttttgccattttttgttggggctgcaggctggcaggcagcctactactagggttcgttcagcaagatgtagcgctgtgtaggaagggtgggggtattcccggtagggtggggggggtgcccgctgttgaaagtaactctgccaagaagctgtctgtaaagtcagcaatacttctgcctcctagtataaatcttcccccaattgatgagttgagtatcagattttctcaggagagaaagtcttgggtttcaccctccttcctccccaccacctcctccccaaccctcatgggagctcctgttgaaagaagtttgccttaggcaaagttgggaagaaagtcagaaactatgacttcctccaccttcccagccctgctgttgacccagggccagggccttggggcatccaggtagagagggttccaaaatgatttttcttccccttcccccatccccagtcaaaacagctgtgatcttcaaaagtgatctgataaaccaattcatacctctggggaacactccatttacaggaggtgagacaggccagacagttcctcagtcctgaggagtgaatttctttctttttcttttctttttattatttatttatttatttctgagcccaggctagactacagtggtgcgatctccgctcattgcagcctccacc

SEQ ID NO: 50232 - DNA, 2333 bp, Homo sapiens
ccctcgccccgggaccagggggcatctcaaacacagtcgcccaagactcccctctgggtggacactctcaacccagctagcgctccaggagacctgccctcgtgtcgctgggggctgcagccctctcctctctgcaattcgtctctctctggatttaggaagacttccatttcaggaagggctgagattcctggaagccgcttcaggggctggagatgaggccccagagtgagggtcaccatgtgtctgtctgtcttggattgatttgcgtctgtacctgccactgtgtatctctcgcctccaacggcgtggtttacaaactgtgatgggtcctcacactggggtctggcttgaaacacgacccccacctccgctctgtacaaccccgccctatggccctggccccgtctagttgtcattacatcgcccactacaggcatcagcaccaaaggcctgaaggtaagccgggattgagccactgctatctgaggggccctgggcactccgctagactctggggaagggaaggaatgaggcctagtcggatgagacaaacaggccccgggcctcagtttcctcttctgcatatcgggacgaacgcaggacacagatgcgagtgggagtgggagtgctttgcaaaactgggaagcgccacgcacgcggcagcgctggctgtggccgttgggtcttctgtccccacctgggctggctgcgcgctcccgaggcccggcgggcccgggggcggccgctcacctgctcgctgaggaacacggccagcaccacgtagcacacgttcttccgcagcccgcacggggcgccggcggctccccggccggcgccgagtcgcagctgtgcacgctggacccctggccagccagcacggaagccagcgcccccgccaggccctccgaggccatcgggtcccccggggggcggcgggccggatcctcgcagaccgactgagccgagccgcgggctagagtgcgctgcggagcccgctcccagtccctgcggcagcgggccgggagctcacgagaacgcggaagcgcacgcgaacgcggaagcgcacgcgagctctggccgctgataggctgcgcggcgccgcggcctgcccggattggccggcccgcggcattcaccgagggggcggggccgcccggggccgccctggaactgggggggcacgggtccggagcccagcggaccccgcccggcttctgccgcctgtcagtcccgtgcgctcgggacgtctcccagccgccacccgctcgccaactccccgagcgcgcactggtctgcaggagctccgacggtgacgtcatctttcctgcagggcgcgttgcgccgccggggtaggcgacggtgacgcgacaatccggtgacgtcacggaggcccggggccgccccctggaaccactgtcccgctgttgccgtaaacacacaatggcattgccggagttgatcatatcccaaatacctttcttctcattccaccaaagagttataaatgtcacatggcccgtggggtgggggacataaacccctgccttgaaggagattctgcaatagttggagagatggacggagtcctagatgaggagtcagctgagggttcgaggctaagtgctaaatgcttggtttgggcaggaagagtgacaggcgctggaaggagggagggggcagggctggggatggcgggaggggtccggggctgagagaaggctgccgtcagccggcccaccctcatcagtgtccctctgcctaccgcatttcccacgcagctcaaggccctctctgctgcagatggtgcgccctgggagggcgggggtggggccctgctcctccatccttgtcgtcaccctcccacccagcgtgcaggacctggcgcgtggagagcagggtgggggtggttgtggcgagcgcctgctcctctcccagctcggcctttcctccttcaccccacctcagcactggaaggcaaagccagctggaagggatctgcgaagcaggccgtctggctcctcacctggcagaggccacccctttcctctgcctctgatagttttgtgcgcctccctgctagggagactgtggcttggtggtgtggacaaagctcaggacctgcagccagatggccagccactgctgactggcttgctctgtgctcctgggtgagctgtgggcctcaattttcttatttgtagagcaggatcatagcaattcttcttttacaggggtgttgggaagccacaacaattggagaggagctgtgtggattgtccagcactgggcaccgtccccaggcagcccaccaaccctcaggggtggtccct

SEQ ID NO: 50233 - DNA, 1440 bp, Homo sapiens
tcccaccttgccaagtggccatttccccccactggggtgcaaggtggcagtacccgccctgtttttctcgcttggcttgtacaacccgtgcctgagtcagagccctggaggccacctccccaccctgctgtttacaaacatcccaagcctgcccaggcctgcaccggtggcccatgggtgcatgatggagtgagaggacagccactccacgaagtgggtgagaacaccagactgtcccctcccatgggcatgcaatcaggcccagggtcaccagacctgacactgctgggttgcagatagggctatgtgagccagatgttggcatactcaaaggtgaggaataggatggtgagtcatgtgactgctcagatggcaagcaggcacctggattctccgcccacaacgtgccatatcaccttgtgtttgccaaggggcagcaaggtaggcctgtggccctcggctccacgcatctgtttgcagtgtgtgtggcgtgcggcaggggtcgttctcagccaacgaggcttggtggggcgggtagcctgcggtgccccagacaccgcgtgcaagcccacaggtccgttaacccttgcatggagtgctggagggtggagctcagaaagttcctcctcccactagacgtccacagcttccaccacaggggcgggacggcaccccggggtagaggaggtctgagggcggccatactcacaccaccaggcgacagatcatccaggacaccatcttgccggcctttgggacgtggggaggaccccaggaagccgctcagaaggacgttcactcaagggctgggacggggggtgatcagggcagttgcgggaagcagaggggcgatccggctgtccctcggcggaggcagagcccgccgcccacggcctccgactgtgcagttcaggggacctggagaatggggagacccgaggcaaagcggccccggcggggaggaagccgacttgggagcgggcgcgccccgcggccggggcagttacagctcccacccgccctttctgccgcggagaacctggcgctcggcccttgctgctggtcccgcgctggagcgggtcgccgcggttccagcgcgccgggccaccagcaccggcctacagggcggagttcgcaactcacttgaaagttgcacggaaccgagtgctgcccaaccccagggctccggcttgccacgcaggcgcagtgtagccccggagggggcggggcgaggtcagggaggcgagaggccggccccttaaaggggcgatgtgccgcgggactcgcgcgtggggcccacagtggagccaccttcccaatcggaaagattagcgtgtgggaagctgtaacaaaaaagcagggggagtgcgggggtcggcacacaaagaaaatctggactccagagtttaagcgacccttcactggcttttcccggtgtct

SEQ ID NO: 50234 - DNA, 748 bp, Homo sapiens
gtgaaaagtgtcctgggtctccctgaaggaggaaagctgtgactgaataggggagcagctgaaagggacatccatgactcaggaggtcactgcacacgtgagcctcgggtcctttggtgcgtgctgcagaactgtcccttccctgctggctgccttctggggccacgcacctgacctcagcatcacaggcctctgtctacccccatttgctgggaaacattacctgggcccgcccaaagctcattcagctgggatggtctcccgtatggagactcctggtcccaatgcctgtgcttgggaaatctcagagaagagatgtcagaggtctgcgctgacagcaaggctcagcacggagggcaagaggctggcagctgaggagtgtcaccatccctggtcttggcagagtgagtagaccttgcctcttgcagcctttggtcctgagctgttgacacagtcacccaattccactgggttgctaagcagcactctggacgtggacaagccccagggcaagtgacccagcaggcacacacagaaagccaggcactcgggccaagggaggaaagtgcctcccacccctcagaagagctcccccctgggggcagcagctgtcaaagtgatatttatctttctactgggcagcagagtgccagcgtgtctgggagactcaacccactttccctggcaacctctcccaagcacaggataagggcccgtttcccatttggaaaagaaggacaggcctccc

SEQ ID NO: 50235 - DNA, 1859 bp, Homo sapiens
aagaagctgcttctgcccacaccgcagggacaagccctggagaaatgggagcttggggagaggatgggagtgggcagaggtggcgcccaggggcccgggaactcctgccacaacagaataaagcagcctgattgaaaagcaaagggtctgcttctgtcttcctgcagggcgcagtcctgccctggcgggggccggccaagaagggaagggccttgggagagcaaagtggggtttgccattcgccctctgtcccagggcgctggggcactgggtccacctcggcgggggagaggggctcgcagggagccatccacgggctttcggcgccctccagcggcgtctccggaggagggagagacaccaagacagcgagagagacagagcgcagagagcgagacgcgagagagcgagggtccaagaaggggagatagggagacgcgggcggagagaccgacccgaggcgggggcgcggggcaggggcggcgcgaggacctgacagcgtgtcccgcggcggggcgggggctcggccgcgcgcccgcgggggaggccgccgctagagggcacttcaggagggacagccctcccggcaccccggggcccgagctccagccccggcctcgcggcccgcggcccgcggcccgggcggcccgagccccctccccgggcgcgcggctctccgccttccccgccccggctggcgcgcggcccggcccggccgagcactgtcccggccccgaggggggcagagctcgggcgaaaacccgccctccagcgagctcatttccctaaaaaggggggggggagtcggagggagggagggagggagagaaagaaagagagaaaaagaaggaaagggagagggagacggctggagcccgaggacgagcgcggagccgcggaccgagcggggggcgggagacaggaaggagggaggcgagcagagggaaggggaagaggtcggggagcgagggcgggagcggtcgcggtcgcgatcgagcaagcaagcgggcgagaggacgccctcccctggcctccagtgcgccgcttccctcgccgccgccccgccagcatgcccggcgtggcccgcctgccgctgctgctcgggctgctgctgctcccgcgtcccggccggccgctggacttggccgactacacctatgacctggcggaggaggacgactcggagcccctcaactacaaagacccctgcaaggcgggtgagcgccccccggccccccggcgacgggccaggcggggaggcgcgggcgggttcgggcttggggttgggggaggacagtccagtgtgggaagccgggagctgcctggttggcaatgcagtggggaacaaaagaacgagggggagagggagggggatttgggggacttttcggactgaagttttgccgctgttggtggaagctgctgccgctgcctctcatcttcccagaggattccagaggaagtctccttgcgtcccgggaaaaccggcgggcaaggcggcttttccttctgtaggaaacttttctggccaaactcctgtgcgtgcgtgtgtgtgtgtgtgtgtgtgtgtgtgtgtgtgtgtgtgtgtgttctttccccttctcccccatctctcctgctccaggagctgggtgttttccagcctgtctgggctgccctggggctgcacatctgtctggcttggatctgggaggcctgagtctccaaggagcaggtcccccagccaccacccagcccaagtggaagaagaaagtttttccagggattccctgagatcgtgctctctgggtatcccgtagtttaaccagtagctgaagctttctgggacttaggagacagctgtcaaagtcagagaagcc

SEQ ID NO: 50236 - DNA, 1031 bp, Homo sapiens
ggacatgcatcagtcctgcacatatagccttggggctcattacaccagccagcctcctctccccacttccccagaaggggaggccttgccatgccctgggggaggagacggtggagtccagaggttgacctgaaagagtgagattcttcccaggcacaagcacacagatgggctcagccacagtgctcctggcaggtttacagctggaaaacaacacaaaaaatttttatcttgtgttgaaaataactactaccctgaccgtgaccccagggcttcctctgagtaaggagagacctcctagactccttagcatccagattccctcgcttccccagagggcagcccaaaagcacagagccccaaggcccagctcctgcccctaaggctctcctgcccatctcctctctccccacccccacttggttcccacgcattcttcagccatgacatcctcactccaggagctcagcagccagggccatgccctgccctgccttgcacttgctctgccctggttctacactggccctggacccgcaggccagcacagttctgtggcctctgcaccagggtttcactcaaggaggagtgggggcagagagtgtgggtgagccagcgttccctgaggaggtctagagctgactttgagcttacgggttgtgttgggataatattaaagtggctggtgggtgcgtaccgtgttgcatgctctgtgctgggggttcgtgtatatgtcttatttcatgcagtaatcctaggagacagattctgttatgtaggagaacactgaggcttagaagagtttacatgacttgtcagctaatagtagccaacctggattccaagacaggtctgtctgactccaaagaccttgccctttgctctatgtccaaaggtgagtctaaatgtccagccacacctgtatgcggtgatgcctgtgggtttgggtgtgggagcctgcaggtacaatgcctgtgaaaggtataatatgtgtgtacgggcacagtagcttatgcctgtaatcccagcac

SEQ ID NO: 50237 - DNA, 1011 bp, Homo sapiens
tcctcccacctcggcctcccaaaacgctgagattacaggcgcgagccaccaatgcccagccattcctttttaattagtctgctttttttgtaattggccagtttgcacgaagcctgacccctgccctggactagcccccatgcccagctccgaagcacatcctccttatctgaggcccaggtccccagaagccacaaccagagccctcaaaggtggtggcccagcctcccctcccccaagattctccttagcagtgtgggaaatggcacctccctcctcctcaaactccttcctggcctggccattcccaggcctggtgctttgctcatcctctgtctgtgtcccagacagtggccctgccccctcttctcagtgcttctacccgatctgctcttcctgcctgcagacctgcaggaacagagaccaaggaagggtggtgaggtcattctgccccccacacccacagacccggccttacatttcccaccacatcccaccccaccccctgctgcgatccacccagctgggtgtgagtcaggggccctggggaggtggagggctgcctgcctccccttcactctgctcctcccagtgcaaacacccaggattcagcagggaggaatggccaggacaggagacactgatagattgggagctggtggggctgtccccggggcttggtctggctgcagtggaatctgcctttggccttgttccaggtgctttcagatgcagcctgtgccagcagggtgaggagctggcctggggagtcctgggagaagtttagttagggctggagcagcatgaggggctgcagaagcaggggcccagtggggctggagagagatgacccgctaggggcctgtagctttcctggggctgggagttgtggccagcctgagctgggagcaccagtgggtccaagggcaccctggacctgcatccctgacctcccaaagtgttcctggggctcccccgactcctgtggtgtggctgccacggagcagggtg

SEQ ID NO: 50238 - DNA, 577 bp, Homo sapiens
cagagcctggtgtagtagaatactaacagcctctctactgtttaacaatcaggtaccacggaaagcattaggcaccttacatgccggacctcgctattccccataacacttttacaacctaggtaccattatccctactgtacagccaagagaatggaggcttcaagcgcttgagtaaatctacccaagtttacacaggtagtagtggtgaaattggcatttggttctaggactttctgactccaaagtctatggcctttcaaaggtaaacctgaaataatgccgcctgctttagtggatggactttgccgtctattttggctgtggggaagttgtttttcatttgcctcccaattctcagcttattgccagaaatgtgaatgataggtaaatcttgccatatataattgattctgcctgtcatgggtatgtcaaagtaaaagagccacctggaaagccttctttttggatcccccaagtctacactcttgtaattagcagctggcgcggagaggactgacagtgtttccccagcaacggaggagaacctttatgaggaggagacggttttaagaag

SEQ ID NO: 50239 - DNA, 775 bp, Homo sapiens
ggtccaaactccctgagcctatcgtctccactgacagccgcctctgggttgaattccgcagcagcagcaattgggttggaaagggcttctttgcagtctacgaaggtactgaggaaggcggcgggcgggaggagtcagataggaggtctctgggcatggtaaaacaactccctcctggcacctgaggggcaagattgtgggttcccaagggaagaagcagagagaatgatgggattgcctgggactgggggtttggtggggaactgaaaagctgggggacatgggagggactggaggagtggggaaaagagctccctagcagggcaaagcatgctgactcaccaccccttcccaccccatcctgtgtccccacagccatctgcgggggtgatgtgaaaaaggactatggccacattcaatcgcccaactacccagacgattaccggcccagcaaagtctgcatctggcggatccaggtgtctgagggcttccacgtgggcctcacattccagtcctttgaggtaggtcagtggccctgtgatctgacctttgaatccagcagttgctccctgggacagctgcctctctttgggctcccaggggtgggtctctggcagccagagccccttccactgatgaagcctcgacccctagattgagcgccacgacagctgtgcctacgactatctggaggtgcgcgacgggcacagtgagagcagcaccctcatcgggcgctactgtggctatgagaagcctgatgacatcaagagcacgt

SEQ ID NO: 50240 - DNA, 965 bp, Homo sapiens
aaaattaagaggccagccaggcacagtggctcatgcctgtgaccctagcactttgggaagctgaggcaggaggatcgcttgaatccaggagtttgacatcagcctgggcaacatagtgagaccccatctctacaacaagcaaaaatgaaaaaaattacccaggtggcatgcctgtagtcccagctacttgggaggctgaggcgggaggatcaattgagcctaggagctcaaggctatggtgagctatgatcgcactactgtactccagcctgggtagcaaagtgaggacccatttttgtttttgttttttaattttaataaagccaaatgaccatgatcaggaaggtgaggtcctgagcaccccgaaggaacaggaggtggccacagaggggtgatgtgtttgtgatgtgaagaaacagtggatgatgacaaagccctcaaggaaccgagaggccgtcttgggtggaccgttatatgtctgttgacttcacctgggagggtagcaggagtgggggtggggagaactgagtcaggtgtcaaagtcccctgtgactgtccaggctgctggagatcagtggatgacagcttcaaggaggggcacaggtcagccgggtgcagtggctcacgcctgtaatcccagcactttggaaggcctaggcaggtggatcacttggggccaggagttcgagaccagcctggccaacatggtgaaactctgtctctactaaaaatacaaaaattagccaggcatagtggctcacgcctgtaatcccagcactttgggaggccaaggtgggtagatctcctgaggtcgggagtttgagactagcctggccaacatggcgaaaccccgtctctactaaaaatacaaaaattagccagagatggtggcgcacgtctgtaatccaagatactgaggaggctaaggcaggagaatcacttaaacctgggaggtggaggttgca

SEQ ID NO: 50241 - DNA, 726 bp, Homo sapiens
tccacctgtccctcaccgaggtatggccttgccggcccgctgctgcttccgtccttcatcacgaaaatccagctgctcatccatcatctctgtcacctctgagaaagtcactgtgaggctgcactctcctctgcctgatgtcacctccatcatcccccaaacagccggctgctgctgtcagcccctcccacaggctctctgtttgctttgttgattgtagggagtccaccctcgtgacctgtgtgacagtaggaatgaggcaaaaacacaaggaggcccgggaaggacttcaccaagaactccccggggaggggctcccggccagcagggtggcaggagagcagacagagccagtggggaggggagaggcggagcagcagagggtccacagtccaggtcacgcatgggcacagtacagtcatggcaccatggcagagcgagtgagcaaagtgcacagctgggcggggtgccggggcccgcgggacagcttacaggtctcacgttccatgccaggccccagcagagcatgaggcggcccactcccagctgaggaaggggcacctctgggtctcaggggtctcctccccctcctcaaccccagtggctgctgtctcagacccctgcactctaagcaaggagaaggtatgctggggtatggaaggaaggaacatccgacagcctgacgcccccagtgccaagagaagaaagagagttcctttctagaga

SEQ ID NO: 50242 - DNA, 606 bp, Homo sapiens
ccacccacccccacactggcttttaaccccaggaaaggacacacccacggaggactctctcccattccttttctaagtcaagcaaatggcaggccagcaggtgaggggcccgagagggagaactgaggccacagcaaaagggctccgccccgaccgaggcccgtgtggcccacccagccaacagcgaggctgtgccctgagccggggctttgtcgagacttgagacgtcatccccataggcgaagcctgcggccccaccctacccgggctctctgcccctgcctgaagtctcagttgtggcgctgataacaacgctccctctgtgctaggcgccgggccaagcaccacgcaaacatgactcactgcatcctctccacgaccccgtgaggcttggcattgttattccctctttaccagggaaggagctcaggctcagagaggtcaagtaactttcccaaaatgacacaggaagaagagtgtggattttaaccagcctctgactccaagccatcacttccaggtgttcccttatccggcctccttcaggaacagaagctggggaggggctcccaggacaccttctactcacccggtgcttgaacttgt

SEQ ID NO: 50243 - DNA, 2747 bp, Homo sapiens
tctacatgaacctacaatgttctcaaaataaaaagtttaatttaaaaaatgtttttagagatagggtcttgctgtgtcacccaggctggaatgcaagggctggatcatagcttactgaaatctccaactgccgagcctttcaagcgatcctcccacctccgcctcccaaagcactgggattacaagcctaagccaccgtgcctatcgcaaatatttacttaaaaaaaaatcttcttttggccagttatcccaggacgggaaatctatcccgggaatataatccaaaagaaaacaaaaacaaaaacaaaatcgaaaaaaagcaagtcaaatgtaccagacattcactgcagcattatttaaaacagggaaaaaagaaacaatcagggaaatacttaaatcatgatacagccactggagaactacgcagtctttgatgtcgcaacagagaaatgttatttgaaaaaggaggatacaggccaggcgtggtggctgatgcctgtaatcccagcacattgggaggccgaagcgggtgggatcacttgacctcaggagttcaagaccagcctgggcaacatagtgaaaccccgtctctacgaaaaatacaaaaaaaaaaaaaaaaaaaaaaagaaaaagaaaaaattagccgggcgtggtggcatgcacttgtagtcccagctactcaggaggctgaggtggaagcatggcttgagcctgggaggcagaggttgcggtgtgttgatcgcaccactgcactcccgtctgggcaacagagagaaacctcgtctcaaaaaaaaaaaaaagaaagaaaagaaaagaaaaaggacacgaaattgtgatacgacaactctgtgaagactactagatacattacaaaatttttaatagtagtactctacgtggcattctggtagaaatgatttcctttcctcaaactccccataatattgttacatggtttttatacggtctgggggatgggggataacattaaatgacaccttttatgttaaatcacaaacgctggagtcaacaaaagttctttaaattcctccagcagtagagcaaacttggtattccaattccctccaggctttgaccaagagcgcacacgagggccaccgccttcgtgatcagaagcgggtatgactgggcaccggttggtccactgcggctgttccaagctgcccccacagcctcaccccaggactccaccaggagcacagggaaggggtccccgaaagtgggcgaggtcgctgcccggaggtaatgaccactccaaggtcaccatggagaacccgcagacagggctcggtgtggcccaggactccccgactcttaagtccaggtctcactctctgcgccgcgccgcgcccctcgccccatcccgagcagctaccccgaagctcccaggggctccgccgaggcgaatcctcacattgcggcgtggtggccgacaaaacccgggaccctgatcttggcgcctccacgccaccgcccggaggccaagacccccgagcgccgcagcatagcgtagcccagaccagtcacctcatcctttttcgccctctcaacccagcttttcccgactccgggaagaaccgggaagagaaggcggaggggagcgaagcgccgcctgataaatactgtggcccagtcccgcccccctaacgtcacttccgccccgcgccaagatggcggcgcccaggccctgccacgcagacttccgcccggcgcggagaccgaaggctggcggctggtcgcgttgcaggtgaggttgtgacgcgcggtgtggagccgcggcccgggtgcgtccctgtctggttcctgggcggggttcctggagagggcgtgtcgcgagccaaaggctctcacctgggtggtcccgggagtctcgccacgtgggaggggaggagctgagaggccactggagggacgcaccgactgggggaccggaaagcaagggggtggggttccgccagggtccgcgtgtcagtcccctctggtgatctcgtcgccccttctctcccaggcaacatgtcggaaggaaacgccgccggcgagcccagcacgccgggagggccccgacctctcctgactggggcccgggggctcatcgggcggcggccggcgcctcccctcacccccggccgccttccctccatccgttccagggacctcaccctcgggggagtcaagaaggtacccaacggcgcgtttctaaagaaactcaactaccttgaattccaagccccaggattcaactaatgtttgtgtaggacctactgtgtgtcaggactgtcgttgggcctctcaagcctacccctctttaaattctagggagtctgtcctaccttcaaatctaggtactgagtacaagatgttgaaatgactcccagaggtggttgaagggcagagaatcctaataagttaaagtcgttcaaaagcaatttgaacagtgtttatttacttttattgtgtgtttggacatctttaagaaacccatgaaagccagacaggcataaacttcgcagtcttagagggttcagaattcaccatctctgtgtgcaaactttttatctagagtatgatgaatcctaggtatggcattcgaggctctgtggcctctcccatgtgtatatgactgtggatgtcaagagtagcccagaaaggggtggggtcaggatgacagaagaacaaagcaggttttggttttggttttggttttttttgagaggaagtctcgccgt

SEQ ID NO: 50244 - DNA, 536 bp, Homo sapiens
tactcaggaaattatctgaggattattattcccttacttcaactagaagatttgctgaatcctgcccccaaaatattgtttcatgtgtatagaataagtgtgtcatgcaaagtttggtcggagttcctaaaagaacaaggagttggatcttcacgaaagttacaaaacagtttgtataactgtttttgactgcacttgctaccattaagtatttgcacaggcaggagaattgcttacaacataacattgcaacagctgcaagttaagaaggttgtgtggtaaaggaagtgaaaatgttagatcatggtaaacaaatactatctaggaacagtgaaggggcatcgtgccaactggattcctgagttgaaaatcatcctgctccaataattttcagactatcctcattcgggaaggatagggagggcccttgtatgtgtggattaaaataagtcatgggatatctgaggcctggaaaaaataaggttaacccttctctagtcctattccatgcagagcccttggatgtctctatagca

SEQ ID NO: 50245 - DNA, 1540 bp, Homo sapiens
gaagtcttcctcttaaaatggagtgacaaatgttaaggaaacaaagggagagtcacttgaacttgggaggtggagattgcagtgagctgagatggcttcactgcactccagcctgggcggcagagcgagactccgtctcaaaaacaaatgtgtatatatgaaagaatatacactgacgtgctaaggcaggtgtcctttggtggtaggatttggtggtttttatttttttatgacctatggtttctgatgtttcagctgcgagcaggtcttcttgagtcaaagttctaggcagatagataatttttaatatgcccgctagatggagcagcagttactgggtaactagcacctgttgcacagctctggtaaagattgcagtttgagtcaagttaaaggaaaatcctcttcattattttccagccccaatgtggagtgcaaaagcatgaggttcggcatgttgaaggaccatcaagctgtcaccggcaacgtcactgcgtttgatggatctattctctatctgcctgttaagcttcaacaagtgagaccaaacaggaaatggactttgagatgaaccctaagagtgctctggcgttttttgtttggttttgcttttaagagattgggtcttgctatgttgcccagactggtctcgaattcccaaagccctgggactacaggcgtgtgagccacttcacctggcccaggactggtgttttgaggggtaggaaaccatagaattcctgtatgttcgagttgtgcttttctgttcatagaggggaagacagatttctgcaggacatcacagcacattttaggtttgaattcctcaagaagcaccttctcacatgagaggaatggttggaagtctgtgacctcagtgataaagagtaacttaaaattgcaaatgtaggccgggtgcggtggctcacgcctgtaatcctagtactttgggaggctaagtcaggtggatcacgaggtcacgagattgagaccatcctggctaacacggtgaaaccctgtctctactaaaaataaaaaaaattagctgggcatggtggcaggcgcctgtagtcccagctactcaggaggctgaggcaggagaatggcgtcaacccaggaggcggagcctgcagtgagccgagatcacgccactgcactccagcctgggtgacagagcgagactctgtctccaaaaaaaaaaaaaaaaaaaattgcaaatgtaaacttggttggaattctcttaccaaatcatttttctgaatcgtagttgtcatgctgtgcttttgctagtgtgggcaacaaagtgaggggaaaagtagaaaaatgttttaagatactttagtgttcttaagaacacagttgaattagattaggacttggtcattagttcttagttttgtcattttgtttcacctgtgtgtatttatttgttaggttcttgagttaaaaagtcaaaggaaaacagacagtgctgaaatcagcattaagattcagatgacaaagatcctggagccctgctctgacctgtgcattcccttct

SEQ ID NO: 50246 - DNA, 4054 bp, Homo sapiens
ccagcctgttgacaaagcaagactctgtctcaaaaaaaaaaaaaaaaagccaacatgagctgcagaaaccagcagaagcagccattatacttctaagctgtgccaactaagtggttcccatttctggagccagagatgataattaagtcattgcaagttgcctgaagagaattactcaggcaactgggaaaggcagtggaaggtctgtgaagcaaagttttcaagtagatattgctattactggcaggtgtgcaaggcgtgtagtaaaatcagtttgtggcataggtcggcccttgctgactaaatcctctctggggattgaattgatgacgactgtgacttgagttggattcgaaaatggcttcccttggcctcttgaaagagtgcagatgaagccttttccgtggatttcagtaactttccagcataccatgacgatttcttccccaaatatacacatgctcttttgctctttgtgcctgatcttcagtaatttttagttttttaacaggcagaaaaaatctagcagctaggaaagttcaagttggggtgggagtttttagtgaacttttctcccaggtgtgtggcctttatttctatttatatatgtttgtaaatggaattaccccctttctcttgcaaaataaccgcttcctggctgttggctcactttgctggaatttttctgaatccaggttaagatttccagaagtcagctttggaaaacgtgacactcctaccaaagtccagatggttagaaagttatcacataccatgggtttcagtgtttttggaaacccgtttttttctggttttttttcccccctctccattttagaatcttctcccagtcccttcgggcctagttctgtctcatcttgctttattgggttttaaaaaccggtcttatttaagcttttctaatttgtatttatgtacttatttattttttggtatgatggcagggaggggacaaagcagaaataccccttttatatgacaatgtgtgagaaaagaaactttagcttaaaactccgtaaaatgtgctcacttcagcagcacatatactaaaattaaaatgatatagagaagattagcatatagaaaaaaagaaaaaagatttccttaaaacaagaaaaccaagaatgtttttggtttgttgcggtgcccagccgaggttgaggagggatgggtattgttggtgcactgctggtttcatttggagtgtgggacattagggtgagacaaggacctggaatttaaaaaccacagaatcaaacactgtgaaccactggtctctggctaagcagatcagttttctgattttccttggaagcgttttgaatttttctgttgaagttggatttcctaatactttttttctcttagataatcagaacaaatggttgaatacattataatacaaaaatttcttcactttttattcttggttttcttgcctcgtttttcggttttaatgccaaatgattgggtcatggggtgggaaataaaaacaactttgtataaatttgtagttgtgtttgaaataatgttgtttatttattattatattgatgtaactctttttcttcagagagctgcagcacttcctagaaacactcattactctgcttgtaagttgcaactccagtgttagtagccaggtaatttcatcatcagctgggtaagaagacttattgaaaaaaacagtagccacctcacttctcagacagatgaggcactttgtgtgtgtgtgtgtgtgtgtgtgtgtgtgtgtgtgtgtgtgtctgtgtgtggtttttagctctctttctcccatcagacaatttcttttaccctaagtgagagccagagtgtgtccacttgcaagggcagcctccccaccgctccactattttaacgcttgcccttttttacatatacctcacggggtgtctgtcaccattgaaataccttccctgggtacaaaaatcccattagaaggaataagatctagtagttcagtggcacagtagagcaactatagttaacaaaaatttattgtacatttcaaaatagaggagtggaattggaatgttcctaacacaaagaaatgataaatgagccgggtgccgtggctcacacctataatcccagcactttgggaggctgaggtaggtggatcatttgagctcaggacttcaagaccagctgggcaacatgggaagaccttgactctacaaaatataaaaatcggccaggcttggtggtgtgtgcctatagtcccagctactcaggagactaaagcaggaggattgcttgaacccaggaggcagaggttgcagtgagccgagattgtgccaactcactccagcctgggtgacagagcaagattctgtctcaaaaaaaaaaaaaagataaatgtttgaagtgatagcccagttaccctgatttgattcttacacatcatatgcttgtatcagaatatcacatgtatactataaatatgtaccactactatgtatccaaaaaattaaaaataaaattttaagtaccttcccaaagcacctagctgctcacttaagcactgcatttctttagaatactacagtttccctatttatttagaaactctgtgcttcctgaactcattctagaaagaacctcatttctgtgcagtagtctcttatccatggggaatacatttgaatacccccagcagttgcctgaaacctcagatagtactgaatcctatacggtactatgttatttgaatctgaaactcaggatgtctattaagtgactaatgtgtagcatcaccggtgtggatactctggacagacatgattcatgttcacgggggatggagtgggacaacgtgaagtttcatcacactactcagaacagtttgcaatttataacatgaatttctggaattttccatttaatagttttggactttggctgaccaagggcaactgaaacctcagaaaatgaaaccatggaaaggagggactgctgtacggtgtgacagggtcctttttacttgggcagcattttgttgaatgatgtgaaaaaggaattttagaaatgactatatattttaaaaccttaaaatttgggcctgaaattaatttctctagaggtttgggattattagagaagaccctgttttttctttctggctctatggctagctgagttacttagtaacttttcctgcctagagttttctttttttcaaaaaatgaggaacatcaagagcttgagaagaaaagccacagactgaaagaaaatatttgcagaatacacatctgatcaaggattgttatccaaaatatacaaagaactctttaaacttaataaagaaactagtcagtttttttaaaaatcggcaatagacctgtacagacatcgccaaagatgcacagatggtaaataaacgtatgaaaagatgctccacattatatctccttagggaaccacaaattaaaacaaggcacccattccatacctggtagaatagccaaaatccacaacacttaaccacgccatatgctggtgaggttgcagagctgcaggaactggtacagccacttgagaagagagttcttaataaaattaaacaggattacaaaaccacatacataatcttatcatatggagcagcagtcatactccttggtgtttacccaaaggggatgaaaactcatgtccacacaaaagcctgcacacggacattcatagcagctgtattcatcgtttccaaaacttggaagcatccaagatgtgcttcagtaggtgaatggacaaactgcacctggacagtggaatattattcagcactaaaaggaaatgagctatcaagtcatggaaagacacagaggaactttaatgtatattactaaattggaaaaagccaatctggaaaggctatatatgactccaacgtataacattccggaaaaggcaaaaccgtggagatagtgaaaggatcagcagtttggtcgggcgcagtggctcacacctgcagtcccagcactttgggaggccgaggtgggtggatcatgaggtc

SEQ ID NO: 50247 - DNA, 4666 bp, Homo sapiens
cagccctttgggaggccgaggtgggtggattgcctgaggtcaggagtttgagaccagcctggtcaacatggcgaaaccccctctctactaaaaatacaaaaattagccaggcgtggtggcgtgcccctgtattcacagctactcgggaggttgaagcaggagaatcatttgaacccaggaggtggaggttgcagtgagccaagatcatgccattgcactccagcctgggcaacaagagtgaaactccatctcaaaaaaaagaaaaatgaaaagctggccttaagacctggggtgcagagggattttacctcatctacgtggtcaagttgcttaccttgtcaccacaaaccgcacagagggctttcatctggagtccccagcccactgtctgcacaatcagggctagaatctcatttctctggcttatttcccaaggctgttctagtcacctcagctacgggagatctggctatgtatcttttggcaggtagctatggtgtcttgtcagaaggaaaacagtagcaatgaaaatgtcagatttttgtgctaagttcccttaaatattgcccaacaccaaacttttagtgagccagcccgttcattcatccagcaaatatttattgagactctgttatatgcaagatgttactttaggagatacaggtatatagggaaatctcgtgtaatcaaggcagattaaggtctaataaggttggagattaaagtgaaataattttaagggaaaaaatataagtaccataaaccatataaagttttaattctgtggatcacaacctaataatggtcatgaagtcaacttagtgggtttgttatcacttttttttttttaaattgaactataacaaaatatcattgcaatgcatatctttatggatattttgtgaaatttttgtttgccgtattgttacttatattggagttgcagtgttaaatgtttttaatgtgggttacagtcaaaaataggaaagggtagttcaaacatgcttcagaaaaatccacaagcttgcaggcgagaggtgactttggagagttagaattttgacaagtgaaaatgggtaatgagaggaaaaagtggagagcagaggccggtcgcagtggctcacgcctgtaatctcagcactttgggaggccgaggtgggcagatcatttgagcttggagttggagatcagcctggcctacatggtgaaaccttgtctctaataaaaatacaaatactagccaggcagggtggcgggctcctgtaatcccagctactcaggaggctgtggcaggagaaccacttgaacctgggagggggaggttacagtgaaccgagattgcaccactgcactccagcctgggctacagagactctgtctcaaaaaaaaaaaaaaaaaaaaaagtggagagcagagagaagtgggcctccaagcctggcaccaggaatgagaaactgagaactacccagcaacaaggaaggatttaagagatgcctaaagaattttgtgtgtgggtagatatggagagttaagaccttttgttaataattaattgtattccctaatggattactgatagcttatcagctctgcttgcctatgtggactttgacagctccacctttagtgtggttgaaaacaagtgagaacgccatgataggcccggtggtggggtgtctggtcctgccccctctctgccgagcaatctccttgaagggtgcctagttctcctgtggacagtattgacaacttgcctggaaaagccatgggattgctctccagctttggttttaagagatttaacactccattaggatatgtgtttacgggcttcatacccttcagagctctgtgtgttggaagcatacttatttcactttatctctgggtgggcttctcactccttttccagtgcttcaacaaaaggtgtggcggggactggcccctttctcacagcccactgcagtgggatgagagtcccaaacggatgacataatgtctggaaagcaccgagtttaaccaagagagaaatagggttattacaaagatgaaggggctctgagggaaattctgcaagagatatcattactttgaaatcacttggaaaataaatgagaggaatatcaccctgcccccatacccactgcagcactgtaattacggggtgaggataattgaattttagaaacgcccggggcccagctacactcttcaaaagtaatatgaagaatctgaccccctctggcctggcgaagagcaagctcctgagttcttgctaccggctccagcgactgtctgctttccttttctccttagcgccgccatcacgggggtcctccccgcaagacctgcagagagtgggatgttgcccccttccctgcgcaaatttagagacagctagtgccgtctggggaccagtcactgtgctaggatcagctcgagtactaagccgcgacagttgggctagaaagcccttcctccgagccccccaaggcccaggtggcagcgggttcagctcatagaggaaattgtcctgatgtcctgcagaacagaacaatgggagtggaaagggtggtttattttctcaagaaatcgactacatttcccaggcctgatatacatctcaatgggactgtcccacagaggaagagtctcctcggaacttcttcacccccaaattaacatttctcccaactttgggttagtagggttctttaggcgtctgatcattgtgggaagcggtgcggcatcaagtctgaaaagtgaatataatatggtttatttggaactcgaccaggaaattttggttcttttggctggtggaaatatgcagaagaaacaccatctaagggcgcgtccccttctgaagtacctttccgaactggggagggaagagaaaagctttttgggtgaaccagaagtggtaaaatcacattcaaatagagtgggtaggactctcctccagggggtgtggggtggaggctaggcggtgagagcttcccgcgcccagggagcaggtcttcacgggaggtttccggaggcaggaggagcctgcgggtcctcgggagtcacggccggatgaaggatgggagcgggcgccgaccacagccagggccgcgaggcgcaggagggcgcaggctggccaggtccccagcctgccggccccacgtggcagccccggggcgagcggggcgggccgggggcgggtccggccgctgacgcgccgggtatatagccgggcatgcgcgcggtgccggggcccggacgcagtgaggggggtcggcgcgcgtgtctacgcggacgcaccggctaagctgcttctgccgccgccggccgcctgggaccttgcggtgaggctgcgcggggccgaggccgcctccgagcgccaggtgagggcggggacgccaagggccgcgggatgggcagcggcggaggagccccgcaccccaggctggggcagtgggtgggggcggggacagccctgcgccgaggaccgggcgccgctcccgggcaccggcacacgcccggacggctgggtggaggctgcacctggccgtggtgccgcgctggcgaggggagaggtcaaggcgcggcctgtccgcctggagggtgcgggatgctagagccgcagaagggtgcccagagcgtgggtcgccgcgccgaaggctgagccaggctcccggattccccgcgcggacacggacgcagaacgcagacagtaggtggccaatccgaggggcggctcttggggcggctctatggggctctggggtctggactttgcttttcaggagctgcgtccccgggcccccgccggtccatctcccctctgaaggtacatgtacccaatcttccggctgagcgaatctccaacctggcttgcccacgaggatggctttctggctatttttggtccttaatgaccaagttaggtggtcgggttcaggctgccccctcttggtgggtgagggcagtgggacaaagtcgccatccgagcagtttcatcatctgatcctgaggtccagttgagccgggaaaatttcgtcagctctggactaggggttcacttttgaggatctggtgcttgccagggcctgggttccagagacaggcttctctaaacagttaaagggctcggctgtacaggaggactccggacacaattggggagtggctaagtgctctcttgtggcccgaatggaagcgtggggttaggagcagctttgacctgacccttcttcctggagcaagcctggtttgggtttacgtctttagtggctctcccctaggagccccaggccattgggacggctgtgctcctgctgaggagtggcctgggagttagccctggcctctgtccctgctctgctcttaactggccctgtgaccttgggagggtcaggtcagtaccacggtcagactagatctccttaaccacagcatatacaattccgtaatccttccctcttttattttattttattttattttattttattttattttattttattttattgtattttattttatttgagacggagtctcactctgttgcccacgcaagagtgcagtggcgcgatctcggctcactgcaacctccgcctcccgggttcaagcgactctcctgcctcagcctcccgagtagctgggactacaggcgcgt

SEQ ID NO: 50248 - DNA, 1958 bp, Homo sapiens
gccaccatggcgggtgcacgcagaaggcctggcccccacccttccagtgcaaactcttggggagaaacagcatccacgggtgaagaacaagatagcaacacaagagaagcctccatactgtgcacagttcagttcagagagcgggcatccttgaaagacgggaataattctggccttttgagataggtgggtctctgttcaattcctggccccgtcactctccagcagtgagaaatttcttaacttctgttctcaccagcttgcaggatgtcgtgattttgcctggaacatagtagagggctgcttgtcatcattctcatcgtcataatttttgtggggtggagtgggttatttaggggtcccagaggctgatagttgggttgggttgtaggaatggtgtgagcccaggcgtagggttgattcatctcttccttggcaacatggatgcaatttccctgcccttctgggaaggccgcttttctgtggcctgccagggattgtcccacagatcaattgggcaattttagggaaaacaaacttttttctacctttggttctgggagctgctctgatttcttcagagaagaaatgctccttctctgggctgatggtagccaggaaggagtaacaatgcctgtgtgtgcctgggtggtgggtgtgtgcttgtgtgtgtgtgtgcacatctgtgcacatgtgcgtgtgcgtgtgtgtagggtatatatcactcacaggactggttctgtttttaaaccctgcttaccttcttcctccttccttacctgctcacaccctgcactattccaagaggaaactcaatccctgtccaacatttgcagaatcatggggtttacacagtagtgttgtgaatagattgtgcgtgcctgggaaccaggacctccctctccccactatgtcaggataatagcctgcctgcacctgacctggccaaggtaatgctgcaccatgttgctgagccccacaaccatggaatgttgagcaggggactttggtgatcttggagtccagcacctttattttacagtgaaagaaactggatccagggaggtgaattggtattcccgagtcacatggttgccagtggccaagagacttgatggagaagaccaaagaagggttctatttttgatcctaaatgtgattatgaaattgctgacacctccagtctttgcttggaaactagaagaggaaggggccatttgtccctgtgcttattgagggagggggtgttagtttcttctggaggagtctcttactctttccagactccctggagacatgggaggctggggagtgagcagggaagggacctgctgctcagcccagccgggactcaccgggtgtctgcagtggggcttctctgacctccaggctggtgggctggtggaatgccaggagataaggagtccagagtccgccccatcgactgtcgccagccagggcttcatgcccacctaggggacaggagggcaggccctagaacacagggtcacgaagccccactatcttgttcccccctccccccactaccgtgggcattaaacctctcagggggcccctggttgggcctggcagaggcagagacgcagaggctgggccctctgacctgcacaaggaaaagaggccgggaaagccacagaattggcctgcccaagggagcccagagtgcccagccatgggaaaccgaattctccgccttggcaactggagatcggactgttgttagaactcctaacctccctccaagggcaggccccagagaatcttggggcttggtggaatgagaaggtgaatgccctacatttattaccgccgagttcctaatggccctcgtaggcagtgcattcagtattagtagttaataaaaaaaatcagataaaagttggatatctaaaaaaaaaatacatgtctttttttttttttttttttttttttttttt

SEQ ID NO: 50249 - DNA, 2089 bp, Homo sapiens
atagcctccgcctcccaggctcaagcaatcctcctgcctcagcctcctgaatagttggaaccacagaggcatgctaccatgcccccgctaatttttttttttttttggtagagacggggtttcactatgttggccaggttagtctcaaactcctgggctcaagccatccacccgcatcggcctcccaaagtgttgggattacaggcgtgagtcaccgcggccggtggcggtgtttttcttttagcctgaggatagggatccttgtccatgcaggtcttctgctggctttggtggaaagctgggtgtggtatggtatgagccagaaaggaccactgcctctgctcaggaggatagcctcagcaaatcatatagtaagttcctaataaatatttgttgactgtaacccctgagggcagggactgcctcccagccaattttgtccctgcatctcaggattcctttcattcttggaagatcccttctgatccttttctttgttccctgctggggaacaaggatccaggagaggaggaggcagccagctcaccagaagcacctcatccacccgcacagggattactgggctgctgtcctggagggacagacctggaccagctatattgtttcacttattttactggaagccctaaaagttgtatgggagcaagtggggtggggtatggggtgtttatcttgttatttgaaagagccctgtaagattgaacagtctgcactctctgtcctttcctggaagcagagggccccggccaggccccagggactgggcgcttgttttcttagagcacagcgtacttgaggcttggggccaggtggagccgtgctggcctgcagggaggctggccctgctttccctaccaggaaacagagatgacaaggctttgagccctggaattcctccctgcctccgcccttctctcctgctcactgagggcgcgtcctgtgccctgtcatcccaggcccatgtgactccaattggcgtatctgtattccaattccaatgctgaccgtttctccagggctggctgttttccatctgatgggctgggtaattctcaggataccaggtccctgggcagcaagccacgctgttcccatctcccttcccagaaagatgcaaaaagtacaaagtcacccactcccccaggcccgggctgctgaccaagtgccagctctcagaacagaaattccatgtctcagttcctgttcccagctcctcggccgccccctaacacccagcagacgctctgtggtgcctcccacggcagaagccttggccgtgggtgaactggtgtgtgcagtggctctgctggccagctcccggctgtggccatggtgactctggcatcactccctcttggcagcactgggccccctcccccagcatttcaggatgtgtgtgatggcagggaaactcaaaatttccatgagccactgagaaattctagaaacagcctgtacttgtggactttcctttttcttcctctgccacagggaagagtgggaatgttatttttggtgggattatcagctggttgaccttctcagggatgtggaaagggaggctgcctgcccgcccgggcctctctcccactgcctgcctttgtgtcccccaccccacctcactttatgttttaaaaaaaaaaaaaacaactctggcgggcgcggtggctgacacctgtaatcccagcactttgagaggccaaggtcgacagatcacttgaggtcaggagttcgagaccagcctggccaacatggctaaaccctgtctctacaaaaaatacaaaaattagccaggcgtggtggtgggtgtctgtaatccagctactcgccaggctaaggtggaaggatcgcctgaacctgggaggcggaggttgcagtgagccgagattgtaccactgcactctagcctgggcaacagagtgagactgtcttaaaaaaaaaaaaaaaaaaatcttggccgggcacggtggctcatgcctgtaatcccagcactttgggaggccaaggcaggtggatcacctgaggtcaggagtttcagaccagcgtcaccaacaaggtgaaaccccgt

SEQ ID NO: 50250 - DNA, 957 bp, Homo sapiens
ttagcctggcatggtagcaggcgcctgtagtcccagctattcaggaggctgagactggagaattgcttgaacccgggaggcggaggttgcagtgagctgagatcgcgccactgcactctagcctgggcaacagagtgagactcctgtctcaaaaaaaacacaaaaaaacaaaaacaaaaacaaacaaacaaaaaaactccaccttaatgttttacatctgtattccaggccagcttctctggctctccagggtcttcagttccgttgaaacaactgcaggagaggggggtccctgccctctccccaaggttgcttgtagttcacccgagcataaagaccaaagaacagtaaaagtgaaatgtgtggcgcctcatgaatgggcagtgggaaagtaacatgctttcagtgggtgttgtttggggatggacaccaggtactacccggccctccagtctctgccctcctggagctgatagtctagttaggaggagatggataatgaaaaaagactaatagggcattagggttctcaatgcctgggagtgggcttttttgtccacattgaagaggcgacgcttgaactgagacctgttaggaagatctaggggaagagcattctaggcagagggaatagcaggtgcaaaggctctgaggtcagaatgagcttgatgtgttaaagggatgggaagaagggcctgggtggctggagcccagtgagtgagatgagccagttatatggtcagcaggatgggcaaaggccagttgacacagtggtctatagaccaggaagaggagtttagattttattccatgtggctgggtgtggtggctcacacccataatcctagcactttgggaggatgaggtggggggattgtttgaggccaggagttcaggagcagcctgggcaatgtagcaagacccccgtcttgaaaaaagttaaaaaagaaattagaa

SEQ ID NO: 50251 - DNA, 3343 bp, Homo sapiens
gagccaaggaattcaagaccaggctgggcaatagggtgagaccctgtctctacaaaacaataaaaaaagtagccaggcatggtggtgtgaacgtctggtcctagctgcccgtgaggctgaggtgggaggatcgcttgggtccgggaggtcaaggctgcagtgagctgtgatcatgtcagtgcactccagtttaggtaacagagtgagaccctgtcttaaaaaaaaaaaaaaggcagtagttattaaaaacttggagtgtccagttggtgttaaagtcgtgatgcagttcattcatccactctcttgctgatgggcttttgggtccgccctggttttttgttactgtgaatagtgctgccataagacgtcctcggggttgaaagtcacccagaaaggagcctgtccgagttgcaagctaaaagcagaaacgctttgtggcaatcgattgctccctggggttggtgttagctggaaagggtaagcctttaagtctggttagaattttgatcccttgttaataggcaggcaggcagtttgcaggacgtggaggagtgaaagggcaagtggaaatacataagtggttatgttgtcagggaagtcacttcttttgtgccatattttctggaaagtgccaccataccccctgccttgaagtttttaaacctgaggatagggggccttgtgtgagcgggtgttggatcgtctggccctgagtgagagctgggtgtgatatgagccagaagcctctgtcctggaacccatttgtgtgtgtgccctaggcagcctctcttcagagccctgggccaggttcctcctgcttcctttgtgtctctggcagggagctttaagaagacacctgtagccgggagcattggctcacgcctgtaatcccagcactttgggaggccaaggtgggcagatcacctgaggttgggagtttaagatcagcttgtccaacatggagaaaccccgtctctactaaaaataaaaaatttagccgggtgtggtggcgcatgcctgttcatgtctggaggcaggggtgaggatgtgtctgtctgtttatatatgcgtttgcacggtgagtgtgtgcatgtacacatttaagcagcaggtgcttattaagatcctaccaaccccacaggactgttaggaaacaatcagaaaaacctaaaatataagccctgtccttctaggaccatatgacactgaaactaagcaggaggtgagaatgtttcctggatggggatgggactggtgctggaggattggggtggatctgaggtggtgctatgtcctgcagtacaccctgttttcttcatccaggcccttcacaccttgtggagagagtgcatggggtgcgtgcaaaccactgacatgaatgggacttcctagtcctgtggcggggaggagtgtggagatagaaacgtgtagggatggaggggtaggacatttcagatgcagcccagggcaagagagcagtggcaggtgagggtgacagtgggtaggacgccagttggagagacccctgactcccaggcagaagggccatagcacattgctggagggacggagtgttgggaggttgtgctttgggtggggaggggcggtgatgaagtgggggcaggaggttctggaggggaggggctgggtggccaggagggaacagcaggggctggagtgtttctttctgttcaggagcctggaatcgtagggggatgctctgggttcgtggtgagccccacagggagaaagcagaggatgtgggaaggccttaacttcagtaatgggatggtggctgccagtgaccttgagccagaagaatgtgctgtgtgggaggtttggacagcccgagggagaatggaggaattatgattcacttgtctacctttctaacccaatttggaaatatgggcttttcctttctttcagtaaccctctttctcatgagaatggggcttttttattaatctgttgataagtatttatagttactgagaaatcaaaagttcaagatgcagcccctgcctttcttgctggcgccctggtcgtgccctcttgagcagggacgacgcaggggctgggctggaaggggccggcgctgagcagcggcgcttcttacctgttttggttaagagatctggagatggaatgaaaaagcgctggctctgcctgtgagaccggtagccctccgacttcagtgtgcatcatgatcacctgagcacttagtcaaacccaagttgctggtccaaccccagtgtctgatttagtgggttatggggggaagtgctaagagtttgcacttccagctagttcccaggtgtcagtgatgctgctgttccagcaaccgcactttgagaacccctttcctggagaaattaccacacaagactctgcatctcagctgcagactggcatgggcggggtctttgaggaggagtcgggcgtgagcgggcttgagggctaggagatcgcgcagggggaggtagtggtacaggaggacccgggggaggtggggtaggctgggggcaggtggtcttggctgcaggcccagcagtggggttgccactgaggcttggcttctggggtccacttgctgcccatccaagcatgcctcgctactgctgcacaggtgcttgtcatgggccagcagattgacgtgagcagaacacaaaggctaaaggtctgccaagggcccacctcccctccccggggtggcgaggtgagaggcttaggggggctatcagtcattttgagaggtagggcgtgcacaggcttcttgtgagaggcccttggaggcacattttgctcagggtattgctgccagagagttggagttagcatttattagtatttattttactattttgctttctttttacagtccagaggtcttttggtttttatacctgttatgccgtgaattcacagggaagaggttccagtagctcaggcccgtacccttggtcctcacagtgccctcctctgggtggggcaggctggcccttcagttgaacctaggtatctttctcttgggcttccttctttttctggtcattttcctgcacgcgttccaggaagcggtcttggctcttagagcgctcactgtgctcaatacgcacattaattctcttggccagaatcttgcccttgtttgtttacagctatgccgacagcatggtggggaacactgcagacgcctctggttttgccatggtaacatctgtgggttattccttttttgaacagtacccattcccttgaggtctaatgtctacagtatcaccttatagattcccttgtatgtggtcaaaggaacaactccatgtttcctttctttttgaca

SEQ ID NO: 50252 - DNA, 3051 bp, Homo sapiens
ttcaagcaatcctcccacctcagcctctcacactgctgggattacaggggtgagccaccacatccagcccttgaaccagtcttaagtgtgtaacagtcccgcggggagagcctggacaccttccggagggtggatcctgggacatgcatttccctggtgtggctcatggcaaggacagtgtggttctggagcaggcggcttcttgtgccatagctatctggtgggagcacaggcagcagctccatggcatcccagctctgcaacgtgatctttgcaaataggtagctcctgggacttagcctagagtcttgttaattcagctcttcgaaggagcctctaggccatttaatatcctgtacaaaacccctgtctgccaaaatagcctaactgcaccctgatctatacatcccccttgtcatcatcattcaggttaggttccttgttgaattgtttgctttccctactttgttgagggcaggtgctaggtcctttgcatccccaatacctagcatgacttctggcacataattggtaagcagtgagtatttgttgaatggataaactcttggagtgagtttttaaagccagcaggtaatatgctagcttttagttcaattaatgtaaatgaaattcaaggtcagggagttgtttactctagagaagtgcataataggtggtcctgacacctgacttcagatgatctgggttaaagttggtctgtgggccaaggaggatagaatgtccttggaaagtggttctgagctccctgttcttttttttttttcttttgagatggagtctttgctctgttgcccagggtggagtgcagtggcgcgatctcggctcactgcaacttctgtctcccgggttcaagcaattctctgcctcagcctcccgagtagctggggttacaggtacccgccaccatgccctgctaatttttgtatttttagtagagacggggtttcaccactttggccagggtggtcttgaactcctgacctcgtgatccgcctgccttggcctcccaaagtgctgggattacgggcatgagccaccgctcccggccagggctccctgttctttatcaggttgcaggggcgatgcaggccgacttcagttagaagggaggcaaaacttctctgtctctagcacattatgtgcccagcactgtcccaggcactgtgttgcaggcagggaggagaggaggacatagaagaaataggagggaaggatgcatttcagaaagttatcttcaaggaatacaaatctagctggggaggctccctgggaaacaaggtaatgaggagtccataatagccagagaaaagtgctggaaaagtgacccaagacggcttcctggacagggaggcaattgaacagaaccagaattcaggactaagtaaagccgttgtcctgagaacccagaagatggggaactaggaaggtgccgggctcagtgctgtgctgtgcagcctttaagctctgtcttgatcagagtgcctctgcgagctcggtgctttcacagtttaattgtgccggacacgcttgggaagttcctggcaggccccaaagttgaacccagggcgtgtggcacgtcgtgttgtccagtgatttggccactagatcattctttctatttatttatctgatcccgaataacaagccgggaagttctgcttcatgggggtgacgtaagtgatggatgtgagtaccgcgtttcctaagccacatgcccggcctcacggtctgacaaatgggagtgaacttggacgacagggagaattttgcaactgtctgggaagtgttgatggatgaatgatgagaagtgaggtgactctggccctggcctcgggtggggaaaacaccggctggccactgtgggcccttcccgggtccctgcccacctgactcagttgctttgggaagtcccctttgctccagctccagctgggctggagcaagcctggcaaatgtgctccctccctccctccctcctcctggctccagcgcctgggcctggctgtcattacactcactccgcgctcagcgtggggctaaataagccattccctgtttgtctgtgccgctgcctggggccctgaccacccgtctctgcctcataacctcctcccacaggcgctggcacacacagtgggggctcagtaaatattagttggtgaacagcaggctcaaggttctaattttgttccctgcttctgggtcaccagagtttttattattatttttcttagttttcccatcctgcccctcccatcagcgcgaggtttcacaaggagagtgagtgggctccgctggccgccctcctgcactgtctggaaatttcccaccctgggtgcgctttgactgtgccaaggcttgaggcgaaggtcctgggagcaggagctggaggaagataatgcatcctttcagggtatggaggagagcagtaggtgggagggcaagaggaggcagggggagaatgggccgattaagccccggggcagggccaagcgagggttggttttccaactgtgagatttgctgtttgcctgagtgaaggtgtcagcctaggtcagcttgtctgaggggagagtggcttctcacacggtgttctttgggtgagtggggtgggccatgggctggatggtttttctcaaagctctttctacccccagagaagcctgtagggcagtattcagttgatgaccaagctggcagatgtttgggtttctgatttcgtaaactgggactcacacagatgactgtatcgttgttagtttgaccatgaatatccagagtgtattaatcaagcatttgtaaaacatttggcagtttccgtagccaaatgtgttttttttaattgatttatgttattttgatgattttttgagacaaggtctttctctgtcacccaggctggggtgcggtggcacagtcatagctcactgcagcctcaaactcctgggctcaagcagtcctcccacctcaggcctcctcagtagcggggactacaggcattcatcaccacacctgactaacttttgcatt

SEQ ID NO: 50253 - DNA, 2094 bp, Homo sapiens
ttaaaatgacaagataaatggaaggggcactcagccctttgtaccttgcatcttgacttttttctgataggactgacttcctggtaccttgacttgactgttttgaaatgttaattttgttgtttaattgttatcatagaggagctataaaaataaggcccaagttgacagtctgcccacttttttagctcaagcagggatgctgctgtggagggtgaggatacgcagacgtgtggttgaccccattagggagtcatggatgctgcccttcacaaagatcccatgtcagctgcttctcaggctttcccagtcaaaagactcacccagaaaagacagcagatgggatgccatgccttgcctgttcttcctggttgaatgtgaaccatcttggtgccatctcaaaattctgcatggctctgacaaacactttgcaggggaggcctcaacttgggctattttttcagctccagcaatggaatatattaattttttaaagatttgaaatgaaaggccttgtgacctcctggaatggaaatactgtaattgtgtgtgctccacccctgtggcctgccagggagtgtctcatcctggtctggttctgtcttgccctcttttgggcctggacagagtgtcacaactgggaaatgttcaaggaaatatttttgtgacagggtgttcctggaactctgttctttgtgcttgagcccctctcagagcacatggaaatgagcaaagaagttgagaggttaagacactgaattttatgggcattgggcatgaattaatcgttctccatcccttctgccctgcacatctggcttggttgtgtcttgcacaaagcaaaccaagtggtcgtggtgtcacccgagcctgcgccgtgtgaattggacatgcaaaagcaaacgcagcagcagagtgatcagcctctttccacctgcttgcatgtcctataaagagagccctcgagtccaaagtctgtcctggacagcctctgtgataggtctgggcagaccttgggtgtgtgacgaggcagcaccctgccctgccagtcacaccactggcaggaacgatttggggccaccagtggccacaggggcagaagtcacagggttccaaggccaccttgaattcctctttcttctgaactgattgaaggaaatttcatcagatgtgaatcactaacaaattttctatttctctctccctccctacttgtctctctctgatttttcttttttgttccgttaatatccaccaaacttttccttgcgacctccctatctgctccaccttcctcccgctaaatggtggttgctgtgcaatggggcatgtgccttctctccctgccctgggtggggctggccctccctccgcacggcagtgtggggatacggtctcctctgtgtgaccgtcatctccctctgctccctcctgggggccagcgtggtgcccttcatgaagaagaccttttacaagaggctgctgctctacttcatagctctggcgattggaaccctctactccaacgccctcttccagctcatcccggaggtatggcaagccagggccttcaccccggagcatgccggcgggcacagtgggaggacctccgtttggatagaaggcatagagagggcacctggaggccctttccttttggaaagcgaagctagaacttaggcgtgaactaggagaggcagcccagcataggctgaagagctgggttcaaatctcagctctgctatcagtaggttccgtaaccccaggcacaccactgacctcacactgcctctgtttcttcagatgtgaaatggggagagcaatagaccggcctcaggatgatgttgtgagggtggaacgagcgagtctgctgcagcactgagtgcctggtgcggaaagtgctgtctgatgtggggtgaaaagatgcagtgtagcgagctcactctggcttagttgtggtgctcagattaaggctttgggtgcagagaagtttaaaaaacatcatcagccgggtgcagtggctcacacctatattcccagcactttgggaggctgaggcaggtggatcgtttgaagtcaggagttcaagaccag

SEQ ID NO: 50254 - DNA, 3361 bp, Homo sapiens
ggctagtcccctagaggaacgggattaatttaaatttacatagctacaactacttatcggtcactgcggtaattgttaagactggttttgcctgtaacttgcatatgttttattggacatcagtttcaatatttcatttgcattgctaaaagtcaaaatccttttgactttgccagttactcagtgagaggacagttggagccagtttctgttctaggcttacagttttaaggacagataaaggttagtttttaacctcgagatgaacagactgttaagtttctacggacttgcccatggggttccacagtgagcctgggccggggaggcaggtactgtgtcagggggaagaaaaaaggggcttctagctgggcaggtgacacacagggcataggaagaggtcagttcttgtggccgaggaggtccggcccgggggtcccaggagcagagatctcccttctcttcgatgtggaaagtgaggagggagcagagccttgctcagaaacggagctcccccaatcccccaccgccctagctactggactggaactaggatggacacgaatgtccttctcattgtactaactgcactcaacaagcgggaaagatgaagcgagggggtttaaatgtgtgcgtttgttgaatgacccacaaaaactgaaggagcgcggccggactgatcacactccttgagacaaagcgggtgggagacccagaggtgaggagggtggtcgcctgtgggcgaggactgggaggccaggggttctcggcgaggcggtcccaggaggcggcgcggagccgctgcgaggccgcagggccgggtcgcaagatggccgggccggcctcccgcgcgggtcgcgcgggccacgcgggcgggtttcagatgttccgggcccgggtaggggctggcaggagagaaggggccggctgcggggagggctggctgagaagaagcgaaaatgggcggttagcagcagggacccggagccggaggagccgagagcagcgcgtgcgccgagctctactgcctcgcgggaaggcggaagggtggggagggcggcgctcggggcgggaggcccggccgggtccgctaggacagcggggccgctgggaagttgtgagagcggcgctcgggggcgcgcttgcgtgcacgagggcccgggccgcgagcagccgcggccgtcccggtcgccacccttagcagcggtcgcggtcggtgccgaagcggtgttccccgccttagccgctggcgcctcccaagagagcggccggtgggccctcgtcctgtcagtggcgtcggaggccggcgctgcggtggccgcgcccttctggtgctcggacaccgctgaggagccggggccgggcacggctggctgacggctccgggcagctaaggctgcccgaggagaaggcggcggccgcggcgtaggcgcacgtccggcgggctcctggagcctggaggaggccgaggggaccatgtccgggaggcgcttccacctctccaccaccgaccgcgtcatcaaaggtgcctggcgggccgggccttcctctgggacccgcgggaaacggccttcggctgggcggcggctcggggcggagggaggctggggccgggctgcgcccaccctaggagggctcggaggggtgtagacagagccgggcggcagcctccgagagcagccacccggacccggcgttttctgctgcacctggtcaggtgcctggccgtcagtgccaagttccctcccgaagggttcagggtgcagtggggacttcttctcccaccgccccgaagggcccggatccctgtctttttttctctttaagaaacgactcgggggaagccatcgggggtggtgtgagcagggagtcgactcttccaagtaagatatttaagattagatctttcttgacgtccgccccccacccttttttaggacgtataccatgtgccttttgacccgctttctctagatcattgcaagtcactgctattactggaataaacttagtatgaacaagtcagataaatccattatatgatgtttaaaataagtttacggagctcttgacagggtaatggtattttattttccctttggttataaagacttggagaatgacgttttctgattcatatgtgtacctgcgttagatttctgttgttgttataagaacaaaatgtaaagggctctttgctctctaaatcttgtagagttttaggttatagttgtttctccctttaaactaagaagatggattacacataaccactaatttatgtgctgcttttattcagccgtaagtcttaggcacaacccttctctctgagattaacaatcggtttgaaagcgctattttgtaagaagggaatagacttagaccagctgtgttagtggcctctggatgcaggggttagcgtgacagtggggaaaattattaagatacttttcttctttttcattttggtattagaaggagaaaggcaactaatactagtgacgggaatacatttttaaaaggtgaaacgccttattgcatgttcagggagggggaagaattttagtgtataacttaggtttcccccctctctccccaaatcagcctcataaatgttaattatctgtactacataattataatgggatttttgagatttatctgcttagcatttgtatgctatcgttagaggtttaactgaattgttcatctaactgacattatcccctgaacagctaaattattgtgaccatttaaatgtgtcttcatattattagtgtatagcctataagaagtatatagccctctcttaagattcagagtgtacttaacataaccttttttgaggaatcaaggtcattatgtacattaatttctgtactgtgctgttaatatggccggtgcgttctgctgtataaagttgttagcagtttcgtcctgtactaaaatgacttcgcaatgctataccagttcagtgttttgtttgcttttagtttctctctccagtactgttttctgtcaaaatatgcccttaactgctttctaatctgctacgtcttagctgaagtaggcagggaaaccagataagccagaactgtgggtcaagtcagaataaataggatcttagtgaagcttagtgcagccctcaggaatctcacaatcaaatcaccattgtgccatgtaatttccaccataacatgccataagatcaaaagaagattaaaaatcttaaatgacccttaaatatagtaataaatattgtaaaataaaatgtaataaaataaaaaagttaaaatgcaggggctaggggcaggcatggtggctcacgcctgtaaccccagcactttggaaggcccatata

SEQ ID NO: 50255 - DNA, 653 bp, Homo sapiens
ttttccagtgactaatgtgatgaaatcatttaacttttatttctttttacattgcttaaaataaagagcataatacatattcattgttgtcagaatagaaattggtacaatttctgtggacatcaacttggcaatatctttcaaaggtatttgtacatggcctttgatccagaaattctacttctaaaacttaatcctgtagatatataattgattctcattacttgtggatttcatatttgtgaattcccccacttactaagatgtatttgtaacacccaaatcagtacttacagaggtttcataatcattcatgggaatgtagtgtgcaatgcaacaaaaaatttgagtcacctcactcacatgttcctagctgaggttgaacaaaatgatgccctaccttctttttgcagccctcatgttgtaaacaggcattcttttgagttttatttagtgaaagatgttttatgtttttgtgcttttcatgagtgatttcactgtttagaatggccaccaagtgtagtgctgaagtgctgctgtctagggtccctaagcacaaaaaggctgtggtatgtcttacagagaaaatatgcgagtgttagatataagctttgtttaggcatgagttatggtggttttggccatgagttcaa

SEQ ID NO: 50256 - DNA, 850 bp, Homo sapiens
aagtggaaactgagacactgagaaggtgactgatgtaccccaggccatggcagccaataggtggtagagctggggtctgaattcaagtctgtcccctctaagcccagcatctttactgccacaccccagctgggatgtcccctgcattctctacaagtaatgatttccagaccttattctgaaagcacttaggatagtcccaggaaagaaggatgggggtagggccaggcacggcattctcaagatcaaatccatttaaattcacttaaacaaacagaggcccgtggtgctctgagtcatccactcaaacaaacaaggcgatgttgaaactttgaacccacagagatccatgctctgaggagctaagggacacacaggttcaggtggagacccctgcctttcactaatgctctcctgcacgcacccaacagaccctgcgtggtatcagacctggccaggccctgggagcaagccctctgcaagcacaaagatccctgcctcccagcacacccagaactggtcagccacgtggaccaaggacagcaagcgtcgggacaagcgctgggtcaagtacgagggaatcgggcccgtggacgagagcggcatgcccattgccccccgatccgtgagtccagggctgggggccacggagagatggggcccagggatctacagggagctgcacttctgtgcattaaaatgggggtggggcaataaaggccgcacccaaaccatcccagattaagcaggggttcaaccgtggtggggttcagcggctgtaaacctcataaagctgcagacaccctcgtgtgcctgagttgctcaagtggtttgtgcggggtacagatct

SEQ ID NO: 50257 - DNA, 1564 bp, Homo sapiens
aaaaaaagaaaaaaagaaaagaggtgttcagttttagacacatgttccctctgagtgaagaggttgagtaagcagatgaatatccaagtctgcagttcacgggacaaggtctaaaactgcagatggaaatacctgggactcattcaaaagagattttgggaccagcctggccaacatggcgaaaccctgtctctatcaaatataccaaaattagttgggcatggtggtgtgcacctgtaatcctagctactccagaggctgaggcaggagaattgcttgaacctgagaggcagaggttgcagtgagctgagatcaccccactgcactccagcctgggtgactcagtctcaaaaaaaaaaaaaaaagaagagagagattttgatttaaagtttccccagtaattctagtggggaaactttaaacttttaactagcagccaagattgtgaaacatgggaatagatggcgttttaaaagccttaagactagctgggtgtggtggcacacacctgcagtctcagctatttggcaggctgaggagttcaattcaattcctgggagcccaggaattcaagtccagcttgggcaacatagcatgatcccgtctctgaaaaacaacaatccataagactagacaagatcacctagggagatagagagacaaacagaccccaggactgagcccccacgcacctggatgcttagaagtttgagagatgaggcggaaccaaaaaggcaactgagaaggtagagccagggaggtaggaggaaaacggagagatctccctggggccaagtggaaagggaattccaaaagaaaaatgtgaccagtggtgacaaatgcagctgatgggttgagtaagatgaatacttagaattgactgtcagatttggcaacgtggaggtcaccagcatccttgataagagtgagtggttgggcagtggtgagcaaaagcctgtttagggagacggggagtagggggattggagatggtgtggtctttatggtcactggttacagtttactatgggggaaagcagacaaatccaggagtcagaggagggtgtggggtccagtgaggggtgatgtggctggcgtttaggcaggtgccgttgcagcgcatgcgtgtgtgtgtgtgtgtgtgtgtgtgtgtgtgtgtgtgtgtgcgcgcgcgcacgcgccgtggggagcagtgggtcagtagctctttccaggaagccccagaaattcccaggcaccttgaggagctaggagtgggtcttggcaaatggggaaggaaagcgtttggaagagggtgcaagtcgagtttccccagcctgagtggtgagggcaagtccacaaaggtcaggagagggtgtgtgtgggaacagggagggaggagcaggagggcttgggcaaggcggctgcccgcttggctcgcttaggccccaagcctgccagaggcatttcaagccctccagagagctgccctcctaattccttccctcccttgggacattcttcaggccctgactcagccctcagccccctactctagggatgttgggagcggctgaggttgcct

SEQ ID NO: 50258 - DNA, 2146 bp, Homo sapiens
cccaagaaaccgctggtggacgaccctggtgagaagccctcccagcccattgaggtgagtgctgcagggtgctggggacagcagcctgataaaccagggagattagggttttggtggccccagtaaccatgggcataggccacgaactaagagctctctctccagtcccacatggtttatttctgtaatgccagcactcaggacagtggctggcatacaggaggcgctcagtaaacatgtgttaaataaatatgtgttggccaaagcaggagcagaaaagggagtggtcagtgcgcactgggattatcaggaaatattcttggaggtggagctggacccttgagaagctccgagggcctgattcggcgaagacccatagcagaggctggcaggaagcagcgtgggggtgggggctccggtccctggggtggcgggggaacctggatgggcacagtgaagccaggccttggagggcgggagaagatgggagaggaaatggggaaccccattggtgctgtaacagagacacaacttggcagaaactggcaggactgcggaatcgcgggatcaggaagcgcgtaggcactcccggggcgtgctgggcaggtgagaggccgtggcggggatgccctcttggcaccctgggccacacctcctggcaggagcccggcccgtgcgctgaggcctgcccttacgccggcccggtgcgctggccttgcttttcacagtcgatctttgaccgctgcctcccacccccacggtgcgctgcccctcactgcccagcctctccccgcccccaggtgctgctggagagagagctggccgagctgagcgccgagctggacaaggacctgcgggcaattgagacccgactgccgtcccccaaggtaccagcccccagggttcacccgcggggcacgccggcgaccgcagggtcggggcgagccgggagcctcggcggctgggctgggcggaggacgggcagccgaggtccggcctccagcggcgcgcaccggcctcgggccctcctgggcgctggcgggctcgctcctccataaataaaatacagggcgtcgactttcgcaagtgaccccgaggagcctttctaagcggactccacgtcagcccgacgaccgggcgcccgccccgtccggcccccgggccccagcctcggggacccccgccccttcccctagttcccgccccgctcccgggatcggccgcgcgggcgcctctaggaccccgcgtcccgcccgctctcctcccctcccgagccgcgaacttttccggaggcggcggcctcggctgccgctgggtcccggggtcgcgggccctgattgcgccgtttccccgcgcagagctcgccggcgccccgacgggccccggagcagcggcccccggccgggtgagtgggagacgcgggaggaggaagggggctgtcccaggccgggcgggagggaacgtggcgcggccgggcggggcggacgggggcgatcgcggggcccagccgggggaggaaggaaccgcagagccgtgtccgggagggaccgcagcgccactctctgcggggcgccgttcccgcgccaccgagggcagctaactcctagcagaggaccggggtcgcggccgccgggggcgcagcgcggttagggcggccccgccacggcccaggcactcccgctgggccctgccgggcctcacccttccccgcgcagcgactcgggaagtaggacatcctgtggagagcccaggacccgggagacgccctgggaggaggtggcagggatgggggcgatggggggtcagagcggtctaggggtgaccagggtggggtgcggagccccaggctggaggctcagtctctgtgccccgtgcagcccggcctcagcctggagctccagctacccacatgcaccttacctgggttccgcccggtccctgagtccccacaaaatggctgatggaggaagccccttcctaggtcggagggactttgtctacccttcctcaacccgaggtaaggacccagccctgctctctttctcacggagatgcccacccaccaggcatgttggtgccccaggggtggcaggtcacagagccccttgcttctgccagtgcctgccctaggtgggggtgcaacccc

SEQ ID NO: 50259 - DNA, 4711 bp, Homo sapiens
tcgatcgtctgcgaagtggggcgcggggcagtccctggaccggctctgctgtgctccgggcagtcgggggcttgcgggcgctccggggaggatgcgggcaccaccggctggacggtcgcagcctgcagggggccctggggacagcctgcctcatccccccggcgggctcgggccaggtggcagcgcctgggctcgccgcgcggaggcggcggcttctcgggctaggggcggcggcaggggcggccccgggatcacatgggcggaggcaggtccgggagccccgggcgggctctccccagagtcgggtagacggcagcgggagcggtggcgtctccccgccttccctccctcccgggcctgggcgcccagccggacaggtgagcggcagccaggtgagcgcgcccacctgcgcctctccgcgcggcccgccctccccggcgccgggctcctctccgcgcccctgtcggcgcggaaccctggcctcgtccgcggcccagctccctggagcctcgcatcagcgggggcgcccccgcgagctgcgctctccccggccggagcgctcctcctccagcccccagcccgcagggtactttgccctcggagcgaaggaggctccagaactggtagagccgggccatcgggctgggcacctccccgcggcgcccgcagcgcggagtccactgaccggctcaaaggtctgggaatctcggggcggccgcgagccggcctcggggactggggtgggggcggtgctgggaacagaggctaggcctgggcccaaggggaaggcagccggggatggagcggacagaccgctggtgctcttgatagattctcgcagcacttgcgtccccagggcagccccaggatgggtgctgggcagggtggtgcccagcctggcaccgcggcttcctgcctggattggctcctggctccagagctagaggctcaggaaatcccacaggggtctgtctgcaagggcacttccttgcccagcggaggggctgtggatgggaggcctgtcaccccggctgtctgtcgggcagcatcaggaatctgggggtgggtgtgtccagcttgacagatgaaccctggcctccttgccctggcagccggcccctgggggaggtggggagcccggtcttgcccgtgtgatccactttgccaagaacgaggtgggcagctaggaggcccatgtgaagactcggcctcaccccaccagtccttcacctggccagtgacttacacagtctgtactggtgccagcctgttccttgacccgtcactcctgcttcctgagccctgctctccctaggccactcaccagccctcccccagagtggagaggaagtaccgtgtgctgtgggttttggggacaggaagcaagcgctagtgggactgagccctgatggtggaggaggggagactgagggggtgctggcatcccctccacttgccagcccctgccccccatgctccagcaagccccctgcctggcagcctgggcagccccctcctgggagtcgctccctgggctgaagactaaggaagggagaacccagaagcatggcttcccagggtggggggaagtgaaaccgggctgagggagggagttagccacttcctctacccaccccaaagcccctgagtagctgctccgggagctgtggtgccctctccttctccctttggctcctctcctgctgccttacagtgcccccagagccggctaggggcatggacttcacctcctggtcctctcttcctcaggtatggcgttgacggtggatgtggccgggccagcgccctggggcttccgtatcacagggggcagggatttccacacgcccatcatggtgactaaggtaaggatggtggctcaaagagatgagaaggtcctgccagaagcgaggtcggccctgttcaccccactctgcacagatggcttgctttttctgttctggagctagggatctgctgctgcctggcgtgctggctgtaagggagccgtggccctttgccacggggatgtggtggccacttcaggaacagaccttgggagtgaaagggagctgggaccaggacagggccggctcttgcctccccagttgctatccccacacttgcaggcagccatttggggtgattactagaacaagagccccggagttcttggcagtctcctcttgacctgggcccaggctgggaacattcacaggagggctgtgcaggcagccacctgcaaggtgcgatttgcacgggcaaggctctctatccaaaagtatttccaagcacagttcctgaaattctgccactgcacattctttgggaggcccattagaatgccagtgtggggtgggggctgccacctgcgctcctggaggggatggctgatcagctgggtgtcatgagcaggcagagggacatgcaggagggtgcaggccggcctgggtcaagccagcctctgtgtttcttgggtagcagagtgggaagtcccttctccagctgggccacggtctgagcatgccagctcctcatccctacaggtggccgagcggggcaaagccaaggacgctgacctccggcctggagacataatcgtggccatcaacggggaaagcgcggagggcatgctgcatgccgaggcccagagcaagatccgccagagcccctcgcccctgcggctgcagctggaccggtagggcctcccgctctgcagagcctgtggcattccccctcctccaccaccccacgtattgagcagcccttgctcctgcccatgggctagagctcagccctaaagcggccttcttgggccctctccacaccttggtgagaaggtcctgggctctgcttcctgcagcagggtgggctgaggggtgttcccatgcctggttgggtaaaggtgggcgccaggctgggcgtgcagtcacaggctgggcagggcgagctggcaccagccaccttgaagcccgggtttgactggttcccaagagtgtgcagggcacagggcgtgggcatgaagtgggttgaagaggggaaccttctgggaaaggtatgcccgaggctgcatccccaggactcctgcttccaacagggcatggcctttgtttagttcccagctggaagtgaggacttggggggctcattcctcatagaggctgtctgttcctccccatcactgaaggcagatgcccgatcctgggttactcctagggttttgagcctataagccaaggtggggccagggtggggcctggaggccaagctatagggggaacaggtggctccctggggtggggcattgcagtgagtcacagatcgggaatgccaggagatccccgagccaggagagccctctgcacgggcctagaacctgagtcagacacctcttgcatcctggccacccccacattgtcctgctctcttcagccctaccaagcccctccttctccaactgccctgccctgtggtgtggcagaagccggctcccttcatgtcattcaggtccctgggtgtttgcaggagcgggaccccaagaaggagggtagagagcacctcatggcatctgggaatggggcagaaagctacaggaggctgagggtctggcagcggaagggcaggagcctcggactgtctcttcctctggggttctctggagggaccagggctcgggggaggtaggcctgggctgtaagtcaggcctctggttctgcaccaggcaagcccagactccagtctcttaattttttttttttttttttttttgagacagagtctcgctctgttgccaggctggagtgcagtagcgtgatctcggctcactgccacctctgcctcccgggttcaagagagtctcctgactcagcctcctgagtacctgggactacaggcgcgtgccaccacgcccagctaatttttgtatttttagtagagatggggtttcaccacgttggccaggatggtctcgatctcctgacctcgtgatccacttgcctcagcctcccaaagtgctgggattacaggtattacaccgcgcccggcccagtctccttacttttgctgacgtgatgcccacccccccccccgcccccatctcccgcctcctaccctcccaggtgacctctctggtattcagaagccctggggcaggaagcagggctccaggctggagccagagactgagctctcctcaccctgatcccatggctctcccaggaagcggagggtcctgttgccctacatctctagaggcagcctcacggccaggaatgtgtggcaagatgggacgaggcaggctgtccctcagcccagacttcagttacctcccattcagggctccagctgggttccactttggaagagggtacccagggagctgggagggcgtgcccctctcgctggtggggagctgggcctacttgtctggaaggaggcaggcgggtctcgccctttgtttaactggggagacccctgagaaagggatcaggagtgacgcgctcaaaggcaccctggcctccagtgggcagggtgcacagctggcccagtcaccgtgggctctagaacttgaggcagctcactttccctctctgggtttcagtttctccatgggttaaaatataaaggattatttctatgaaatcagtaatcaggccgggcgcagtggctcacacctgtaatttcagcattttgggaggccgagtcgggcgga

SEQ ID NO: 50260 - DNA, 1034 bp, Homo sapiens
tgaagatgcagttgtagagataaggcaaacttgcaaaacaattttggagcaattaggcactaagcagtgtggtattaattacaaaagcaggaggcgttctgggaggggaggggaaggaaggctgtgtgaggagtattgctggacgttagaggtggtggtgagagggtttagggaaggatgagcaggaggcccgacatgctgggagatggagaaacactggtccgggcgacggctgatgtattggggctgggggattttttagggggaacctttgttctgagatgagccaggaatgagcttgtttcaagagggctggtcagtgtcagtcctggctctgttccgcgacacctctggtgggctgtggtctcagcaggacccacgtgctcaagggcaagccttcccgagcttccccatcgtgttgcccccagtccaggaaaatgaagggtgtgggaggtacagaggcatggctcccaaaccagcggcaacacctgagaacttgttggaaatgcaacttcccaggctccagcctacacccgctgaattgggcatggggcttgtgggtcacgagcccagagctgggtgtggggagactcacttgggtcggtcccacctctgcctgacgacttggaccagccccccttcctctccctgggcctcaggtcagactagacgctctgagttcccttctctgaccttgatgactctgctcattccttcggcaaatatttgtcgagcagctgcttcatgtcagacactcatctgggctctggggatgcaatcgtggaaaaacagagtgacacctctgaccctatggagctgacgttctagtctacaaatgaggctgtggtcccacgggtgcacaagtctcagggtcccacagctgccttttgagaatcactgtgtagctgggtgctgtgacatgtgcctggagccccagctactccggaggctggggcgggaggattgcttgagcccaggagtccagaccagtttgggcaacatagtgaaacccccatctctttaaaaaaaatcgc

SEQ ID NO: 50261 - DNA, 1664 bp, Homo sapiens
tccatgactttgaattttaaaatggagagaagttggcttcccaggaaatggtgcccctggccctgggcatcggcccacctggctgtctccaaggctctccttcccagtggctggtgcgggctccgggagctcagctgagtcccattggggtggcaacggaaagggagcaggggagtggggagtacggagatgcaggctggaaactggcctccaggaacaactgtgaggttgaaggcgagatttccatgttgggagcaaatttaagagccccagatggacacggcacacctggagacaggcactgctgcctgagtgtggcccagggagggctcggctccccaaagctccacggggcaggcccagacctcccagcagagtagggacaggctggttagcccagactcccgcctctgaggagaggaaccagctctccttgggaagagggcctctgccctggccggccctgactcccaggggacttcgaccccttgcttcatccctttatgtttctatctcctcagtgcaaaagggcagcgtgcttcctctctgctggttccgtgggatcggagccaggccccagtgtgcaatgtctttgcacacagataatagcgtgcgtgacagaggactctgtgcttagctgtcacctgctgccttcctgctgcccggtccccggcagaacccgcatgcctccctccctctctggaccctggcagtctctgcgccctggctccgagggaaggggcagggggcccgctggtcggcgagggctgggagcccccgacaccttggctccaagggaaggggcaggggtccgctggtcggcgagggccgggggccccctggtgtcgggcctgggaacagccgggctaggccctcctgggtgtgttggcccaaggctctggccctgactcctccccggctgcctcctcccaacaggccggcctcggccgcgctggcgactcggcggtgctggtgctgccgccttccccgggccctcgttcctccaggcccaggtaccagcaggccccggagggtcgggttggggtcttggaaggctgggaggggcaggagggagacgggcttccccgagagggatggggtcccccaagcccagttggctcctccacctcccagattcctccccctcccccacgctcttctcctgccccccacccccttgcttgcctaagctccggcacgggaccctcattcctggctgcctcccaccctgcagcatggactcggaagggggaagcctcctcctggacgaggactcggaagtcttcaagatgctgcaggaaaatcgcgagggacgggcggccccccgacagtccagctcctttcggctcttgcaggaagccctggaggctgaggagagaggtgagggtctggggggctggggaggggaaggaggttcccttccgtaccccgggccctgactggatgggtcagtgaaccagtgttcttaagtgcctgtgaggtgctcaccccaggactaggcacggagccgagcagagcgcgaagccccagcccctgcccataaggagctgacggtccgggagggtccgggagggtcaccagcgtgctcccacagagtagtgggcagtagccagctgggatgggaaagtgtcattcgagtgataaaagcggtggcagggcctggg

SEQ ID NO: 50262 - DNA, 781 bp, Homo sapiens
aaaacacaaaaacaaatgaatgcatgtggccagtgccaggtgagctgccctgggggttcactggagttgaggcaggggacagtagtctcccctgccagcctaggattttgggcgtcattcacccactacccctagtgctagtcccagaggatgctgcggagggggcagcctcagctctcttttcagagaagatcaaagctgggcttcccagggtgcctggctggtccctgccggcagctttgtgctctccggctctttgtgaaaggaatcttggcgcagatgtttgtgttgcctcctcaggcacctgtagatataatttacaccatgatatcattgtctcaccttttgcctgggtggctgcctgagaaaggtctttctttttatagaaaagatcaaggctgtctggcgcgggactccatgagccccaggcgctggtcagaaacggggtagtctctttggcgccacctagtgtccagtttggcccatggcggggcccattcacggggcaacactgggcttctgggcacagcgggaatacagaaagatacagcactcctcatgccttcctggaggtagaaggccagtggcagcgactgagctggcatgaatgaataagaggatgtggcactgagcgccaagggctaccttggaacgcaccgaggagcgtcccgtgagttcaaagcagtggccgtgatgcaaaaggagggctgggtcttggagacgtggagaagaggaatgctgagtgatggggtggctgctggggggatgcttagctcagagc

SEQ ID NO: 50263 - DNA, 2994 bp, Homo sapiens
catcgaatgccttctgagggctttgtaggttccagctcaaatccccctctggctcttgttctttggtgtggcagccatctctcctcccaggggtcctgagggtttcagcaccagggttctctgcagccacacaatcagcccggctcgggagcaaactcccctggaagaacggagttatgagttggtcagcagaggaggctggggacaggcagtttttggtcttttacctctgatcttgtccccaacctaagccagctagctgcgtgctcccactccctctgccgcacgccgcccgtctatgttcccggactttgtccagtgcagtgccctcttcccttcctgcactgaggagattaactgaagtgacagattagagttagaagtggcccaaaggagcatctggtacaaccccctttggttagagaagggaaagtgacttttccaaagctgcacagctagacagtcataatggctaagctctgggggtgcttttgatgtgctagggatacttccaatgctttaactcacttaatcctcacaacccgagataggtactgttaccatcctctctgcagacgaggaaaccgaggaccaggaggttcagtaaatggtccaagtactcctagctagtaaggaatggatctacagcctgcctcccaggtttctggcttgtggggggcagagtttgtccctctgtcatcagaggcagccttccaggcacagctctggtcacctctggtcacaactggaggtcaccacagccctccccagcgctctgtaggctctcagctttgtgcttcctcccacgggtactagctccagctgagcttgcaggaaacccacttcctgaagccaggacttccccatgggaagtgcaggggccactgggcagcctgagggctgaccctgctcaggacactgtctgtctcaggaactcatggcagtggtttaccttgtcaggagtgcatggacgggctgcccctcccattccttcaagcatcactcagagagccctggcctggctctaggcttgggactgcggctgccacaggaagggggcatccccctactttgggtgttgggtcagatcctgcccccgtgcccgccagggctcaggttcctctgagctggtcctgggccaggacgcatctgcatggcggtggtggggaggaggggtgcgccatggcctggaggggagtgtgtgttggggtgtgtgtgtggaggttcttttgagtcacacacaaagcattgtgctgagacactgcattcctgctggctgggcttcctgtttccagatgcattcctgtcccagagtcaccacagagactgtttggaatcccgccccacattctccaaattcagggcgcgatctggcaaaggctccctcccccaccctcttactttggagggagtctgggctccctcctacccagggagggctggcagggctctggcacggccggggtgtgattccacacatcttcttggtcttgcataaggcagttcctggagacccagcactctggttctctctctgcctgtgagaagcggaatgggtactgtctaggaggactgggcagggtgggggcaacccagaggacccatggctagcagggaagggcctgggcttgaatgtgactctgttgagacatggccagcaattctggcacttggctgtcattcggctggcctgcgcagagattggctgtgggcctcagtttccccattttataaagttttaaaatctgatagtttgtggctctctgataaaggctcctgcagtgggtgtttggggactggttccagaaaggagcaaagggaaggggatgcacagactgtcttacccctcccggtaaacagccacttccttccagtggctctggctccagcctctcccctcccctagaggtccaggtgctagtctgcacgtcctccagctcccttatctgcctccgggggatttgggtcctgctgggatttttccagccctgccccctccctctggaggaggtgccttctttagaggacaccagccccagtctggtcaccaggctctctctcatcttcagtagcttcttgggctccttttaggttggggactgaggggtggaatcccacgggccaaaggcagggtgaggtgggaacagggggacatttacactttggcccagtctccaggcggctccccgctggctcgcatctttccagaccttgagacctacccagtccccagctttagggagcccgggatgagaaagaggcaggggaccgggagggggttcagatctagctgaggacacacgcgcgttctgcagttgtaaaagatttcccggtgggcaggatcgtttcccctcccatcgcccaggtttccgagcggccaagagactggcccccaagccacactgctagggagcgccgggtgcccgcgtcctggtcagcgctcttcccaccgccagcacgtggggctcccatttccttcctggctcttgtccggtcctccagccagccccggctctaagtccgcggcaggaagacggacgctgcgtgtgaacccgcggggccgggcggaccggcgccccgagccagacggcgtccccaggcgggggccgggtcctcgcagaacagctgatcgggacccttattttggccacagccacagttgggggcgccacccagtccgtgccttcgacctcgttcttggcgacccggccacctgcgccccccacctggcacccttgccttccctcctctcgcccctcccctccctcctctcgcccctcccctctcctctcccctcccctccctctcctctcccctcccctccctctcctctcccctttccctctcccctctcctctcctcccctctcccctctcctttcctcccctctcccctctcccctccctctcctctgcccaccctctcctcgcccctcccctctcccctccctctcccctccccaccctctcctctcccctcccctcgccctcctct

SEQ ID NO: 50264 - DNA, 2114 bp, Homo sapiens
cctgggaactgaataactttcaaagccagtgctcagcttctctgctccgtactagcgtttacaggtcttaattcaaaccagatgcctgtactagtttttagaccccaagtcaacctttctgagccacagcttcccgctgggaataatgatgcctgccctatctacctcacagacttgttatgaggataaagtgagattaaactgcctcaaagtgctttgtaaacctcaggtgaataggaaaggggaaagtaaggctggagtgatgatggggaggtcggaggataagggggggctgggattgctaatggggactaaaatggccagtctcctggcaagattttgagcaggtcatttcattgaggcctcttagatttcatatttgagaattagggcactgattcctgactggctaggcatggtggtcactggcttgagtcagaccaggaatgtctcttagaaatggtcactgataggcatccttctcctccagtcaggaggggctggtttccttatctgttgcagtctcgactgccagagggaggcgagcgtggtaggcagtcgggggtcccttgtgtttggggggcccagctcccgcttcctttgagcccggaaccaatgatccgaagccttctttcctgatgggattctttagcgaggacactaccgaggcgcgacttcctgacgcgcatccgatccgggaaggcgcacttccgctccccagttgccgcgggatggcaagccggcgtgggggaagggagaggtcggcggagacgagggagggaccatatccgggagagcggcagcttccgaccagtggtcgcgcttccggagaggcgcttccggtggcggcggcagcagcggctgtggtggttccgggtgtctttgtccccccggtgtcgctgccctggcccgcaggtgggttggggggccccctgccgcccctctgccccttcgcccctccgcccctccgctggccgaggggctgcgagggccgggcggcgaagatgcgtggggcgcggaaggggccgagcccctctttggactgcaagtcccgtctccctggcaacggcctcggccttgggggcgggcgggaggaggagaaaccgcgcgcctcagtcctcccttggtggcctcgccgcggctctgctgggagacccggcgctggcggctgctgaggccggagcggagggcccgggagcgtgggagcaggagggtggcgcgcagccggtttcgcgtttggtcggccagggagctgccttcccaccagccggtcgaggaaacaacgggtcgggcttccggggagagggcccacacagtctcctcgccggcaccggcctcctccatttttccgggccttgcgtggagggttttggcggatgtttttgaacgaaggaatgtcatcggggctctctcgagcccctcaccccgccagctactctgggggtggcgtggcatagtgagaggagcgctaagttgttgggaggcctgggtgtgagtagcagttttgtcactacctggttatgtggccccgggcaagtctcttgatctctctgagcatcagtttccttgtctgtaaaacagcatgacagtatcatgcaccactaggttattgtcagggcaaactggaacaatgtaatttcttgtttcatttctttcttctctatattctctccatccattgctttcattcattcttattacccacctccctgttttccgaaatatccttacttaagattctccacttttccgggtatagatggaaatttcccttataagctgttaatttctttctttttggattgaagccttttccccacgactctgaaagaggacagcgttcccaatgtcccagtttaagcgccagcggatcaacccgcttccagggggacgcaacttctcaggtgatcactgttctccctacctggcctcatcctgggaagtatgtgctctggagttagtttggggtttccctggtggagagcaatttgctgctgatgttcctctggaaagcaggagatgcccacagtgattgccagtgaagctctgtggaggagctggctggagctgtagcctttggatttaccacatcctttggttgactcgtgcttaag

SEQ ID NO: 50265 - DNA, 844 bp, Homo sapiens
gggggctgagagaggagggtgcccacctctgccccacctgctcaagcgagtggtgcgggtggaaagtcacctacccaggtctgcgtcggtgctcttcttcatgtctttctgcagcctccgggtctgctcttccagcctgcaaggcaggggacgggctgcttggggtccccttccttccccctacctgagcgaagcccaggtgctctggagggcctgccaaggaggaggagaaagggatcttctccacggggacttttcccgctgactgaagtgccactacacccaaaggctatgagtgaatgactctcacatggccattgccagggaacagttccagcagcctggtgacctgagctgccctcagcttccagggtgctcacggggcagggcacggggcagacaggtgagacctggcagggggcccttgtccctccctgcctcccacctcatctttctggggttgacactcactgctgaagttttccatactccctttcaaagtctctctccacctgaaacgagagagataactcaattatcggagaaatgacaacacggtggaaaaaacctcccagcctcctgaaactctctccacaccctgccccagtccgcagaaaacaacatggtccagttcacacaagcaccgacagatcgctcctgacacggtatttctgagatcccaagttaattaagtgtttgaattacggaggaaggctcccctcccagagggtccagccaggcaggtgccagcggactgtggctctgctcttcccagctgggagcaaggcactcgctgcatgccctcctcaccccaggctggaggcagtcagggtgctcagaacgt

SEQ ID NO: 50266 - DNA, 1722 bp, Homo sapiens
tgagtattctctaacctctaagaaagccccaggaaggcaggcaagtcacaattctctcctgtgaacataaataatcgagagcaacaaatggggattgccttttgggcaaactgagtcttacaaaataaatacaccattatgaagtgtctactatgacccaagtatcacatcatactgcagcaactggaattgtgactctattactctaagactccctggcttcttttctcatggcatgatagttcccataagtttaaacttaaccatgcctatttagagggcaggcagtgagtaatagctctggaatgattaaaaccagtccaatcccacagtggaagggtgtgtgcggagtgtaattctggcccctttaaaaagagaagcaagttttccttgtcttttgaagcctgctaagtcgtgcaaagaggatagttacccagaagggagtgggttttgattagtgaactgggtccaggctgccacagcgagggccacagctctggagggactggcgcggggcagagatgcccacaggagagaaagacgacactgactccacctcaatgggtgtttaaaaaaggagggaacaaggaagtccctcacttcaaggagctaggaggacgcgagtccggcaaaacgggtcagacgcggagtcccaggctaagaggatcatccgccactctccccgggagtcctgctgagagactgcgactccggaaagcaccgagggaacgaccctagggcaggggctgtcgggccttgctctggggcggaggggtcgcgcgggaccggagggagccgggacgcggcactgacacagggccaggggcctcgcgggtccgcgggtccagcagctcccgccgcctgggcctcactcaccagctcatggtcccgaacctgcgtctgccgccggggtcctcagccacaactcgtttctctagggtcacttccggattcaaccagtctccaggaagtgacgtaagcccgcctctctgcccggaagaggcggttgggaggcggagcccggcgcgttaacccttctgctgctgcgtgctcgccgcggagtttcccttgccggcgactctctggctctggccaagcgcttagacacacaggctgcaacgggggatgaggggaacctctgggggcgttttctgccttcaacactgactcctaaagatctcttcacctgaccatgcagggcccttagccgggctgtcccctctgtcaagtggtttctaatccagagacagtggcagcaattgtctgtgggagaagaagccatttgggatggagaaagtggaaaacttacattctctgaatgctctttcctatcttttacagtttgtacaccacacatgcattacctgttacaaacaaacggacgtttcccttccaagatggcacagggctctgaatatcaatagataggtgcttttcaggttggaatgtttcctagagttattcaacacaataagacgcagagtatgagttgttccctgcctttcagcccttccctttggtctcctctacaggactcaaatgatgtaaattgccccattcgttctattccttcatttaactaatactagttgcactaatattagtgtcaggtaccgagccaaccttaggatacagctatctcagagaagtatctgccctgctcttgttccttcccagagctactttcctggagggagagacaagcaggcaattataatcatg

SEQ ID NO: 50267 - DNA, 831 bp, Homo sapiens
ttcatccccaaacaccccaggggttcttggaaggagctatgcctctaccccttccctactttgatgcctgattttgccctagggcacagggcctgttcattgcaaagcctctactgattccctcccatgatagccccatctaggccttccctccaccttctccctacttcatccctgagtttcagggttgagtctcctctccccatatttacaaaacccaggtgggttgggtagctggtgtgatgctatctgggacagtcttatctagctacaaagtgtgaatcagtgattacatcacacagggttggtgccagcctggcggactgccatattgccaagtaacccagtggttgaaccaggttgggttgagtaatatccaccaatggatagtgagtttgttaatcatgcagcatagtacactgttgatgaaagtgtaacaccgaaggcctggtttgattggagaaggtgcaggtggggctggatgctgactatgaagacagtcagggacagtatcttcctcccatactactcacttgagaaatacatagaaatctggaaggaaacatctagtttagcaaagagatggattatatgctcaatgttaggacctttccgccatcttggattccctttgttaaaaaggaaggacacttctatgaggctattgaagccacagtctgaaattttagaagtttcatgaggtaagagaagggaattcaagatggcagccggtgacctaaaattgtgtgggtgggaaaatttaagattccatactgcattctccttcttcatctctcacttcaaaaacattcttttctagggccacagcct

SEQ ID NO: 50268 - DNA, 2191 bp, Homo sapiens
agctacctctggatgctacagcctcctcaaactctatgggtttctgtgcagaagtcggtgccaatggctgccatccctgtaaaaaacccagtgcttctctgtgtccccttcttggtgaaggcaccgttattagagttaacatataccccagcttgccagcgccatgcccaatgacacacattgtcctggcataactattaacagcatccccctttagtctcaaaagggtcctgtcttagatgagaaattatatactcaacctcattgttacccactcgcctgctcatcacagaaacccgagggtcatctggactctccctctccccaatatccccacagcccccaagctctatgggttccacgtccttaacaccttttaagcccagcccatggtccatgccatcacctaggttgcagggtgggcaccttgccttcaatcttacctttcttccattcttccacctgctgctggagtgaccttcccaaattgcaaatctgatcacatttaccagcctaaaaatcaaatggtgactctcctcccccagccaccagccaaactttaagataaactctaaactccacaccagggccatgaagttcttggctcctaaccatggatgtgcccctgccctacccgccccgacccccgacccaaccacaagcctcatccctcacctcaccatcctggctcccatctgtcccttgctgggtcccggctcactgacaccctgtgtccccatgcttgcccgctacctgtctatctccccagctatactgcaagctccgtgatagtgtctttcgtctctgaatcaatagcactgacatggtgcctgatgcaatgtgttcagtaatatttacgaagtgagtcaccgcccatccccaacaccaaatagtccatggcggctgcagtcccctgagccagtgggcctgcacttgaccgcctccacatgtaggagaggagactccacatgtagtctactggaagacgtctctgctccatccattagggtctgttcttctagaattgctgtgggtgttgggagccccgtgtccttcctcggctaatcattttgtgactgcagcagcctgtatttttctgctctgtgtatacagagaagggttggtaggggcggtggacctgtgagttccgagctctcttatagagaggagagttccaggcctctagaaaatttgggttgaaacttgtgtctccaccatgggccaatgagggcgagaaggtgctccctgggaggctgcggctagaggcctgggctggcatgaaatgcactgacccaggtggatagggcactcagggccacctgctttgtgaggagaagaaatagtgcctgggccaagcctgattggaaactccagggagagcaggacagaccgaggcagccttttgttccctccctgtaatgcaatgcacattccccacttaaaggcaatttctgcacttcaaaaggattccagctggcgaaatttaaggtggagaataagcccccagtcaagaagcttctcaggggcctttcagttttccttggcttgagaacgggatgcatttttaaatgtttgcctcttcatgtttgtcagagcgccaggggagaaacgcttcctcttacttccacacctctctcgctcagccatagctggcacgggagccagccacgttttcctgtgttactttgccttctcatgaacctgcctgacttcctctctttctctgcctgcttccccacccaccccccagctcacaccccacccctagggggaggagagagtcctgctgccctgggttcactaggtttagcagctttccttcaacagatgctgaaagggccgacagtttggctgacacagctcatagctcacactccaggagatgctctcccacatgtcattcattcattcattcattcatgcattcatgcattcatgcattcacctgttcactctctcacctagtcacccagtcagccagcatggcatctgaggtgctggtggggcccacgggtgactcaaagaaagacaacacatagtctttctctcctaacttacaaagtgcttgaagctttgagagacaggaatgagcaactacagcacaagacacagggaagtcaaaacccagtttagagggtaggaacattttaaaagcacagagaaagaaaagatcagccagggatgtaggtgg

SEQ ID NO: 50269 - DNA, 2262 bp, Homo sapiens
ttctcttggcttctctggcttccctgcccctgaagggttgtcacagaagtgcccttccatcctccctgaaccacacagtgccaataacctccagagctgtctgcctggcatctctaacctcttccctgatcacttccaatctctcctgaaattctagacttttctttggctaaactggtcccaagactgtgactgaccatttaaagaaactgaaggtggggacgttgcagaattagattctctttctgtctcttaccatgtgtttaatcctcactctctctccaaaaaatacctcctccttccattctcagccatgctggccatcagctggtctttttctgagtctcaatttgggtcaggagatgtttcaatgaaaagaatgaccaagaaaatatagaccttccatgctgggcacgcacagaggatatcagggccagaatgagtcttggaggtcacctgacctggcccttgtccatgagaaagtgaggcccagagagggaaggatattgtccagtgtcaagcagctttgtgcaggcagaatccaggcctccgatgcatgactgaccgctcttttccaaatcgccaaaccagctcagtatccacaaatgcctgaggcacatgatgcaccaggaccccagtttcggcctctcatctagtcccttgactccctgggtggccttggtcttggcccccaggctggggtctcaccccgcgctggacccggacatcaggggccgctctcttgtcctgagtagggccctctatctgggctgagcgaccttggagtaattcgcggtgtgctcattccctttctcccctctgtctcccctgccccgccccatccactcctgttcctcacaaccaggagcctggagggaacacagagcgatgcaagcctggagaaaaggccccgatggcccccagaagacctcttcagacagcatgtgagtagctactgtgtactgtgctctcccttcccaaacattgattcatccatcgagcatttattaagcaactcccaaattgtttgttgaagcactagactgcaagcactagaccaacataaaaaaaaatacctttctttttgagacagagtctcactcttcacccactgcactggagtgcaatggcgtgatctcggctcactgcaacctctgcctcccaggtttaagcgagtctcctgcctcagcctcccgagtagctgggattacaggcacatgccaccacgcccagctaatttttgtatttttagtagagaaggggactcaccttgttggccaggctggtctcaaactcctgacctcaggtgatccacctgccttggcctcccaaagtgctgggattacaggcatgagccaccgcgccaggttcaaaataccttttcgaataggcattatcttttttaaaaattttttttaatagagacagggtcttattatattgcccaggctggtctccaactcctaacctcaagctattctctcagctcggcctcccaaagtgttgagattacaggcataagccaccacacccggcctgaacaagcattatagtgttgcttcctggcctgtgagcaggaaccttgtctgaggaaagagaaatctgcatcctggctcttacgaaagctcccctgccggtcccagggagttctcagtacaatcaaggacagagaagaacccaatgatagattggtgtgattggtattattaggggagcacaggggaagaacaggaaagttacactttgtcaagtgtaagaaagtattcatggaaggcttgctggaggaagtgatatctaggctgagacttgaaagatgagtacacatttatctggtgaaaggagtagaaatagagtgttcggactgaagaactgcttgtgcaaagtcccagaagcttcctgtatccttgtggggacctgatggtgtcccttaaggcctggacagggaggctgagagactctaggctttccagattcagctccttcaccctgctggggctctgcatcttgaaatgcctctgcttttgctcatggctggttctgaactttgccccagctgcagggtaggaacaccacgtgccccagcctgcacatggcaggggatggggggcggagctcatgtcacaaggcccatggggtgggctccgcagaggctgtagtgttccaggagaggggtgccatgaaagcgcggttagtagcctgcaaagtgttgaagggtaaagctgcctgtgaagcaaagggaaggtgcaggttggaggatggact

SEQ ID NO: 50270 - DNA, 1308 bp, Homo sapiens
aagcagcagagggcttgtatggaaacgccggttattcgtccctacccggcccccgccccccgcccccccgactgcccctgccgtcgcctccccgtgggcaagtggtgggggcctgggcttacaaccacacgttctcctccaactagcatcccttccagggtgcactaggatgcctctcagaggttctcccccgcctcccgaaggaaaggggaaaaccccgtgggcgtccggagagcctttgcgcctcgccaggtggagggaccggcgccacccagacccgcgagccgagaccctccccgcggcgtcgctgcgggaggggcggaagagcgcgggcggtgggcgggagcggtgctgcgaggcgggatctgcggggcgtccaatccccttcttcccccgcccgccccctccccgccccccgaacgctttccaccaactgcgcgcggcagtgggcggggcccgtcacggctgtcgtcttgggtgcgatttttttctcctcctttttttaccctcccgtttttttcttttcttttttttttccctatcctttttttgtgaatgaaaaaaggaggtcgcgagcggtacctgggactgcagcgccaggcgtcttcgcggcagcgccttcgccgcgggcccgggcgcgtagcggcggcggcctcgcccctctcccggcgcccctgcgcgccgcccgctgcctccgcagcccggctccgcgcgccgccgtgacattgggcgcctggcgcgcggggcgatgctgatccggaaggggcagcggctgcagtgcagcgcgcgcgtccgctcctgggcccacgtccggcctgggctgccctgccggagtttctgagtggccgcgagctggccgggaggctggagcccagcagcagcgcggcggcgccggcgtcgtcccaacttgcaggcgcggagggacccctgacatttcactaaaatgagcgtgctcagcaggaagagatgtgttcctcacgctagaagccaccccgtcacatgtagtggtgtaagtagatggctgcttgcggttatggcggggtggccagcagcccttgcagacgcgccgctccgccctccctgccctgccgcgcccctcgctacgttccccgggccccgctagtccctgggctctggcttcggctgctgggtacagcggggctggagcctaatcctttccggtgtttctagggaaaggaagatgacttgattgcttcggcctgtcgtgcccctcccccttctcgatgtttaaaaatttttaaatttctattttgtgtgtgtgcagagtagcgtgtcagaaaaaaggaa

SEQ ID NO: 50271 - DNA, 1284 bp, Homo sapiens
agatttgaacattcttgattggtttcagttaattgcagttatccttgctgaagctcaaatcctgcactctttggcttgactccagagtcttacgagcttcctctctatctggaatgatgagatgttctaggttcctcttgaaggttctgtgccccagacctggaatcagccatttctccaggaagtcctagtttcttgtgttggaagtggaactggtatttgtgtgcactaggaatgctcattgtactgggatgactgttgtttctaggtcttttctgggggcagagctgggaaatatattgatctttttaaagataagatacctcatgagtttatactgatacttctaattaaaattcagaaccaagggtgtttacttcttcaatataagtgttttaacttaaaatacaaggttagtacacaattttttacaaaatttaaattaaaacaaacaactagacttaactcctagttctaactcacagttctcagcctttttctgtgatcagcagacatgaggtttcacacactctcccttttgtatcagaggctggttctgttgggaactttgaccctacctgtatcagattatgtcacgggacatacgtagtttgaaaaatcctcttaggtaattccaatgtcctccttctcttcctaccctaccccgttgagctcttgctgtcatccctggggtccccctggtggcagcagacgtcatagcctggggcctttcctggcctgtccggacctgcccgggccctggttttcctcaccctgaagtgagctgggggatgtggtggggcagggtgagcacaggtcatgtgcttcttcagctgattggtggccgtgtgtgttacagagcagtacacagtgaccgggctgatggaagcgacccagatgatggtggacatcgatggggacgtccttgtgttcctggaactggctcaggtatcatggcaggggagggaatctacaacagtctcagttctacactctgcctgcccattggctgcgaatgggaaggggtggaagatggtctatgcgggagaacctgtcatcggactgggctctttgactgcgcgtagcccatctcctcctccatgccaggaagcagctggggaactccctggtgtacccggaggggagctgaccaagtggggaagggatgaggctttaggcagcagtagggctggggagggaaccccaggctcaggcttacacatggttgctgcctgcctgaggtcatttaaggggcactgaggactttccatctgaaattaaccg

SEQ ID NO: 50272 - DNA, 2336 bp, Homo sapiens
taaccactaggacccatcccgaatgctgtccaggccacacctgagtgcacccacctagtccactctccactgggtgaacaatgatctttaatgggtggatctgatgagggatgtccccggggaaaacttgacaatggccttggtgactctggacttgggtgatcctccgtactctattcagatcctctgttctgtcctcagcctgcctgccacactccccacctctcacgtttaacacactctatgagcaggctgaggacacaacgtctgggttagtgcagcttcctagaatccacgttactcattcattcattcatggaaggcatgtaggcgcctggcgaccgcatatgcaaggagccgtggagtatcgggaacatggcacggcccttcctttccttagcacagtttccattcacaggagctgaggcacagccatcattaaccccaaagtccatgaacttgcaaagagtctggaggggctgcccaggcagaggtgacaaatgccatcggtggcagggacagtagtggacatagaggaaagagtgcacacagacagaatcccagacagacaggaatccagtgtaatgggggaggggagtaaaaacaagagaggtactgctgaattaatattgtaatatgattacaaaatgtaggagagttgaaataatatagatccattcatcaccattcactctttctgctgtgcaggacgaggctgtgccgtccgtgggcctctctgattgagggagaatgggcgtgtggccagagatgcacagctgtgttgggccacagaaatgggctcatgggggtgtccatgggcatggttaagagagagaaggaaaacaagaagaagggaggtcaggggtttggcttatttcagttcttgtcccattgaattctagggaccctgcctcctcccggacatgagccattggcggggtttccctgtcttgtgactcacccacctgtgattcaggctccttgctttacaccaagtttgagcataaaacctgctaatatttctcgtcaaaaattaacccgagtaacctcttctttcctctctgagtcacccacatccttaaaactgcccaggataatcacagttcctgcataggttgttgtgtgaactgaaagtgttaatatgtatggaaagtgcttaaaacacagaactttaaacacatgctctgattagtacgatcattaccctcaatgttgattttaagcaaaccatattatcctggccaaactaccatgacctggagccttgggactgcacagcctccctctgtcagtcaaatatggagggatgacatctctggagccagcacagccactctggaggtgggggaggtgacagtggtgggacctcatgcttcctgatagttatttaggtccctgctgtcacctgctccaccagactgtgggctccagggagtagtcagtattcacacagggctcatttgtccttccccaacccaggcacagattttcccagagtaaagggttcctcctctacctgatgaatgaatcactcctgtccccgccgccaagcacatgcagtgagactagctgtggcctcagctcactgcgtaaggacagcctccagctacagcaggggcagaggaccctgtagagctctgtagtctctgttgagaaccacaggcaggaactcccagaggccaagtgcagggcagagactgggagaagcagctgcctggaggactctggatccttgcagaagacatgtccagtgtctgctgagactgactctaggtgcctgagaagaagccacccagggaaggagagactagattgtggaccactcagggctgggagatctgcatgttccccttcccacagtggacagaacgcatgccagggtgctggcgagttaccatcagaagtcaaccactataactttagtagttaactaaatgagcccctgaataaggcaactgaacacaaggtatatagttatatgtagataaaagctagtatcagaggagcaaactgatcctcagttttctgtgaccagaataatgcccaatagactttgaaagaacacagtgatgttcggtacccaagaaagcaaaattcacaatgtcaagcaataagaaattactatgcatgaaaaaaaaagtccctatgggcaggaaaaaaaatgtaatcaacagaaacagtggccgtaataacagatataatggtgttgatagattaaataacttaaaacaggtcatctaaagcttacaaatatactcaagaatatttaaaaaacagaaaaacaaaaaacaccaccaccaaaatcataggttgcgcacggtggctcaggcctgtaa

SEQ ID NO: 50273 - DNA, 2889 bp, Homo sapiens
agctgggattgcaggtgcccaccaccacacccagctaattttgtatttttagtagagacggggtttcaccatgttggtcaggctggtctcgaatccctgacctcatgtgatctgcccgcctcggcctcccaaagtgctgggattacaggcatgagctaccagacccggctgttgtggctttctttacagaaaagtctccaaggagaacataaactctaaaaccccaaatccaagaaattcaacacaacccagttgtggctttctttacagaaaaatcttccaagtagaaagaacatgaaagtctaaagccaaaaatccaaaaaattctttatagagataaaaaaaaaaccccacaacagagcaaacaaaccaaatcactgcaaaccagtgctaagaaaaatctttaaaagcagccagagaccaaagatccaccacccaaagagaggcaagatgccctggggacctaggcccacagaaaccacagcaggagggggaggcagaggcccctgtacactctcctcactaggacagttaggtcctccctccactcagaggtgagaccaaggacatactgtggtgtggggcggaaacagtgaaaacatgaggtgtgtaacaatatcccatgaaactccaatgcttcacactgacattcttctaggtcaacaccagcattctcttgaccttcctttcactgttcctcctctcccttccagcccctctgtacagtcttgagttaggtctaggcccacacacttccccactctgagctgcggtctcttcctctgtaaaatgtgatgattcagaacctctcctggccccaagcgcagttccaggcgctgagcacaccatgctgttccctacaaagccgactctttgtcccttccccattatcacggatacttgccaagaggtggcaagaaaggctcttcccaggccaaaatgcagctgctattatcaagcaggtcaggccccaagtgccacaactcccttctcctaaatctcgttttcccaaggaaccccaaacaatggcattggcgatgagcggccccgcacgcgtaggggcgcagccgctaaggaggggaaggggcctctccagctgcgcccgcgacgactcccgcgcacggaacggaaccactgggccgcagcgaccacaggggagttcttcgccggccgcaggttcaaagcgatctgcaatgagcgcctttaggaattcattcgaaggcgcaaaagaaaaagaaattaaggcaggaactgagcgaggaaggaagggagggaaagaaaggaagaaagagaaaaagagaaagaaacagaaagtaaggaaagaaaacaaaatcaaagtccgacgacctctccgtggcttcacgcagcttactcgggaattccctccttgtcgccctcccccactggattcgggaatttacaccaagtggagcgcgcgctctgttccctggcggcccaggtcgctcctgcccaacccggggacccatctcttcccccgactccgacgactggtgcgtcttgcccggacatgcccggccgcaggcgacccgggccacgcacccccgccgtgtccccctctctccctgccctctccaggcgccaggcacgctcttccccagccagggaccgcggcggggactcaccaacagcaggaccgcggcgacaacgagcacaagggtcttggggacccggggcccaggcctggctccccgcgcctccctgggtcctgggccgtgccttttccgggcccccgaagcggccggggcgttctgtccccgttgttccatggcggtagggaacgctcttatagtctctcaggcccgtgggtttcagcccttaaagtagatcgggcatcgtcggtgtattttgtgggcgcagagattgcggggttctccggccgcgtgctgatttatgtgtccaggctgacttggggcggcgcggctgtactttcactgcctccgggcaggcgtcattcggggcggggcgaatcagatccaatgtgcaactgcaaattccaccacaggttggtgacaataaataagagtctcgtcaacgcaatcctccgcaagcgcgtccaagtggggaggggaggggaagggaccggaactaaccttcgccctggcggctgcgccccgggctgtggtttgtttctgggtcctgtccgcgccaggacaggcaccgaaacttgggggaaatgagttgagggaggcacttggggagttgacgcctcccggggtcgcgcgcttggctgtgaacagggtcttgaggttcagagtccgctttccaggcgcgtcttgatcttctccccttcccaggggcacctgccccttctgttctctccttctctcttctttccttttttctttcgttttctttcgttctttcgtcttctttccgtccttcctgctttctctttccttcctttctctctttctctttcctccctccctccccctccccctacctcccttccttgtggtttattttttgagacagtctctctgtggctcagattggtgagcggtggtgtgatcccggctcactgcaacttccgtctcccaggttcaagcgatactcccacctcagcctcccatgtagctgggactacaggcctgcaccaccacgcctggctaatttttgtatttttagtagacacaggggttcactatgttggccaaaagaccatcgaacccagcttacactcacacctagtccacaaatgtgcctgtgtccctgcacccttgctacacttagctttcatttgtcactagtctaggaaataaaacatgatacatcacattgttatgtattttcattccttcatggtactgtgtccggaattggtgggttcttggtctcactgccttcaagaatgaagcctcggaccct

SEQ ID NO: 50274 - DNA, 1814 bp, Homo sapiens
gccaccacgcccggcctactttattattttatttttactttaagttctgaaatacatgcgcagaatgtgcaagttcgttacacaagtatacttttgccagcgatgcacctgctgtttttcaatagcctttaattcataatagtcaatgggccagggtaggcagggtgcaatggctcacacctgtagtcctgccaaggcgggcagatcacttgagcccaggagttcaagaccagcctgggaaacatagcaaaacccatctctacaaacaataacaacaacaaaacccacagaaaattagcctggtgcagtggcctgcacctgtagtcccagctgtttaggaggctgatgtgggaggatcacctgagcctggaaggttgaggctgtagtgagccgtgttcacaccaccgcactccagcctgggagacagagtgagaccccgtctcaaaaaaaaaattcttttagtaatgattatgctattcagagtgtgcgctgaaatacagcacttcccataagtcaggctctattcagatcccttcatacaaattcacacatttaattctgacagcaacctgactgtgccggaactataattaagttggttctcttacgtgagacacagatcaactcagtaacttgctgaaggtcacacagctattcctggggtggggggctgggggatgggtgagccaacctcaggggagcagcacccactgcccaactggcttctgctgcctttcccaagggagaatttgctgctcacctcattctgggtcactgctgggaggcctctgagagctcatttaatgccacttcctgttttcaggagagagaaacgtgaagtttagagaggaagggaagtgacttccccggactcctgcagctctttagtggctggccctggtcttgtacagggataaaaagaaactccacaaaactcagaagtagatcccaggccacagactgagagaacaagtctgagttgatgtctggtcttctgagtgattgctcagttcagggtcaactggcagctttaagggtgtgtgtgccctgcagaggaaagaggagcctgcttggcttgagggagggtgagggccacactgggctttgcaaccacctacctattgcatcaccagtgggggatgtgcatgaccaggaaacccccagttaatgactcatctggggagaagcctggatctgcagagccttgcaggagaggacctgagcaagcctccaccctcctcccttctcattctccttctctctccaccatgcctctggcatgctgcgctctctctctctctctctctctcacacacacacactcactcacacacaccaggaaaagttcaagtctgacaaaattctatggactgacacagccacacatctctggccacacaccccttctccctcaatcagaggcccgcatcctgcacagcctcgtcccaacctcacttgtttttactcccctcccccattactttgacttactatttgtctgggattctgtctgtgtggactttcccctctatgtccactaatgtctctgccacttatggtacttgtcacctctgcctgagcagcccctccagactcttcacaagttcatggactttggggttaatgatggctgtgcctcagctcctgtgaatggaaactgtgctaaggaaaggaagggccatgctgtgttcccgatactccacggctccttgtatgtgtggtcgccagacgcctatatttcttccatgagtgaatgaatgagtaacgtggattctaggaagctgcactaatgcagatgttgcgttctcagcctg

SEQ ID NO: 50275 - DNA, 691 bp, Homo sapiens
cccagctgaccacggttctccaagttcacagctgggaattcagtcttccctgccaccctcccctgctgtctcatctggatcccccggtcatctactcccactaccaaaactcccgtatccttgaaaattcctaataccattaaggaatgaaagtacataacaatgtgatgaatcaccttttacttcctagactagcaacgaatgaaagctaagtgtaacaagggtgtagggatacaggcacatgtgtgaactaggtgtgagtgtaagctgagttcaatggtcttttggaagaaaattcgtaaacatctaaagaaacttctgaaatgatttatcccacggaagtagaagtaaaattctacttctaaggagttgcccaataagctggtgcgcatggacatgtggacacacgatacatacaagggtatttagtacaatgctgttggaattagcaaaggcaaatttgctttgggttatatcccatcgggatgggatataaccagctgcctctagatggcaacagtgaattaacctgtggcttacccatgtagtaaaatacaatacccttgtttaaaagaaaatcaatctgaatgtactgccataaaacatctaatgtgatttgtgctagctccaaaattttaaaaagcaactgtgcattgaaatgcatttaataaggcaagattgatggagggat

SEQ ID NO: 50276 - DNA, 1861 bp, Homo sapiens
ttgtgtaatttttgagaggtgaaaatgtcactgctgttctgaatttagtattacttcgttgaaagaaaacatggagactctcatggttcatgtaatcttgttttatcctccccgttttgttttttggtattacgtaagaaaccttagaaagcactgttggcagaaacgtcagtcactcagaaaaagtcctggcagtctgcacatcttatttttatgtccttcttgtgcaccccactaccaatctcagtttccaaacccaactcacaacgagaactttacatcttttatgcctaaggaaggggccatcccgcggtcctgcctatgggatacagaggggacacacgggtggcagtggaagacactgactgcaagcaccttggttaaccgcttcctgccactttcagggttctataggaaatgaaagttacaaaaaacagcgttggaaagctttttcacaggctgtttgttaaactgatctccaagaaacacgtgtaacagtgtaaacatagggttaattttgtttgtttgtttgtctgtttttgttaaggcagagtctcgctctgtcgcccaggctggagtgcagtggtgcaatctcggctcactgcaacctctgcctcccgggttcaagcagttctcctgcctcagcctcctgagtagctgggactacaggcgcaggctgccacgcctggctaactttttttttttttttttttttttttttgagacggagtctcgctcttgttgaccaggctggagtgcgatggcgcgatctcggctcactgcaacctccgcctcccggattcaagtgattctccttctgcctcagcctcccgagtagctgggattacaggcgaccgccatcacgtccggctaatttttgtatttttagtagagacggggtttcaccatggtggctaggctggtctccaactcctgacctcaggtgatccgcccgcctcggcctcccaacgtgctgggattacaggcgtgagccaccgcgaccggcctgggttaacgttatgaacgaacgaacgaacgaacgaacgaaagaggcaaccgctctgtggcttcctgaggttcactccggggtttccatcttgactccctccctccgctgattctggaacttcctctggggcagctcagtgcggtcctcgccgcacgggacagccagggggagcgcgcgctctgctccctcgcggcccggtcgctcctgcccagcccgggcaccccactcttcccctgactccgacggcgggttcgtcctgcccagacatgcccggccgcaggcgacccgggccaagcatccccaccgtgtccccctctctccctgcccactcccggcgccaggtgcgctcttccccagccagggaccgcggcggagactcaccggcagcagaaccgcgacgatgaagacgacgaacttaaggatcttggggtccaggagccatggtctggttcccgacgctgtcctggctcctggatagcgccctgctcgagcgctcgaggcggtcgggacgctttgtccccaaagtcccatgagaagggaggagggtggatcgaaagcgccaaaaatcaatcagaaatcgtccccgtagtttgtgcgcgtgcaaaggttctcgcagctacactgccagaatagaacgtgctcctccgcttttataccccggaaaaaaggcgtggtcagttgtactcccttcccgcagtcacttccaggcactcaggctgggtctcccccagcacctccaggagggcccaggttgtgtgggtgggtgcatggacggacaggaactggctctttccggcagcggtgacccagggcctgcggtttgattccgggtcctgtccaggctgtaggcag

SEQ ID NO: 50277 - DNA, 1877 bp, Homo sapiens
agacagttgggtctgtttcagtccctcctttctacttattaattcctcaatcccggggaacctggccctggatctttctggctgcttcaagctgaggaggccaccatgggtgacctcgtggccactcaggaatcacaggttaatctaatcctacagttttcttctgaaatacaatctttctctctccatcccccacttccaccaaagatgaatcatagcaacatcatctcttattaatattacacaaacgttttcttcaaaagaaacaacaaagtttttacccttgtatggtgtgttattaatgttaaaactcactttaataaacccatagcaactaatctatttaattttaattagtttgaccataatgtaagattttcataaaccttctataatgttttacaattttctattaaagagcaaatcagtgatccaaggaaaccctgttattctgatacaggggcccagactctggccttgcatcagtgtgcttttgatcttaatgcttaatttgtagaaaaactccagacttattttatccctcagaatcagtccttacaatctcacatgcccatctcttccaaaatagtccctgggcctaaagggattgaatagttttaatttcttgccctgtgtctcatgaaggcacttcattttgattgtcaccttctcctgggtctgaagacgaagctttgactggtgccaatgttcaagattaagcaagagttggccggacccgggggctcacgcctgtaatcccagcactttgggaggacgaggcgggcggatcacgaggtcaggagatcgagaccatcctgactaacacagtgaaaccccgtctctactaaaaatacaaaaacaaaaaattagccgggcatggtggcaggcgcctgcagtcccagctactcaggaggctgagggaggagaatggtgtgaacatgggaggcagagcttgcagtgagccgagatgacgccactgtactccagcctgggtgacaaatggagactctgtctcaaaaaaaaaaaaaaaaaaaagattaagcaagagttggtgcctttttcagacccaggagtcaaagtcctttaacttgacagcacaggattggttaacaggattttacactgcaggaagtcctagcattctctctaacatgtcacagattaaccatgtccagtagttactgcctgcggcacttcaaaccattatattaaagtggttaggttacttatagcatatgtctaatgccaacaatctagtgacagaactgtgcccgaaagcatcaaaaatgtgataggttttatgccaaacttatcaaagtaagacaactaactttcctctccattatttaaaaaaaagctaaatacaaccaggcacggtggctcacgcctgtaatcccactttgggattatactttgggaggccaaggcaggtggatcacctgaggtcacagctttgagatcagcctggccaacatggtgaaaccctgtctctactaaaaatacaaaaattagctgggtgtggtggtgtgtgcctgtaatcccaggtatttggtaggctgaggcaggagaacctcttgaacccaggaggcagaggttgcagtgagctgagactctcccactgcactcaagcctgggtgagagagcaagactccgtctcaaaaaacaaacaaaaaaataaggtaaatgcggatatctgttttcgaaattcagaataaggataatctccttctcttaaatattgtacaagaaaacagggacagagttaagaacaagcacagaataatttcaactatttcaaaaaagcgtcatcacacctttccaagattgttaatctagacaactgcttaggtaagtttcaccactagaaacttcaaact

SEQ ID NO: 50278 - DNA, 932 bp, Homo sapiens
tgaaaggctgaggacgtcacatctgcattggtgcgggcttcctagaacccatgttactcattcatccaaggagggcatgtcggcgcctggtagaaacgctgtgcaaggaatcgtggggtatcaagaaaaaggcacgaccctccctttccttaggacagttccagttcccagggagatgaggcacagccatcaataacccgagtcacgaggggctgcccaggcagaggtgacaaatgccactggtggcagggacaccggtagacatagagggaaaggtccacatagagggaaaagtccacacaggcaggttcctaggcagatacgaagtcaaggcagtcggggagggcagtcaaaacaagtgatgctgggacacaactctgaggtttgtgggcgtctgattaagggagatggaaggtgaggtcagagaagtgaggttctcagttcacagatttgggctcatgggggtgtgaggttgtgtgtgtgtttgtgtgtgtgagagagagagagggagagagagaaagagagcaagagagagaggtcttgttccaggtcttctcctccatagactctcctgaccctgccctgcctcttcctgagatgagtcattcaccagggggtttccttgccttgttcctctcggattagcattgtgttaggctgtttcagaggtaagtttgatattcacactgatttcctctctcaggcatacacaccctaaaaaaatgccttattgatcttaaaatgagcaactcagaattgttctgaggttggctgtggtcgaaaatctgcttcctttgagtctttcgtggcttttttatttctttgttcttttggtataaaaagacccctgggttaagaagcaagccatctgtcttgtagtctcgggccagcctcatggtctgggggaagccacttcttctctaaacatgtct

SEQ ID NO: 50279 - DNA, 1583 bp, Homo sapiens
acaaaaaattagccgggcgtggtggcaggagcctgtactcccagctactcgggaggctgaggcaggagaatcgcttgaaccaggaaggcggagcttgcagtgagccgagatcgcgccactacactccagcctgggcgacagagagagactccgtttcaaaaaaaaaaaaaaaaaaaaaaagaagagaagaaaagaaggacgggggtggggagggaatcagggagtggggagaatggcgctccccttcacgcagctggtgtggctgggagttggcttggaagtttacacacttgagctctatcgattccgaaacttcccgatacatcgtgaggtgtgggcaggagggagacgcgccaggcagcagccaacggggtggagtccccgggcccagcctcctgcgggagggggctctgctgcctccaggcccgggtcgctcctgcctggccccggggaccccgttcttcctccgactccgacgacgggctcctcctgcccggacatgccccgccacaagtgacccgggccaggcacccccgccgcgtccccctctctctctgccccctcccggtgccaggcgcgcttttccccaggcaggaccgcggtggggactcacctgcagcaggaccccgacgacgacaaacttgaaggtcttgtggacccggagccgagggctggcttcccgcgccggcctgggtcctggggcgcgccctgcccgggcccgggcactgggtccgtgctgtcccatggaggtagggagcgctcctcggcccccgcctcgtggttcaatcctccccgcggaagagccccacactttgctgggtgtggccgcggctgcctctgtcccactcgctgcgctcccgggattcggagtcactgccaggaacgcacctagatgtactctagctggtggtggcgccatcctgccaggtcaatccaagaagcagcgtgcttggctatgacaagacagaacttcgcattcggagttcagggcacccctgaccccgcccccttttcggggcacctgcggctcctgttggctaaccctgaacttccttcctctgtgaccgcccttgccgctctcagcttctgttcctcaaccacggccgccgcgtggatgccgctgcattcggagtcgttttgccacttggtcccagcgccaggcttctcggtcgggagttgacctcagcctttctgtgacccagttcctggcacccagcaggcgctcggtggacggatgggtggcggaatgaaggacacagaggccactgcggggtctggcctctaagaggcttttacggcctcctccgtcactaccgggcgagtgattcagcctgccttttttttttttttttttttttgagatggagtcaagctctgtcgcccaggctggagtgcagtggcacgatctcggctcactgcaacctccgcctcccaggttcaagcgattttcctgcctcagcctcctgagtaactgggattacaggtgcccgccaccacgtccggctaattttttttctatttttagtagagacgggggtttcactgttttggccaggctggtctcgagctcctgatctcgtgat

SEQ ID NO: 50280 - DNA, 1323 bp, Homo sapiens
catttcgtctaggttatcaaatttgtggacatacagttattcatagtattcctttattatcattttcatgcccatgggatctgcagtaatgtcccttatttcatttctgatattgagtatttgttttttctctttgttagccaggctagaggttaatcaatttcattgaccttttcaaaaaatcagctttaggttttgttgataatcttttgagtttgttttcaatttcattgatttctgctctttttattattttttctcttctgtttaatttgatcttaatttgttcttcttttatagattcccaaggtggaatcttaggttattttagatctttcttcttttctggtttgtgcattcattgatataaatttccctctatacagagattcacggatccatccgggtggtccgggcaccactggcgcccctctgcggctattccccagttccattttctgaagccacaggtcagaagccgctgtacaacgctttgccgaactccagaatcttgaaggagacgtaaggtgcagccacctgccgcgcaggcgcaagcctttctttcggcacaaagaccgtgggaggaggggtcggcgcaagcgctcggtgtctctctgaaaagaacttcatcatactgcctcctggctgacggagcgcagcgcaacgcatgcgccttgaagacttatggaacttatttcacgctcagggcggcggtgacgtgtgaacgagaaggaggtggtcaaggaacggaagccgggagggaacgagggcggaagcggaccagggccaggcttgtgttcgcagccttgccggggctggggttccgatgtggtccccggagcgggaggccgaggccccagccgggggagacccggcgggccttctgccccccgagtgggaggaggacgaggagcgcatgtccttcctgttctccgctttcaagaggagtcgcgaggtgaacagcaccgactgggacagcaagatgggcttctgggcgccgttggtgctgagccacagccgccgccagggggtggtgcgcctgcgtctgcgggacttgcaggaggcctttcagcgcaaggggagcgtcccgctggggctggccacggtgctgcaggacctgctgcggtgaggggcgggctggggccagggccgcgagggcgggcgggggcagctctcggagggccgggccctggtcctgttctctgcacagcgcactgcgcccagcccagtgtctggcccagagaaggcatccagtgtgtgttcagaaggcgaagaaggaaaataaggaggctgggctagggaggcttggagggagaggaagag

SEQ ID NO: 50281 - DNA, 1298 bp, Homo sapiens
gcaaaagtaattgcggttttttacttattagcaaaaccacaattactttgcaccaacctaatagtagctgaacaaaagtgtttgttgaacttaattgatcttacaagactgtgccaacatggaagaaaaaaagaaaagagcccatcttggaatcagacctatctttgctcaaagtaagactctagaatgtaccatctgtgcaacttgaggcaagttatttcacctgtctgggtctcggttttgccatgaatatgaaagctagtcgtgtcactctaggagaagcggtttgtgttggtggcaggtgcgccccctcccaataggtgacaagaacacgcactctcccgttcctgcgttacctcccccaggccgcgcggtggcgctgcgtctctgcagcggcccgggtctctctagggcgctcgggcgcgctggcccctggggacgccgagggcggctgcgacgcgccgagaggccgcggtgagtgcagcagcactgggggggtggtcgtcccgacccccgggctcccgggtgggaaggagcagctgggctgcgcggagcaggcccccgtgagccccgggaaggagcgcagcgcagggtgtggagccaccctcagcatccgaccgcaggcggggacgagagccttgggcaggagccaggagaccccttccctgacccctgacttgccgggggtccctggcatcacttccccgccaccgagccttggaccagagggtttctaaggccctttcggtgccggcgttgcggggtcgcgggagatccgggggtctgtgctctgattcccggccctgcccgtctctcttacaggctctcccacctgtcaccctggcccttctctgcttggatggtgtcttcctctcctcagccgagaatgacttcgtccaccggatccaggaggaactggaccgctttctgctgcagaagcagctgtcaaagtaggctcatgtgaggggcgagggtgccgccttgctgggaagggcagggttcccgagccgcctgtgtgccctcccccaggtggtgcctggcagctggctctgaccttggcctttagtctttataacgccagctgcctcttttagctgcatctttgtaattgtgagcatcacccccagactgatggggcccggcacagggattggggatgggacctgtgggtccctgcgatcacctctatctatgctcagatcctttgcagtccatctgggacccagaggggcagaagggagcccagtgttaatccgcgattaacctgggagtggacctggtaggggccaggccctgga

SEQ ID NO: 50282 - DNA, 566 bp, Homo sapiens
ctggatgctggtcaaaaggcaggttagggtacaaaccttggtggggtcacttatatgaagaaggtgtgattttttttcctcctctagaggggaatttacaaactatcaggagcccccaaggatgctccaagcagctgtaggagtccagggaagcacagttagctcattaagtgaaattccatcagccaggctccagggcttagtgactcatgcctctggcattccagagtaggatgaatttggtctagactgatgcagttttcttccattctctgctttgggaattccagtgcactctggaggaagcatgggttgtgagagtcatctgtaatgatctgtgacctgtccccaatctccaggggttaatgagggtgaatgttacagaacccagcccacaaccttgcagacagagtaggcatgggaagggacgcgggtgccctcatcacattcattagcccagtggtctacgaccagggtcacaagacacagagaaatcattcactgacgtttcattcctggccgcttttgaatctgccccttccaaactggggaaagtcgagggaggg

SEQ ID NO: 50283 - DNA, 967 bp, Homo sapiens
aatgctgtgcatcatcactttactgcccaataagctccatttttccaagaagaaatctaacatgaaatctggcaaaagcaaagcaaagcgaaaacgacaagacgagcgaatgtcatcatttaaagcggcaggcagggccggctgggtcccgggtgcagcatccctgctgcccggtcaagctccgcccattcgagggggggatcccgagcggtcacccgaggcgcgcgaccgccaggtgtcccctgccaggggctgggggagcgcgccggccgccagggctcacaggggttggtcccggggcgctcggatgtggccgcgcggcaggggaggcgggaaccggtccgcggggctaagcaggcggctgtgggggcctggggcagagaggctcgtccgcggcccgctcgccgcgccgccggcccccgcactccaacccactcgccggccccttcggccgcccgccctcccctcacccacgctcggaaggcaacctcacctgcttggccggccggggaccccgggagcgggggaccaccagtgggcagcatcacggccagccggcttcctggaggccgcgctcctttcctggagccgcacccccgcccggcccccgccggcaacacgtcaccgcctgcgcccggagcgcgcccgctggcggcgggagcgcgcacgccgaggggcgcgttgagcgctggggggcggagcctgatgcgggatgattggcgtccgagcgctgggctgttccgtggacccgcgcggccacgccagtgtgctgtgcacgggaaatgtggacgtgggagcacggaggcacccagtactgtggcgtggtgctcgtctggtcgtcagcgagcctcagcgtacttaggacaccgcagtttatctttccttagcgctcctaacggttatggaaaatagcgcttgaaaacctggtaaggactaggcattgttgctcaactcttgacatttacac

SEQ ID NO: 50284 - DNA, 740 bp, Homo sapiens
tgttctattaaccagcatactccaaggatttgactcactgacaataaatatttaactccagttaagcatagctactttctggaaatgtgtcttcttagatagctgagggtttatccttttaaattctttaaaatttttacgttgtaataatttctagaatattttacctactttcctgcctctgaacacagagcatctagttctagccttctcagccttgccatttctgaaggctgtcatgtatttatactgtcagtatctgccttcaagcaccatttttttcttccaattcaccgtgggtttagaaattaactttttgggtttgtttatacaataatcagcatgacagctcataccagaggattccctaagatcaaagaacacacagactttacgaaatctattttggctgtttcccagccctttttgtttgtttgttttactgctttctgattttcagtggtgttctgaagtgctggcttcaagtttgggaggcagtagagggtagagaggaaagaacagcttcattccttgctaaactgtgatctctctaaggtcaaaagttgtgccatgaccccaaggctcttgttaaagaaattagatgccaatagatgaaatgtgagaatagcgctatattgaaacagaaactggagtcatacagtatcttctataagattttgtgattttatacaagaattccccaagacagatcaggtgattattaataacccctgaaagtc

SEQ ID NO: 50285 - DNA, 1905 bp, Homo sapiens
gcattatgtatttaggttgagagaaacaatttcgaatgaatgggggtctctccaacaaagcagtctagaacgggcccctgaggtttgaattcaggccttaggaatgccaaagctcactgagcgattctgtttgcaaacccacccgccacggggacggattttccccgagacactgtcacccatgcctccagctctgggcataccccactgcggcccctccccaatgacctcccctgcccctcgcggaccagcccatcctcaagatagtacaactttccgggccaccccacgtctcctctcgcccccgtccggttgcttggaaatgtgcacgggacggtgacgtcacacagggaggcgggtccccactgtcccgcacaccaatggcgcggcggccgccggcctcttggttcccggcgattggtgtctctggccgctgcgctccaccccagcccgccatggcgtcaggcgccgcggccccggggaggtggctcccactttaagaagtgaagttttgcgcccctccccctccctgcccacctcctgcagcctcctgcgccccgccgagctggcggatggagctgcgcagcgggagcgtgggcagccaggcggtggcgcggaggatggatggggacagccgagatggcggcggcggcaaggacgccaccgggtcggaggactacgagaacctgccgactagcgcctccgtgtccacccacatgacagcaggagcgatggccgggatcctggagcactcggtcatgtacccggtggactcggtgaaggtgaggcgcggggagacttcggggacgcaacgagcggagaaggagcgcgcgcgcgcatttgcatcccgcgcgccggcagcctcggggcagcgtcccgaaaccgagctctccccaggaccgcggctggccggggtcgccccaggagcagctgcgcgcagcctgggcgccgcgccttccgccgaccccgcgagggtgcccggtcctcgccccgcaccgcccgctgctccagccgcgtgcccggccccggctgctggcggcgctgaggcgggggaggcggagtggcgagcaccgctggcttcggcggcgactgggctcccgggggacgcgatcgctgaagctctgcacagtcttaccacgctggccgttcgggctggctggggccgcccacacgtgcgcggtttccgagggagctccccgcaggggaagccctcaccacgctggagctgagaaacgtgtggccctggcccggccgcgcgccctcgggacttggtgtgtggctgctgctccccgggttatttcgggaacttggggccggcaagtcttctctcgactagtggcagctctttaccggttcgacagcggcccgtgggatcccctttctgagggttcctgcacttcttcccccgactttgggtcgccgagccgccgggaggcaatgacgtttgccttctccttttgcttgcggggaggtgggtgggcttgtgccttacagcccttgctgtggattgtgtgagaggcactcagtttcctttaaaccctgtctgtcacttgccccggtagttttaactgcatttctgtaaagaggcagcgttactaggtgcgttttgcctggtagactgagacctgccctctgtcagcctgcccagaacaccccagggccaggatagagtagtgcaggaagtaatgccagtattgactgttacacgttgcacttttataggcataactcgcctaattcatgcaacagccctgggggttaacagatgaagaaactgaggcgcagagaggcgaaccgattaccttgcccaggctcctacaccacctcctatcctctggctgcagctgcagtgtgctttggaggattcggaggcctctctaggtggcaattattttgcaaggcagg

SEQ ID NO: 50286 - DNA, 1214 bp, Homo sapiens
aggcggaggttgcagtgagccgagatcgcgccattgcactccagcccggacaacagagcgagacttcatctcaaaaaaaaaaaaaaaaaaaaaaaaaaccagaaaaaaaaacttgccattaaacaaattccagttttgatttttgttttgcattggttttgaatccatgcatgttatggccacaaagaagactttcttggctccgttgtttgtcgtgtgtgtgtgtgtgtgtgtgtgtttgtgtgtgtgtgtagaacccagcaagcagcagctataccccgatgaggcaatgtcttcatttggccactcatgtcattccacgtttcctgagtgccctcttggctaggcactgtgctagacactgggctacaaaaataagaatgcctggtccccgttctcaaagtaagcgtgcttcctataattagaccctgagctaaggcgacagaaccagctccctttcaagacaagagtcgcctgtcttgacggactttcagatgggctggaagaacaaggtctggcgtgtatggactctgaactgctcaagctgctgccgtcttgcaggtctagagcctacagggtagcgtcattctagtttctttgctgggcactctggaatttgttctttctcctgcgagagacagtggtcctcagttgtgttccctccccaccatcctcaccctccctcccacggtggttagtcattctggaggctcaagttggctcacagaaggtgctcttgaaaacatcccccaccctcctcgtaaccccagacagtcaggaagggccgttgtcgggtactaagaggtgttatggtttcacattcatgctttctctctgaagagaaaacaaaacatgttgaaatagggagaaatcccagcagcagcttgcttgaagcaagggttgcataacaggtctaggaaacgtctggccgtgtgggtcaagttgagggactgcagccttgtgtcactgagggaacttcttccgggtccaccgagcctctggatccattagatccatccagagagccacttggaaggctctgggaccttgagttctggctggccacgtggtctgtgatggctgtcactggtgaaagagagaccctggctgatatttagccaacagtgtttattccctggcatgaccagaaagggtgcatttgagacactgctgtgggtgggggacccggaggagtgtttgtgtgtcagacttat

SEQ ID NO: 50287 - DNA, 598 bp, Homo sapiens
ggctcacaagcacttttgctttgcagcggaagctaggaagaccctgctgtggaattttgcagaggggctgagcagtggtgggaaggaccagcggcccatgtaccatgttgggcccctgcattccaaggtgtctgcctagaaataaatgatagtttatttaacatacttgtaacttccaacgacaacacttcaagactgcaaatcatccatccgggcaattacagaaatgctgaacggccacagccccgccctggaatcaagggaagaagtgtggcagatgcttctggaaggctctgtttacagctctctgactccttcctgccagaacctttcacaagttcactaccaggaagctgagtcatccaggggtcagccggcatggccaaggtcaccccgcactgccagcagcacagatggggttagcccatcattccagaggagcatccgtgggaatgatggggttggggagctggggagcctccctgcagcatctccctgccatggtgttttgcatttcctgtagatttcgcagtgagaaacggtctcctcttatattcacttcatttcttctctctttctttctttcttttttttgaga

SEQ ID NO: 50288 - DNA, 1496 bp, Homo sapiens
tcacgtttctctgacctttcatgggagtcacatgcagacgcatcacttggtataattatacgtggaggaatgagcaagaggaggctggcgacgggactgctttaaaaatcccttcttctgtggataataggctaatagcggggtgtgctttagaaggtgtggcctccgccaagggcgtgggaactgcatttgtagaagctgggaggaccacacctggcttgggagacggcatgggtttctgaggtgcctggctccctggcctgtccagtgtggacagcttacgcgcagctaggtgaaatgattgtgcagttgctgagggattgggtggcagagctggacagaatttaggtcttctaacttggaacagggctgtgtccatcttacctaggtgtacagtttggggagcactgctgtttggtctagtgagacacacttggtgtaaatatctgtgccctgtagtacccagattccaagggaccagagagcatgcccgcacccacgggctggcgggagcccaggtcctccagggctgctgtggagcatgggcttcttggtgcccagtcctatagctgaacttgggcggcctctggctgttgcccccagggctggtctccctatagttcagaggcgagccagctctcagcagcagggagggccttttccatagtatgaacttggccacaccagaccagtcagcagtgtcgggaatcttggccctcaaggtccctgcctagccctggcctggacttcagcactggtcaaaggtccccagagctgcccttggctctgagcaggtgagtgaacttcccagagcacttttgtctgggcctctgtgccagtgtaaactgataatagtgatttccctgccccacctctctgccagctatctaagttttctttgttacataatcaggattaatttaagcagcctaggccatccatttagaaatggttagtgaagaaaggtgaatggggaggggtcagagtcccttagggggccaccaggtgcgagtccccttgctctttggggccttggtttcccttctgtgagttggggcagctgaagggaagggctgctcaggtggtcctgccacatcccagtgttgtgtctagtgagtacaggtgagagtgctcccaaccagggcagatcctgctgctaggcagtgagtcaggaaggaattggtaaaaatgacgtcattgctaagaatgacgtcttttttgctgtttatccaaaggaaaaaaaaaaaagcagaaataaaagcagcaggcagctgtccaccagaccccatgcaaagggcttttccttgaatcctcacagagactttaggcagtaggtgccattaggagccccacttacagataagaaaacgggggcagagaactgaagtgagtcgcccaaggacacacattgaggaggaagcaacagagctaggatttagatacagaggggtctccaagcctgtccttccagctttgaggtcctgggcctatatatt

SEQ ID NO: 50289 - DNA, 1603 bp, Homo sapiens
aaaaaaaaccaacaattttgaggatgaggcatttcttccttacttatgagtgggatgtttatgggccggtgacattgacaaggctggcagagtcaaggggaggccctgggtagtctagcttactagcagtgaattcagttctctcttgaaagcaccgtgactgttggaatatttcagccttagcctttgaatactgacggagtgccaggctttcgtctgtcaagatgcccctctgtgacctcagctggttaatgtctcaagcgcttctttaggagacagaatgggttggtattgaaccaaccactattgcccagtcttgtgatgaccagggttgtggaacagataagttgtgtgacctccacgggtcagggctgttgactttgcctgtaagttacactcttgcagctgggcatagacacagtcctcaggggttttgtggacattaacaagtaaggatttaggtgactctgacatagggtcttccccaaggtcaggcacagaggaggtggcatccatgggacttagcatgttgtagaaacagagcatattgggacaaaagggaagttgaagatcacctgggatcctttagcgtccatccctttgtgagagataggatagcctagttgttaacagcatgactctggccgaccgcctggcttctttctagtcttccttctgtactttgtgaccttgaggcaagtcatttggtctctgtgcctcagtttcccaatttgtggaatggggataactggttgctaatattgctgtttttattgttataattattttgtaaatagaagggttgaaggttcagggaagcaagttgattgacctgaggccatacaatgtatcagtgccagatgcaggatgagaaagaactgtgactcaggccctgtccctcttaccagggcagggcaggacagggaagctgggcaggagagactggcagctcagttccctctccagtccagggtagtcccttccctttctgtctcgcagtgaggtcaccagttgcactcatgaaatcttagtcctgttatctggcatctttggaatttgccccacctgtagggcagagataacttaatcctttttggtgggccacatatgggatattctgggtgtgttctgggtacactgggcatgggccaggcacagacccttccatccattggaggcttttctagagaaggggtggagaccagattgggttcctagggtcgggggatgtgggaatggcaccctctgaactacaggcaaggctgggagctgctgccagtgggcggagagggaaatctaactggtatgtgatgttagtggtggcctggcaagcagctgtagctttggagagagcgaccagcctgtccaggggcctggtagggaaggcttctgttgcacggcctgttgctttctctcagatactggagagcccatctgtcttgcttactgcatggcttttcatagctcccatcatattgctgttgggtgcgattcatagccatggaagacacctgatcataaagtaaattccacacactccagcaaggtattcagggccttgcatggtctagccccaccctacctttcttccagcaaacaataa

SEQ ID NO: 50290 - DNA, 2181 bp, Homo sapiens
aaataaaaaataaaaaagagactaaattgattattgtctctctggctgtggccacttctgcctgccttcctagccgcctgccttctgcctctcttgcctctcctgaggctgctgcagggttgatccctccttgcctcttccttacactccttcgaggcaccctggtggttcgtttcctcctcctgttatcatacactttccttgtttttccccattgttttttctcctctgtatcctggtgccaacctcagtgggtgctccctgcaggcaggtggaagaaatgatggtgctgcaggatgaatgaggctctggccccaaacttggctgctgtgactgcagtggtcccagcgggggcctgaccaggcccatctctgcgcttctgggccacttgcctctgtctggggcttgtgtcattaactaagacctgcccttgagtaaaccaccctgaggacagagaagtccactgaggtgcggtgactgaggcagaactcaatcttttagaggtttattctatcagggttgaggatgcaccggggaaaagaaacacaagttatagtaggatctgtgttctgtgctttttccaaagagggctctggtaacgtcagtatttaaaggggaaagagcaagcaggagggagagaagaaaaataaaagaaggaagggtaggcattaggcaagtggtaccattcttgtgaggctctgattagcacttagtgaatctgcattttacatgtgaaaagaagggagttggggaaagtgaatcatggtcttgcactcagtaaatctacgttttacataagataaagtaagcttatgaaattagagctgtctgtttgggaacaaaaagaaggtcagtttttgcatgactcacttcccaagcttaactttctttttctttgacatagtgagtttagggccctgaggttttatttttctttcacagcacaaagatacccagttgacctttttttttcataacagaatgatgcattttggttcagtagtgtttcctccaactgctctacccctaatttaaaaaggggagggggtgagaaatcagtcccaaatgtccctgtaagttttggtgtgatgccagcctccaactggctgacatgagcagttttgtaaaggagagaccctcttgatggcttcacgtatatcatggggtgggatggggacagtcattattgacagccagcctgtgccaagtgtttcccagcagctctctgggcgattattccagccaaggatggccatgccctaaggttaaggaacctgcttgaggtcccagagctggaattgagattgacaacctcaggctgggtggctgtacagcctgggcactctctgtgccccctgccctcactcagccactccctccataggtcaccaggggtaattccctactgcccaggcagagggctggggctggaaggggtctagatggtcacttagtggttccccaagctgagtcctgatcaaaatcatctggggaattttaaaaagaaaaagaagacttgaatcagtgtgtgctagggtggtgtctatggatgggtattttcaaacatttcccgggtaactctgatcttcagcccctgctctgatcctccctttcattttccagtccaggacactggggaccggagagatgagatgccgtgaccaaggtcactgggttgtagccagagccagcatcaggtccaaagtgcgatctcagtagccagttctccatgctctgtgtttgttcagactgccagccctgctcaatggggctctggaacttaaggaaggcctttgaccataggctgggcttgcaaaaccttggtaggaccctgcccttggctggaaacctcagggctccagccagggctcatccccaagaagatacactgccattctccaaagtgtgggggcctctcccctgaagggcgctgcctggagccacctcttgttcacaggcccatgttaggccccctgggacaggttgccttggctccatatgtggttctgcagatcacacccaggcttgagaaatgcggtgacacgtgaactttgcattgatgtgaaaaggtccaaattaaaggtgatggcaagcacagctaagtccaagaaagtgtggctcctatttaggggtggtgggctaagagacaagacacagtaccctttcaccccggtgggtatt

SEQ ID NO: 50291 - DNA, 948 bp, Homo sapiens
cctagcgacctactcctccccatatcactcagcaatacttttggctaataaccctgtataattgcataatatttctagattgcaaagcacttacctagacattgacttgctgtctcatctctgtaattgcataatatttctagattgcaaagcacttacctagacattgacttgctgtctcatctctgtaataatcctgtgaggtaagcaggacaactattgtttccatttcatgaataaagagactgagatgtttggtgacttgcccaagatcacataactggctagcatcagagggatctggaaaccaggacccatttactattagaccacactgctaagggagacagcaagaagcataagattcagtctttgcttggaggatcccagagtgctgtttgagagagatcagatcagcaggaatgaaaaggagacattgggttccaagtgccaagtgaattctacagacggcatgcgatctaggtataaagaggagagattgctcatgataggcaaggctaagaaggaacacagaaagtagttaaaaaaaaagcaaaataaacagcacttacatgggagtaccttttacagcttgaataagggccattttgggcaataagatacagatgtaaaaagaatgagtatctcctaaatgatacaaacaaatctaagaatggcagaacattaaataatcattgaagttggccaatatttatctaactttaaatgccaggaaagatagccatgactttctgctgtgcctgcaggagtcatgactaagctgaagatggtgcaattcagagccatgagacctgggttcaaaagcccactttctagagaagggacattgggcaagttgctgagaacctttgtggttattttccctgtttggaacatgaggatactaattttcaagctcaaaaagtggttgtgaatatggaatgacta

SEQ ID NO: 50292 - DNA, 1657 bp, Homo sapiens
ataagaccccaagtgcctttctggaaaggagagtggggaaggagggatgggaagacaaaagttacatgttagcagggaagagaacagaattcaatccacccttatctctttagtgagtgaacaaacagcccactgtcatcgtggatacatttcacttttttcacatgactaaggagctctccggagtgaagagtgagtaaatatgtttattacgcattcatttgctaagaatcatcaagaacccaaagttagagacgtttcgtggttgaactttctccctactgtctagtagaattatatggggattctggatctgtgtgctgaggagaggcgggagagggaggcagggaaaatgccgtggaacaagatacccgggaaggccagaccaaaagacatccggtgttaggatccaggtgggcaagagagggcttgtgccactggagacgcagaggcaggctcattctgggctttaattccctcttcgctaaacgaggcgttcggtcgcctcatcagaagtgacaggaaagaaaataagtggactctctctcctggacaccggagggaaccccgaatataccgctttactgcccacgggattgggaagcacacggaggctttgctggtcaacccctgctttgtcactgttaataagttattattagttctcataactaccggggggctggcgccgatcgcgggtggcgcggggcgggatccgctcctgggacggtggagggcggtggcgctgcagtcgcgccggcttctgagccccagggagcggagggcacggagccgggcgagtcctgcggtgtcagaatcctgcgccgccctgacgctggggctcagggttcattccgggggcgcgcgcgtggctgcggaggcgggaaggtccctctgcctgtcgccgcggagccccgcgtccctgcaccccgagctctgggggtccgccttgggctgccccccttccccggcctcgccgcttacctggctcggtctctgccagcgtctcggcctcctccggcgcggcgcggggcccggtgctcagctggtcgttctgcgccccggcgcggctgcgtcctccctctggctctggctctggctccggctccgggtcgcgctgtctctggctgctcgtgcggccgccttgccgctgcgcgccgtcccgcaggatgtcctggatgaggaaggacgtgagcggcttggacggggtcggcggcgcggccccctccgctttcgcctccccgggccgcggctccggaaccctgagcatcccggcggccccgccttggcctgaatgcacccgcccggcccgcaccgctttcactttccgcctcccggctcgcttatagcccaggggagcgggccgcgccgccctcccattggccgcgggacgggccgcgccgcggattggccgccctgagccccaggtgaccccgccgatctgcgagccctgagcactgccccgctccgctcctccctaggggattccttccccagttccctctccttccccaattccctctccttccccaatttcctctccttctccagctctcctccctccgccctgagccgttttcccaggccaggagcgcaccccaaagcggggctcctctgccccaacccacccgcaacagagagaagctcctggggatgg

SEQ ID NO: 50293 - DNA, 2303 bp, Homo sapiens
catgtaagacgtctctttgctcttcctttgtcttctgccttgtttgtgaggcctccccagccatgtggaattgtgagtccattaaacctctttcctttataaattagccagtctcaggtgtgtctttattagcgtgagaacaaactaatacagagttcattgctatggtggagggaaagtttgggggaccctggcaaagagagagctggggctgtgtttttgcttggcagagggggcatgctcacctggccgaggttccaactttgggaaaggaagatctttttgccctcagtttttgcctgattctgtagtcacaatagacctagttctgtctgtgctctgacctccctccagaattgctggatgttctggtgacatttgggatgctctgctgcacattcttgggtctctctgtcctcactctgagccagaatgctggctgctcactgtgccacctccaaccccttttacccattccccccagtggtgaaatgggggtggcgggggccactcctgtgctccaggagcaggtgaggagttcacaagcttaggattctggtttcttccactgactgttcagaggattcccacctccagcacattggcttctgcaggactgagggcacctgcctgctcatctggctcctgtccttggtcagggtgactcaaaatgagctctgctaggttctctcttctccaccagagccagaggctgacagagaggaaggctgtcggaggtgctgcccctatgacagtggaggaatgggggctggggatgtggggatatgagcaaagacacgcaggagattcactgtcctatccctttgattgttttcttcccctcttttccactcccatacgaccacactcatcaaaataggaaacgatgtcatcacttatgtgcatgcctccccttcgtgcgttgctctgggtcaccacttcctgtttctgagtcatcaggaaggtaatttcccccaatgctcaatatcctccaggacactgtgatcactcagcatctacccagcttcccctcctctatcccttccataaaaacataccgaaaagaccacccccggcaccactgcaaaaaagacctaaactaaacactgtgcagctgttggtctgagtggctgcaagctcacaaaatgcatggggaccacagcccccagccctatctggaaggacggctgattgcctggatttaattggatagttaaatacagatgaagatgattctggagtacagattagtcctggtgcaacaagatctgtcagagactctgcctactaagggaagtggggtatttggctgccccctaaaataaagaatgaatcaaactgccagaacaagacaccccaggaggcatgagatggcactggaaggatttgtgttagagtcaactgaagcaaaactttgaggagctagtcctgtagacagcccctcactgcatttttccttccttctcctccttttcatcctccttcccctccttttcatcctccttccccttttccttcctcccctctttctttttctttcattcctttttaagtcatgcactacactttctgtctgcctttcttttttttttaatctgatgttcacaagagggaagtgactgatgataggaactaagtgcttggggctcagtaattcattcaacaaacagttatcaagtatctaccatgtggcaagctctttgctagatactggagctctgagatgtataagatacctttctggcttccaagaagctcacagttgatggagtgtcatgtaaattaataactgatatagagtgtggaaaatcacatcatggaggtgactcagggattgtgagaacacggagaacagaccacatggcacaactgggtgatggtggaagattctggaagagcagtcaccggagcagaggcttacaaggtggagtaattactagggcactgtctgaataaggtgtttgattgctggagggtgaagaaggaatggaaactgaagaaacaggaaagggtgtataggttgacatttttgaggagcttgacaatggaaaaccagaggatgagaggcaacagatgtagggttcagttgtttcattgaagggacatgtattgtgagcgtatgtatgtgacaggtgctgaccaggcaccaagtacccgaaagtggatgaaattgtgcccgcagccttaatgttctattgggaaacacaaacagacacataataggcattttaagtaaaatgtgagaagtgctatgatagagctaccgacagagctcagggcagcatctagtgaagcctgggtgt

SEQ ID NO: 50294 - DNA, 676 bp, Homo sapiens
gtaccaggttttgcactggccaagaataccctcagcatctcttctcatgttgggattcctatgaaaagggagaatagattatgttgttttccagctagctcatgtgaggtttccactgtgtttttccatgtagccaaccttccagattttatcctttataatctctgcttccacctcaccttccttgtcttcagtgaaaactgttcttttccatacaaatttcagattgtgacttttatgtaagatattcccattcagatgtcttttctcagcctgttgtagcctcctgccctttgtttgaaaagagtgaaacatcatgaactttactttttgacctttgagcattcatgggggagacaggggagagaggcggcacagaggcctgggagaatgcctgcctgtaagcggctgtcatggtttgagcctctaaaagggcaagcctgttgctaaggaaactgctgctctaggagggctaaacatacagtaaaatagcaggaaaggaaggcacaaataagtcagatgcttgggggaggggtggcaggaggcaacctaagaactttaaacctttattgctgggaacatattgaaggctctagtgagaagaaaatcaagcgtctatatcccttcctagaaaatagctgaaatttaaaggaagcctagacttcatgtgaatgtc

SEQ ID NO: 50295 - DNA, 847 bp, Homo sapiens
aatagttacagttctgatattagtgcaagtaagtgtatgtttttcattctgaatgtatctacactataacagaatgcttcactgttttattttcctttgactttttggattggaatcttatggagggtggcgagtagcgaatatttgaactaaagtcattgtcttacctagaattctgcttctgatgtgtctacctctatctgcatgtgtgtgtgtgctcacacttgtgaacttttcttgcatttatacaaatattaatcatgctattggtttgctgatttctgtaataagagaacggtaacttttggcattgcttttcaatcttttccttcctggtctcttgtggtttcagattattgtaagagaaatgaacagttaagagcaaaagagtgaagttatattcattatttaaatttgtcagtacaagaaaaaacaccatggaggcccaggaatatttgttcaaaccatttcctcattctcaaggtcacataacttcctgtctaattccagtgtagaccaacatcagtggaacactcgattatttgtcttcttagtcacacctcagcttcttattcactaatgacaggaatgtattttcaaagttttagtttctttttctctgttttattccaagactgcttttcaaaaatgtttcatttcttctttgccatcttccttactgtatattctcttctaatctcccagctcatttcccagttgttacaaacattatctaagtattctcaatattatgatttttaacttatttcatgttaaatgtttcctatagatttcatgtgtatttattctacctaatattaatataattatcctgatcaaaatactt

SEQ ID NO: 50296 - DNA, 563 bp, Homo sapiens
tttaaagcaaattgctcatttttcacagttgtctttttctctagtctcagcaagtactgagaaacgggaagaaacccctagataatgtgggaaccggagtgggtttaattttggaccctgggctgtgtgacgctttggcttgggtcacaaggcactttggggagtctgagagagagaaagagaatgcattgttgtgcttctctggccacttgccaactttgcctcggacacagtgctgtgtgcatccctgcagaagctggaactagtcctagtggactctgggatcaatttagggcaatagagaaaccttgtgcaatgtgacaccagagaaaatgaaactaacctctggcagttgctttctcactccaccccctctcaaacctccaaaaggtgtaagtttatgttgttcactctgcttctctaaggacaaatggtgaaaatctgacttgagctctatttctgggtggagagtgactgactggttttctggtccccaggttttgacatctatgaggaagattcatcaactcccagctccctaagcttttccggttgataatata

SEQ ID NO: 50297 - DNA, 772 bp, Homo sapiens
tgcccttgtgcatgatgttaagatttctccccacttgttcccagagctctaggtttggcaagccttcttctgggaaccatgggttatagaaaacaacagtttgcataaggtcccttaattgcacctctgagacacaggctctgctagctttaagcagctgtttcaatacttttatatactgttgctgttgagctgttaactgttgtcccatgacaaaaccctagcttgaaaatcccctcaaacttggaaatccccagcaggcaccaattacttactgcgcagtcacttcactttcattctcgagggttttgtcacaatctgttgcagcattcctcacacagggcaccacctgctggctctgtcctgcagacgctggcagatggatgaaatgaccattcagacacaggtatgcactgtaagagcagctaggtgactgcctggctctggtgtccaaagagcagcccggagaagctggagctgcttgcttttattcagtgcaagcacaatgccaaaaacctggagcaaaaacaaactgtaggtaattaacatttattgttcccctttcagggaacgtcaggtgtgcggatgatcaaaggtcagttccaggtcaacataagtagatgagcctgtttaagataaattcccctacactccctggtacctacttcttgccctctgcctcagggttatagaatagctgccttcagttattcttccccgaggctctgcagaaccttgagaactttcagtaggtttgcgtcctttccctata

SEQ ID NO: 50298 - DNA, 1593 bp, Homo sapiens
gattgcttgagcccaggagtttgagaccagcctgggcaacatagcaaacctcatatctacaaaaaattaaaaataagttagtcaagcatggtggcatttgcttgtggtctcagatactcaggagactgaggtgggaggatcatttgaatctgggaggttgaagctgcagtgagctgaaattgtgtctctgccctccagtctgggtgacagaacaagaccctgtctaaaaaaaaataaataaaaataaataaagtaccaggtgtctcttttaaagagcaaaatgaaaaacattaccaagattgatgtgaaagtcacagaaactgaggtttgtgatttgtggaagactcattaccacattgaagtgtcaatgcctccatgcaacctaatgaacccttggccttaagtcacccagtattatgcaatgtaataaaaatctactggggttcagcggggtaggtgatagtgtcatggtgttacaacacttttgtacagtggccaacacaatgactgctttcacattcatttccttcggcttcattgattatgttgtgtgactttgcataaacacagcatagatgtgactctgatttacattgcagtgacctctagcaagcggcaccaatttcccttcaactccagtcttgcagctcccgaaactcaatatttgggaatggtacatttaaacaaagccaaggtgctacaaggtggatctaaaacctaggagctttctcatctacccccagcttcaggaatagatagtcattggaaacccagttacactatgagcagaataagaagaagaaatgaaatcatgacgaaggaattttaccagcagatatgaaagagttgcaggaacatgttcttctgtaaaatattgtggttaaaatctacgaggctacggttaaagtttaaaccaggtgctaaaagaaccacagatttgctcctagctctgctctgattctttgaaaatattggacataaaatttgaactccggtgcctattttcacatctgtagttttaaacatatatctaccaattctaatgacgacatgtcttggtcatatttaccacacttagatcacagcagtatctaattcatagatgacactaaagttaggtctattgaataaattagggcttggtcttcttattgcctgtagtgctcacacataattaaaaggcagcatagtatggtggttaagtgcacaggttgagcccagtaaacttgagtctgactcttcactgtttatacatgtaaacctggttaagttccataatcattctgtaccacactttcatcaaaggtatgttgtaataatggtacctacatcataagattgttataataattagctgagtaaatataagtaaagcaatcagggcagagcctggcatatagaaaacacaagtacatgttattaaatttgaccttgttaaaaagatctttattaactctatgatttcctgtttattcccttcctgacaagactctattaaaacaattaatgaatactgaaattgcccagtgaagagcaggggaaagtgaaggtaaagattaactatcaagaagtaagagtaaacattttatacat

SEQ ID NO: 50299 - DNA, 1138 bp, Homo sapiens
taaatggttttgtcttccacaagagaggattcccctttattctgttaaatggttaaaaggagactgattatttcaaagccatctgtttgaggaccttcacacctctaaatctgtccctgaaacccttcatgactgctaagactgcctctggttcacagcctgggctgcacttcgagtctcagtttcaactccatggacagtatcagataatgtccacaaagaatactccagataacaccgtgttgcagtttgttaagatgcagccaacttcttttttatagctgttcctaggatacagcccttcagggatttcagttgcaatcattgtgagtttttgtctcctcagcaatgagaagctgcaggaatctctgctctgattttcacaaggttttcagcttagtgctttagtctcccatcccacatattagaatttgacaatggtcttgaggaggagaccagctgtgtttaaaggccttcaactttccaattttatcactcaagttctgagcaaatgtcaaacatccctctggcttctttgtctacagcaatggtcggcttctagaggtcaagcttggattttaagattgtagctatatccagatattcaagtacctctatgaacaaagaaacaggagttttgtatccatgtcagtttaccatcatggggggaggggggtattttagctctcctctcttatttttagtatgtgtgtactgtccctagtacatatttgtttgctgagtaacgagactgaaaaattccactcagcgtttctgagatctgggcttaattctttagcctcctctcccatgcagatttggagtgaagcaaatgtattaaaaggaaaactagccatctgtttgaggactttcacacctctaaatctgtccctgaaacccttcatgactgctaagattacctctggttcacagtctgggctgcacttcgattctcagtttcagccccgtggacagaatcagataatgtccacaaagaactgaaagtcttaatttcaccttctaaaagtgtttctctgcctagaacattactctgtagtcctcatagttctgtggttctctcacattattatagctataaaaattgtatcttatctgacttgtctagtttgtctcagtg

SEQ ID NO: 50300 - DNA, 891 bp, Homo sapiens
tccctttctttctcaggcatttcctgtgaatctattgtatacctaattctatcttgctgtctgcttcttggaggaccaaactgatatacttggacatgtatccctaagaacacaaatcaacaattattgctatcagaaacatcggagagtaaaaatctttcaggagacaccattctgagacaaatataaccattaattcctttcaagttccattagtttccactctagggtaaaaaggatcttttaaagatcatctaattcaactctacattctgacgtgtggttactgaagtagattaatgacaaaaatggcctgtttattcacccctccctgtatccacatcctttccaatgtaaccttgcagcttctctcatcaagtgaacactaattattgccccaccccttgcatttagtctggctttgtgacttgctttggttaatagaaagggatggaacactgagccaagctcaggactccagtgaccttgcacaattccactgtttctcttggacctctgcctccaaaagaacatgatcaagatcgctggatggagagccagagaccacatgaaccagagctgagttcaatcgtcccagccaaggcatcaggcctgtgaaaaagtccagctgagacaaccacaactgcccagctgaccagcaactgatcatagacatatgagggggccctattcagtctagaaaaactgtcaagctgacccatagactcctgagcaataaaaaacatttgctttaagccagtgagtttgggaatggcttgtcatgtaacatcattgtgttaaatttaactaatacatatgttttctaagatcgtctttatcacagacgcacccagactctgctaggactacaccagggggaggacagaaata

SEQ ID NO: 50301 - DNA, 2695 bp, Homo sapiens
ctgagaatattgagtcaaagcagggcaccagaatatgtatacttgaaaacttccacatgcatttctgtatattcaagctgaatttacattccaaccccctactcctgttcacctagtcatcctcttcctcacctcttaaatctatcaatttccaagtgcaagcaactcagcctcccacatagaactcaatctgctcttactgtgcattcttgttgattacatcatagggcagctcattacccacctgcattactacaatagaggccatactgcttacttctgttagcattttttcctcaaatcaccacccaacaatcctgtcaaagtgaaatatctaaatttaaactgatttttttaactagctaccttaaattttatttcctttgaaataaaagcaggtatccttttggcaagacttaaaaggtcctttatgaactggtcttcaccatcctctcctagctctttatcctttccaaacaaccctttgccctgaaattcctagagttccctagaaacggcagacctaccacgtgccttcttctccccacgttttctcacatgtccttgcactaggaatagctctagggtccattattcataagggctcctccttgtcatgcacttcaattctcatctcaatgataacctgctcatgtgcctgtctcgtgagctcctgaagtgactgtgtatttatcacacttccttatcatcatctcactattatttatcactgcaattgtgtgttcctatgttagaaagtaaaatttaaaagttgttggaacacctaaaacactttcagtcttcagagacatgtgattgtgtgatctgagtcatagagcatgtagttgtaactacttcttcttagattatagatttactctttcttagtgttcttgttttgtaagtgactaggagagaccaaaggccagacatcctccccttctaattacttacctttgttacagattaactgttgcccttactgtcctgtacctaactcagaccaggtgacacaaaagacttcgtgactgttacatcttcagtgtggaatgttaaacatacctctcccgagagagagagagaaaaaaaaaacaccttgaccaatcagatcattataactatgcagtaagcctctatagaaagatgttggaatcctgctaagtttccctaaaccctgcctataaagacaaccccaaacttctacacttcagaacagtgacatccagtctttagagtctgtgcttcctgggcagtcatcttcaagctttttgtatgaataaactgtacatttaatcacatattcttaatctcattatttaaggttgacgtgtgtgtgtgtgtatgtgtgtgtgtgttcagccttttaacattcatgaccatctaaggtagccaggcagaagactgaaatgctacagtggcacctacataccaccactacccttccctttaccctgctgcagaagtcaaggacgcagaaggaaccgtacaatcaaggctgtgaattcaggactctgtcttcgtgtgtttactttcttcactggcaacagttaacactcttcctgatacactgtgggtgcatttgctgaattggtgaaaggagaaaaggttttaaaggttaacttctaacaaaatgtttatctccctggaaaaaagtagaaactacattctctgagcctcatctcaaaacgtatggctttggttgaccttcaaaatgttaatttccaagggagaggcaactttttacctctcaatggtagagtaaatcatatatcttaatgtgggctctgagtctctgaggaggattgatgggccagtgagtgagagagagggggctccttaggtcctggacaacaggaaatgacagctactggcttgtttcactttccccagacttttcctaaatcctttcaaatgattctctgcacttctttctaaattgagttaaatttgtgccctctgtaagattataaaaatagcaaacccaatagtcttcaagagtgaaaaggtaaacttcagcctcaacccatgtgatgaaaaatatcaaatcagtggcctttggattaatgaagttttactgaagtcatattcctaattgtaactttcgcattgctgatactgacagaacaaattgagaaaaagcaatttggctttgcattctcatgcatcaaatttcttgaaatctaaatatagattcctaggatctcctgcaatttgggagtagcactgtgccaatccagatgaacaattttccctcaggaagctcctgaaaaggttctgtttcagagacctctagtatatattaaaagccaaagcagcaacagttaagattcatatatagaccaagtattggtgcttcagaaagttttccagaaaataaaaatgtaaattagttattgctgaatcaagtcacaggagagtactttatgtcaattacaaaagcaataagagaacaacagcaacaaatgtgtatttgatatctttcctaaaaattgattttatattttgttttagaaacatggaataattgtggcttgcctattaagcaaaaaaaaaaaaaaaaaaaaaaaaaaaaaaaaaaaaaaaaaaaaaaaaaaacaccaccaccactgtgtaaatagtgttgttcaccattcaagcattaggatgacctaaatcactcacaagtcacttgggcccagccctgagtcactcctta

SEQ ID NO: 50302 - DNA, 1434 bp, Homo sapiens
acttcgttaagtggttgtaagacttagacattttttctggtagcaagaccccaacatttcctcaaggtcaatggtggctgtcaatttaacctctacttcagcattttaaaaataaatgccaacacatatttccccaccactggatagaaggtcaaagtcttattcttgtcaactcctaatcagaagatctcagctttgagaggcaaaaattacaatacacttgagtggttctgaggcagcagcttgtatttgaagaacccctgtaggtaagcacaaattgaacaaggagaaatgaaatctgcccgtgattatgcttaccttgtccagctattgagaatggccaagaggcaagtcaatgctgaccccgtgttctgaagattgatagtgtcaataatctgattacctcctgcaaaaattgtttttgctgaaacaagctctcaagaatatgcagaatggagatcttaggtaccgcattagctgaatgacttgaaagtattctatgaccatttaatttacctctttgattatgacataagatgtcagctttcactctcactctccatgaccttgagcaactcatgaactatctttgagtttgtgtgaatagatgcagagctggaatacaatctattttccatgaatatccctcagagagaataaaataagattgtgtattcagagctttcctttgccaaaaagacctctgacagatatataatacattattgttcttgtaaccaactgcagcctgctgtcttgtaaacaaaagtgctcaatcaataatgttggttgatagatcggttcaccaactgaaggtgtccatgtgagaaatctacactagaaaacagcccccattaaaacagattcagcagaacctccaccaagtgtgcagatgtaaatgtctcctctcttctgagtcaagagagacattccagggacaaagtaagacatagagtaacagtatgtcgaaaatccaagtcatcctggcaaaataagtaaatccagtgacatgaaaggacaacagaaactagtgacattaacaaatatttataaagggcaaagttccatttacaggcacagctggttttgttgtgctttgcttcatagcgctttgcagatattgcttttacaaattaaaggtttgtggcaaccctacagccagcaagtctttcggcaccatctctccaacaatgtgtgctcacttcatgcctccatgtaacattttggtaattcttgcaatatttcagcatttttgttactattttctctctgttatggtagtctgtgatcaataatttttgatgttactattgtatgtgctttaaggcaatatgaactgtgcccatataagatggcaaacttaataaatgctatgtgtgtatgctctgactgcccactgatgagccgtttccccatccctctccctttcctcag

SEQ ID NO: 50303 - DNA, 2100 bp, Homo sapiens
tccacaggtggggtcttcaggcatatttcaggctaatgagaggagtcatagaagcaaggggtccttcctgtgtaccagtacctttgtcatgacgatgtagcattggtaaatgacatgcatggctgcttctgacacggacactgtatatattctggtggggtccgatttgcagcttgactgtgttttcctcaaatagcacatctgttaatcagaactgcagcaggagaaagacaccgacgtgcctcggacttgtgccagggaaagtccacagagagacctgaggttggttgggccattaacaggttacagcccaaattcctcttctcccctgccagagacattatctcatcggcagagttcgccagaggctgaagttatatctcattaagagtctcctaagcactgagactctgcactgtcactgacacctatttagtttatagttctgctatgtcattaggcaaccttttcctagggacacaggaaagaagaggctacaattaattcaaggcggaaaggaacaaaaagaatgatagaaccacagactgtccacgttggtgtcagaaaaggaaagatccaaacttctattctaaaagagaccctaaaagtatgggttgtaaagggaattcctggtgcatgtgagaatgaatggatgaatgaatgaccctttcttggccgggcatagaatgaagggggcaattcaaagcattagaagacaagagggaatcttggaacctggtaccccaccctaagaaaaataaaacaagttgaagaattagcgagaatgtgaatctggatagatatcttcaaataaatccttggtggtccctgggggtaaatatttaagcaagctgggctagaaagtggcataatttagaaggaagcaagtggcccttatttatatataacatttttaattatctggctgactgataagactttcagccgacaactaaataacgagaaacagctacacgtctccagggcctttcttctggaaaaacttttctggtcccctcttccctgaactggtgcaggcgtgcaaagaaagctccgtgccacgcccggcagcctccattctttggtagaacgcagcgcagcaatagccgccaagtcccctcctgggtacagtacagctccacagcgcccctgctggtggcttgggaagggcgcgcaagcagagaaagcaagtgtcagagccgggactggcctcccagggcatcgcctacagcttgtgctctgagagtcggggtcatcatagctgcgctcttcgatggacactaaatgcgggacatctgttttacactcaccctccctccccgcgtggcaggagacctacactctcccgctatgcgcgctccgcggcagctgccgctgcaccattcattctctcctgcagaagttcaatattgctgcaaatatcgagaaaaaaaaaaaaagcgctgagagggggagggagggagggaggaagggagggacagcgagccagcggccactgcaaaggggcgaagggcagtcccgcggtcagtaagggccactgaactttctgcccaccggtcatccggagctgaggactgggacatggtggggtgcgtcggcgagggtcccctgaccctgcacaaacccaggggtgtggtgtggatgacccgggaagccgcacccagagctggcggtatgtcaggccatagagaaaaagggatgttcctaggctaaaggagacatcggggctggggatgacatcccaaaactcccagcgccggggagctcaggctcgggcggtgcctggctcccctccccggttcccgccgcaggaggctgctgagtcactcccgcctgagccacggccgcccccagccagccacgcgattggcgggttagcccgggcgcagcgccctcttcccagctcccgcacccccagggcttcccgcaggcagagggtgggagccccggcgagcgaccagttggggcttggtaggaaccccctaaaaatgcgccccacttgtgcattcgtgcatgggcgcattttgggagtaaacaatacataaccttcttcgcattcaaagggtctggactcaaaagagggctcagccttgctcctcg

SEQ ID NO: 50304 - DNA, 5604 bp, Homo sapiens
gtcttcctttcttttatattcctaaaacgcatgaaaaccttcacaggctgcaaggaggatataatttctctctagaggaatcttcttcgaaggtgaacgtaattaagctggtcatttactctacttgcaatgttacttctcggtacaaggtagggagaaacccctggatcttcattctccaagtctctccaggaagaaatgaattccaagaggggagctccagagagggcgccacctggagcccaaggcggttcaaatgcgcagcccctttgggatcttcgtcaagaaaaggcagtcgttgacggagaaaagacggggatgcgccttggccctttctccacgggaatgctctctgggctgctggctggttgggaaagggaggtctgggcatgagggtctaagtttcttcagcttaaggttggggggtccccggagtttggggatacaggacttccaaattagggctttctaaacaatttccctgcagaggatcccctagcaaacggtctgatacttctgaggagcccacctcccttgcaccagctctccggtgataaaagttctgctttccaggctctaagcggtggccccgggagattcagtctgccctgagtccggcttctcccgctcgcggcgcgggttcaagctccagggggtgaaggcagaagtcaactgctcattcattcaacaaatatttattgcgcgcccgcttagtgccaggcaccggaggtgccccgagcaagaagccgctctcgctgatccgtttccgctccccaagtgtccggcgcgcgccgtgggagcgcagcccgcatccctcgcccaccggccgcccggcctgggcgtgcccggctcctccagcgcagccctctgtcgggagccggacccccgggacccagcctccggggtatcagccgggtggggagggcgggagaaaggcaaagtgccgccagcgtcaaagtcccgccggcccaggaagccgctccagggaagcgcgcgaggcggagccgcagtcggcccccgcccggcagagcgcagagagcggcgcgggcgggagaggccgggcgcccgcggctcggaggcggccccggcgggcggagggtgcggccggcgggagggactggggcggcgccaggaggggcgcgcactgctgcgctgcagcccggcccagcaggtgaccgcgggcggcgcgggcacgggcacgggcgcgggcggcgcggcgaggaggcggcccgcggagtccagcgaagtttggcggaacatggcggaagcgtctggggcacgcaggagcgcggggcggcggcggccggagcccgaggagctgtagcagccttagtcgccgccgccgcggggcgaggtcgccgccatggcccgctggatcccgaccaagaggcagaagtacggggttggtgagtgcgcgccccaccttgtcccggcccgacccacgcggccaagttcgcggacagcggccctgccaggtttgcgcagagcccggcggaggaccctggccgggggctcggcccggctgcgcagctctgggagccggggacggtaggagtcctctccagggagcgccgatggggaagtcgcccagggtttggggactccgagtgcttccaagtgcagctgagcttcgggaccgtaatcccgctcttgcatcccaatctccggcacttcacaccagggaaatgtcaacgcgaggggggcgcgcctgctgctcttttggggccgcagctctgtggctcgccccggtgcgcccagcgtgggtttcacctgggagtaggtgaccagcccgggtcggcacatggactggtgctcattgtcccagtgctttctgccccccgctttcgtaggttcttctcagacgccccttaagtgaggagttgagggtggaaagccgccctgccccctttcctccagagactgggatcttgatgacagttgtgagctggatggaaactagagtcgtggcgtggaagtgatggaagggacaggaagttgtggcacgggaagggggtggctggcccctggggctgtttgtgcgcactcatcccctaacggagcctgtctggagagggtgtaaggctgccttccggatcctgagtttcatcctggagacgagaagaggacattttattaaggaaactgtgccagaccccgtgctgggcacttggcattcagaacagcggtgctggagagccccgggttgtgcgcaggggttgctggtggtggtgctttggctccgaaacaatagatgtgcggggattttgacccaggtggaaagtcaggctcctttggctttttatcaaggattgaagttattgagggcctgtgggaagacttctgccctgaacggggtgattacaatggcagttagacctggggtgattccctacaataaacacggctgagtgtgttgcgaattttatcacttcctctcagatccattcatttggcctgtttgtaatttagtctttgactttactcccttactgaggtcctgtttttcctcacctcactggttaatgaagtgcagtctcaattaagagctactcaacgtgtctaggggcttttcaactctgtagccaggagtcagggttttttgttgttgtttgttttgttttttaacagtctcatatttactatattattcttaggttgtgatcctttatatatttattattttttgttttccctcaattcaaaagacattttcttttttgctcttaagttgcttttagaatcttagtctctcccttagctgcatctcagaaatgggtagagatgttgcttctgcctcagggctctttttttttttttttttggtttgtttgtttttgagacggactgacgagggagtctcactctgtcgcccaggccggagtgcagtggcgcaatctcggctcactgcaagctccacctctaggttccagcaattctcctgtctcagcccccctccccgagtagctgggattacgggcttgcatcactacacctgactaatttttgtatttttagtagaaaccaggtttcgccatctgggccaggctggtctcaaactcctgacctcaggtgatccgcctgcctcggcctcccaaagtgttgggattacagtcatgagccacctcacctggcccctagatgaaagcatatttacaatgcccaatcactacagaaatgttatcaactctaattttatcaggattaaaagctcttttcaaaactattcagttgagggtaattaatgcaaacatgtttcaaaaatgtggtttttattgccatagtcctaggagcaagtataattgtttttaatattttgtttttatgttctggagtcagtttactgtgtcacttatcagtcaagaaaaatatttgggccaggtgcgatggctcacgtctgtaatcccaacaatttgggtggcagaggcaggaggattgcttgagcccaggagttcaaaactagcatagcaacatggcaaacgggtctttacaataaatacgaaaaaaatttagccgggcatggtcgcctgtgcctgtggttctagctactgaggaggctgaggtgggaggatagcttgagcctgggaggttgagggtgcaccgagcccccatcacgacactgcactccagcctgggtgatactgtgagacccgatctcaaaaaaaaaactatatatacatatatatacgtatatatatatatacacacacacacacacgtatacacacacatatatgtatatatgtatatacatatatatgtatatatgcgtatatgtgtgtgtgtgtatatatatatgtatatggaaatatgggtggaaattgtgtgtgtgtgtgtgtgtgtgtgtgtgtgtgtaaaatatttggattgcatttccagggcctaggtgttagggaaactgctccaggatataattctgaacacttatttcaccagacatagattctggtttgtctgggtttgacaaaaggacccacagttgggataaattaactgaagagagaaatctccattgcttattgctaaaactcattgtttttgtcacctccttgcttatgtttatgtcacctccctgcttggaagtctctcgtggtcaacaggataaagtctgagcctccgttccaaggttcctataatctggttcagcctatcttcagcattatctctcgaggcttctttcactagctctccaatgcagaccaactgcccttcccactgttgtgcaacataccctgcagagtccctcctttgggactttgctcccattgtgcctgtccctgccaggagtgccctcccaactctgcctcagacagctcacctttccttgagggctcaaatccattcctactcccttcttcaaatttgctatttgtcagactgtcccaaacctccttgcttcttcctcgcagttcctggactgtgccatccttgggttcagtgaatcagaccattgtggttttgtattcctagcactcaacaggtgtaccaggtattagtgcattcagtttgcttgtccttgatgttggggtgccgttctaaagtacactaacctagcttgtctggtaattgaatgcagttttttcctcttctttttcttcccattaggcataacatctcattcaccccaatatgagttgaattttgtttggttagatggaggaagggagagcctccactctgtctttatctctgcaagtaagagaatgagatattctgctgagaaaacaaggaagcatggagcagacagactttcttaaatatagttgggaaaattggctttctggacttctctaagtgtgtactggtcagatttggtttctggatgaaggaaccgtaggatagtcatgttgaagcatttggatgactcagagctagctatgactttgcctgttgtgctctaagaggagtgtgcctctgcagagctagtctgtgtgaggatagagctttggactcagtatgaattgtgcctgctgaagctggcagtcgctactgtcatattttatcttggtgccactcttggctgttcctgacatatcctagatgtttctacagggactgaaatgcagcctgtctgggctttcttagttcttaaacagcagtgttggctcaggctctagcattaagtggatctcaatggtttctgtgtgttatcaagtgaagtgactgatctatttgattctttaaacttatggtgctctagtaccccagtgttaagtgctcagtggctaagtgttcttccctggagacgtggaaaatgtgcttttttctcatcttttttctttctttgtttctcttttctctctcttttttctgtttgagcatatgaagatataaaacacttttaagcaaacattagtgataaatatccagaatagtctgattataaaaacatttatttttaagtttgcttccacacaagccattatgtaaagaatagccccagattaggttgactatggattctttgcaaagcttttttttcttttcttttctttctttctttcttttttttttttttttttttgagacagggcctcactccacagcccagactagagtacagtatgatcatagctcactgcaacctgccatctcagccttccaagt

SEQ ID NO: 50305 - DNA, 1352 bp, Homo sapiens
ctccaaaatatgtcctcagattactgctgctgatgtttccatttcaatgcaagcctgcattagcgtctgcagggctactgcaacggtatttttttttttttcttttggggacggagtctcgctctgtcgcccagactggagtgtagtggcgcaatcttggctcactgcaacctccacctcctgggttcaagtgattctcctgccatagcctcccgagtagctgggactacaggtgcgcatcaccacacctggctaatttttgtatttttagtagacatggcatttcatcttgttgaccagtctgatcttgaactcttgacctcaagtgatccacccgccttggcctcccaaagtgctgggattacaggaatgagtcaccacgcccagctgcaatggtcttctaactggactccttatcacttttttttttttttttttttttttaagatgggcatcttgctttgttgcccaggctggtcttgaactcctggcctcaagtgattctcctgcctcagcctcacaagtgctggaattacaggcatgaaccaccaagcccagctaagaggaactttttaaaggcaagaacctgacattgccacctccctgcttccaccttcccattgcagttgggatggcactgaagttcctggtcatgccctcccggccctgtgggatcagacctgccgcctccctctttcccttctgcattccagccacaccagctttatttctggtttttgaacttgccaagctcagcttgactcaggaccttggcacttactcctccctcttatggaatgtgtttccctagatctttagatgtccggttctctggtcttccttcaaataatccctgcttagagagagccttctctgagaagaaccctagctgcatgatcccacctccttgctgacacctcacaatgtctagcccttttcctttatttatttgttagtgtttactgtctgtctcccatactagaatgtaaagttatgaggacacgaactctttttcatcagtgtgccccagcccctggaatagcacctggctcatagtaagtcctcagtgaatatatgctgtatgaataaatgaatactgaccccatcatctctttaaattcatcttgcttaccatcagcaggattttgcccacactttggaaaataccaccctgtgtgtatttcccatgagagaaacatcaaaggcagagagaaagggacattcaagtaatggagaaaatagatttaataaactgcataagcaaaagattacgtgaatcctgtggggtgggtgaggacttagaatcataaatgttgcattattagatggaagtgatgggatttgctttttta

SEQ ID NO: 50306 - DNA, 1680 bp, Homo sapiens
cctggccaacatggtgaaaccccatctcgactaaaaatacaaaaattagctgggcatggtagtgtgtgcctgtaatcccagctatgcaggaggctgaagcacaaaaatcacttgaacccgggaggcagacgttgcagtaagctgagatcgtgccactgcactccaacctgggcaacagagcgagactccatctcaaaaaaaaaaaaatactaagtcataaataagactcagttgtcaaaatctaacagttttgccctcttgtatgtagaatcagaagatattaagagccggagtttgtaagtattacctcttggctaacaccctcattttatcagaagaaaaaaagccccagagacatcagatgacttacctaaaagtcacacagctagtagcaaatttttgtttcaacttgctgtctatctttctccttacttacaactctggagaggggtttgttaatcagatctccttaaggttggaagagtaaattctcccctctccatccaaaggggaagatgcctgtgtctcctgggttttttccaggtggaggttttgttataagtaaggtttggctgttaaatatcttcccttttttaagagttctaggaaggaagtgtgtttgaggaggtttgagcctgcaaagtggaagtgacactgtgggttgcacggtttggccactgacttctcacgtggtttcagtccttagcaccgtggtattgacatgacatcagttgcaaaattaataagtaatgtggcattgttactacatcacaggcatatttgagaatgaacatcactgtgttttgcaaagtaaacgtttaaggggtgaagaaagggtcatgtattgctaataaaggattatgttagtaacctggatgtgagagaacatttctactttttcagacctgtatttcaaataaaatgtgatgtcatcttctgaagacttaggaaaagtttgagtgagtaagcgccttctccctcagcttccatttccgctctgttctttttttttttttttttttgtgagacggagtcttgctttgttgcccaggctggagtgcagtggcaccatctcagctcactgcaacctccacctcctgtgttcaagcaattctcctgcctcagcctccctagtagctgggattataagcatttgccaccacacccggctaatttttgtattttagtagagacggggtttcaccatgttggccaagctggtcttgaactcctgacctcaggtgatcctcccgccttggcctcccaaagtgttgggattacatgcgtgagccaccacgcccaaccaacttctgctctattttctttgctgggagtggacagctttactctggaggaggagatgcagcctcttctcatgcagagacaatcactgtcattctccatcgggagcaaactcctgaaatggggcaatatctacccacgtggaaccagaggtgctggtgctggtgctggtgctgagctttgaacttccttcagaacaaaagtaaacagcaagttgcccttgttctttaccataagcagagaaggcctgtctatccaattgtgactgcatgatttgttttagatttgttaatttacattttgcagaatactgaggcacattttctgtgaacttatgtggttatatatactttcaatcagtggatactggaagcattg

SEQ ID NO: 50307 - DNA, 1597 bp, Homo sapiens
ggatattttcctctttctcctggatgtttggtatccaggagggcacagagaggtgagcctggaccccgtgttgggtgtgtgtcttggggtcaagggatcctgggcacatgagtggggaagccatttctgagcacctttgaaaaaggaaaagtggcattttcacagcaaatatgggttgtgtctaatctggtagttcccaatttcaatctcctatttacctcttcaacatccaggcgggtgacacacactgtcagtatctataagtatacacagtgattcctgtaccttcactgtaagactgtcagctgccaacccctgacccccaagccccactgccacttctcttaaagtgtgacttaaatgccatcccctggcacctcttttatcctgtgggaatagtcttatcgattcagcagtcatcggttggtcattaatcttccacaaaccacgcactttatcattgcgaaaggggacagagaggatcaggatgttgggttgtgacacgcgagagagccccatctgtccctggctgctccgctgaggtcatggtacagcacagaggaccagatgggatggctagaatctgtgtcctaccctaactttgtttttatccgccactggccagctgcaaatttgctcttgccagcagaggctagggcctggaatgaaagacttcctatactgctggctggacatatttctcccatgcatcagcagatgagccttttgaagggtgagacatgatctgtgactaggggctgtgggaaaacatgcctgtcctggagctgggggaatcctggactccattttggagagggagtcatccagcccccgttgggatatggttcttcaggccagggaaggccctaacaatggctcagctggactctttgtgtctgtttgaaaaacaggggaattgggtgaccagtttgatttcagctttaaaacatggataggctagggtgacactgccatcaacatattccatgggaacagagggcctttggacaaggcagtgtctctgggtgagggtaggatgggggtggggggatgtcttttctcctctgtcctggatctgtagaggctggggagagagagagaggcacagaactttcagtgcttcaagtgcaggaagtgtttcttctacaccccgatccccagtaccctggccatcatcagaggccgagtaaggtcactggtgcaacttgtccactatgtgacagttgccatttattgtgaaggtaggacagtgactctcgggagggcacagataaggagaaaggaattcttcccaagcagggcaggagagcaatttgcaacctactcaatcccttggtcattgtgttatttctatttccagcaacatttctgacaacagtatgtatgattagaacacatctcttttttttcacctttaaatataaaaaaggctttattaaagcagtactgttctgtttttaatgaatatataataattcctattacaataataacagaaagtgatagctattaactttgatattgcttcccccagtttggatagagaaaaggttattgtcatttctatattagattattaaaagtaacacctctcaga

SEQ ID NO: 50308 - DNA, 565 bp, Homo sapiens
tgaaaactgcaattggatctagaattaccttcaataagaatcagcaagtatagagccagggttggacataaacagtctgagtccagagctggtgtgattaaatattatgtaatactgcagacctcttaatctctcagagattatgtttctttatctgtaaaacgaggactatgagctctttcttctctgctggtttgcatgaggctcacatatagtaatgcaggagttttgcaatgtcatctctgaaccaggagcaccagtggtatctgagaatgtgctacaaacacacattcttgggctgtattcccaacctactgaatcagaaactaggtttgggaccttgcaacctgggttggaggaagcctctcacgtaattccgatgtgtgctaaacgtcgcgaaccactggaataatacctatatgtaggtttgtgttaacgtgccatcaattatgtaaacaggtttccttttgtcattatgatcctctcctgcatacatatataaatatctgtctaactggtttttgttgttttaattaaacattgaatgcatgaagaatatttatac

SEQ ID NO: 50309 - DNA, 1464 bp, Homo sapiens
aaaaaacaggaactcaagactatagcaatcccatttgccagtcacatattgcagtgtgttttattgtcagggtacagggaaccctgcagagaaaactggcctacatgcagtggacagaggagacaggagactattgtactgcaccaggccgatgtgcagttgcttatagtgcttctgccttcagtagaatggaggctgtatttggttctttgatcgccctttacaagccgcagcctgataaggtcactcaagtggagcttgtttggcagcacctatgccaagatctagcttgtcatcacatggaaatctgagaacatctaccagacaccaggcatatacactgtgcttatatatagggggttgacactagacaggagccttaacaggcatgcgatcccagcccatctcttacagatggagaaactgaggcccaaagggagcctcttgcagagctcactatcaagcagaagtagacctgggggctcctgccccttccgtgggtgctctgtcttcaattctattgcagcagcctcttctgcctctgaaagagcatggagtgttgcctctgattttagttgctaaccgttggtcaccagttttgtgtactcttgggtttttttcctccctctttgcctcaagtcatttccaaggtgaatttagtatttaagatgacacaaaatggaaaaataaaggaaagatagaaagataggggtacttagtgttgatatctccaaattattcctatatgactcaccattatctgaggttgtgctgcagagacttcctttctccccctcccaccttacctcttatttctctttcccaagaattgcgatggaaacctacatccgccagaggcagctcatcatgtcgcctttgataacatcacacgtgattggggagaatgagccactcacttcagtcttgaataaagtgattgcagcaaaggaagtgaatcacaaagggcaaggtacagtccagtgccagagctgggagggactctgctgagggtgggggacattcacagctgggtccttggactcctgccctttattatctttctctgatacaaaacagcctctgctggggaccatccccctcagcttccaaccacaggcttttaatactgaactgcattgagatgcacccagcggtgatttgatcacagttgtgttttgtaaattctttggaacaaatttttatcccatgagtctttactctttattcatttatttatttatttatttttgagactgtctcatgttgtcacccaggctggagtgcaattgcatggtcttggctcactgtagcctccacttcctgggctcaagcatcctcctacctcagccttccaagtagctgggactacagacatgtaccaccatgctcagctaacttttaaattttttgtagagatggagtctcactatattgcccaggctggtctcaacttctggccttaag

SEQ ID NO: 50310 - DNA, 2730 bp, Homo sapiens
ccatgtgctgcctgctttgctttgctttactttactttcttctttcttttcttttctttttttttctctgtctttccgctcccttcccttctctcctctccactcccctcccccacttttcctctcctcccccacttcccctcccctcccttctcctccccttccccctccacttcccttcttctattttcctttcttttccattttctttccttctttttttttttttttttttttaattaagacaagatctaatgcaggtatctgccagctttctgcccacataaagaagtgagtcccaattctgacatcaaagaggataggcaggaggtggtcacaggaggctgcatggcctctgctgaactccacctcttctcgtatgagccgtagttaactgctttggtaaccaaggaccaagctcttgattgacttgactcactgagtgtcctgttgcatagttgtttgaggctacaatgaaatacaatttcatcacttgccatggatgttataatctattaaggaagcagatagctaggcagtttactaaggcaagtcgtattctgcatgagagggagaaactgaatgctatgagccactgtatgaaagtgctttatttgtgctgttgataagagcacatgagctcatttcacgtagacaccttctcctggttggtcatttcgtttgatagtgccccaccaaggcctggttctactaagctcagtggttcatgaccaggaaaagatgcagccctgagttgagtgaatatgctgtgccaataccctaagtccctaaaacagaatgtagacaggaaaagagaaatgcttttctgcaaatagcggcgcgtctgcagttgtcacctaacttctcgtcatcgtcatgttccctgagagagaagaggaaagaatcagaggagaatgcatgcctggggagggaagagaaaatacaagttacaggaaagaagaatatttaggcggtgctgggttccttagctgctaccaaattgatattatagacccttgaataaagtggtggaaattcagtcttctctgttcttcatcccccaaacttaatcagccgatcagtgccagtgtagggcatgtgtggacgtgtttgggggtgaggggcttgtgcatggtatatggggtcctcttacttttctaaacaaaattattcccttctaattttttccttccatctgaagaaagcaattcaccctggtgctggatatgaaggcatttcagaatacaaatcagtagtctattaccaagtcaagcagccctgttggtatgagactgtcaaggtgagaatgagtcatttgtaacccctgttatctgttaaacctcagttagattcctatcttctgtttacccccaaattattcctactttattttgaaatttttagataagttgcctatggtgtgcagtaagaaatgaatcagtaattataattctgtattaagagcatttatcattaagaaactcagtgatgtatgagaatttgaatagcaaagcttgtggttgacgtgatggatataatagactgccaagatggtacaaaaccaaacagaaattttcacactgtgcaaacagtttcctaacatttttttatttttggcctctcaccaagtgttctgggcctcttttcaacttcaatatgtgtattacacattccaaagtgcttttcagatcagtcatctcctttgagccccacaagggctctgcaactagaacaagcaggtgttgtaacgccatctttcatattaggtactgaagttcaaagttcagtgacttcccaggatcctagagctgactggtatcagggcccaaactagagtccacttcttctgaatcccgggctccatcagctctttctggttgtcgaagtcacacgagttcttcatagaaaaaaaaattttttaattgcattcatatatctcaatttagaattaaccattttcaacagttttctatagttcatatgttttgaatgatgctgttgatacaaatttatattgtgctttttaaaactacttatctcaatgcatataaattcttcagatatgtattttagatacttgcataaggttccaaagtataatcatgccatgatttgactgcacaccacaaatctctgctcgtttgagtgccctaaggctctgtttcttctctcccctgtagataggtaagcagcagaaaactgctttatgagccctaattattacctttccccctctttatggaataatcaggtcttatagatccaattattactatatttatacacatcttgcagtctgaaagatcctgtgtggacctcaaaataccagtatttcccctctgaagtattactgtttcttacttcagaaaatgctagaaattcacagtatccctatgctcagaatctatgataaacagcaagatgatctgagattcttttgatttgaaaatagctcagtctcctttgaatgaaacctataccaaatctcactctctagtaatttgtgctgtggaaagtataaaattgagcctaattccatgaaataaaccatgcttgcaaagtactgtgtgtctgtaaactattaatttcttactatgacacaggtatccattgctatagaagaagtcacacgctgtcatataagatttaccttccgacacaggtcatctcaggaaagtaagtattaagacgtctatgacatatttccacttaaaaaaaatttgctctggc

SEQ ID NO: 50311 - DNA, 735 bp, Homo sapiens
caaaggcatttctccttcgcctgaggagagttattcagactcaaaaggttaaaagccactggagttttaacaaacagatcttggagactcttttgtttacttgatttgttttttagaaactaaaacagaccaatttgtgtgggatcattggtttctgggcccactggaaggtaagaatagatttgtttcccaggaaaaagagaggaatgtgcaggtccccagaggtgcgtggccttgggccaggaggttcatactcagtcagtcattgcaccctccagcaccaactttgccagatcatctccagcttattgatcagaaaattgagttttaaagtggcaaaaaatctttcttaagctcctaagtcgtggacttgtattttgaaagcagctctttgtagctccaaacagtttatagtttatcgttttgcagttacagagtctccaagatctgtttgttacgaactccagtgacttttaaccttttgagtctgaatagctttgtctttcttttctctttaaaagtatgtgttcttaaattctctcctttagggtagaaggcagttactaccctaaatgtggggattgttattctcttgcttctctttatagttttgccacatctgtagcccttaaggtatattgtttcattttgcattttttaattttatgttaataaattaaattatgagtcagtcccttagttgccctagccacatttcaagtgctcagtaatctc

SEQ ID NO: 50312 - DNA, 1034 bp, Homo sapiens
ttggctaaggaaatctgatgcttcacacaggatgtgtaagttaagtgggtgtgttgctttttgttaatgtgttaagtaatgtgaagattgtatactgttttcattaaaaaaaaagtcaccgggtaattggctaatggaagcctctcatcttgctcacatgtattgattaatgaaataatgcagttttgcttttgtttcataaagcaggttgtggatcacatcattgcctaattttattaaagacggagtgaagacattatttgattccactttagagactcttccaatggaggtatttgggaaacctgtcattgtgcagtagcaaatatttgtattaaaaagaggcggttttcccccacgggatgtttctcacccctgttcaaatttcttagcataagtctttccttttttgagggagcagggtagggggtagggaggcgagttcatttgattaaaagaggaaaaagggcttagatctttgacaggtcagtttgttactgagacattgggcaagttatctgaaatttgtttttttttttccaatggtctcatagccacttggaagttatgtggctaaatgagaacatcaatgtcatagtgtctggggccttatggaggattagtcattgctaaatctacattgacctatgaaccctagtttcctgtttcagctccaatggacaaaataacccagcctccaaagtccagttctgttagctgctcatcatagggcaatactagaatagtgaacatggaaccaaacatggctgggtctcttaaactctctgagcccgtttcctcattttaaagcaaaggcaatactaactacaatccaaggttcttatgatggttagtaaaaatatctgtgcacatatgtagcacaaagcctgcccctggtctttttggagaaagaatggtggcaatgctatctgaccaggggacataggaacaatagagtcccatctccaacggtctgtctgtactccattgtgtttcttaaatgcaaaccaaacagatcaagcagatgaacactc

SEQ ID NO: 50313 - DNA, 2526 bp, Homo sapiens
ttagaaaaagttaatagtgatgagaaatgtaaacttcgtgaacatattttcggggtagcattcatgataactcaagaactcgaatttatacgaattctgattttaaatgagtattaaatctctaagaccaaaagaacataaaattatagccaacaaaccacactctggttcgaattttcggagcatgtttactctacactgaataatcggaaagccatttttaatgccactggacaatttcactatttaaaaatttacagtgttccccgaatgtgcaggcagcagagtattttggcaaccaacacagcgagacccatttacctttaccttagactcgtaaaggctgagttacttctaggtatcatttagcaacgcaataaatgtctgcctcgaacagtgaaaatttcccaaaggagcagaacaactttcatgggtggggcaaaaggctgggaaggaagagaattcgttttggcttgctccagcgctggaagaacactgagcaccacactctccgcaaaggcctaacacagcaaaggcgactgtcaaatcgatcccttttgggtctgctgtacccgtcctctagggaatcaaaataaggcaaaataataaaaagagtacagagaagtttggcggcggcggggcgtgggggcttgaggcatctcagagaggagggcaaaaatcaacaagaaaatgcccccattttaaaaatcctgtctgcgacctcggatgggagattttgtttatccacgggcagtttacttctgtctccctgacccatctccacaggctctggtgctcgccgccactttccgagcagatcattactcagcaccggagccggcgcgcctcctcccgcaggcgggagcggggtctcggggagaggcgggaagaggcgcgaccgcccgggcgcccaggtgaccgcggccctccccgcgcccccgtccccgcgccccccgcaccaagcatccgggagacccggagcccccgggccgaaccgcgccggcccccaggcagctgaggcactgaagggcaggctcgggcacgggggtcctgagggtcgggaggaggccgcggggaccctgtgctgtccccgagcgcccccagcccgcgcacgcccacctcccagcccctctacccaacttcaccgctgccccgccagccggttccgcaccgtccgccctcgccccgacccccggcccgccgcgccccctcacgcccccgttacctttccgttcttggggctgccgttcaggaacagggtcacccgcctcatcgcgctgcccccgctgggtcctgagtgagccgccaccctcccacctggtcctcctcccacctttttctcctcccgcccttcccctccctccacccactcggattcgcctcccttcgccaccttcctgcccttggggacacaccacacgcacgcactctgtcccacacccaaggttcggccggtcctccttcccaccccgcccctaggctcctcagcctgcctggggcccttcccccacctctccgagactgacactctgccgtaccaaccaacccgcgtcaccggacagagtccagccaatcagcacccagtatcgggcgggctctggctaacctagccgggacggagggagggaagagacgctgaaggctagtagacgggaaggggcatcagccaatcagagaggctcctggagccggacggcggcttccagcgttactgagcaggcgcaccctctagtttaggtagcgcttatctgcatacgagggcggggtctggggaaaggaggtggagcgctgaaagggacccaagcaccagtcagcccctcctccagcgttagccccgcccacaagccggcccagctaggaaacggctgcggtagggacggactgattgggtaagagccagctcgtcgctctgttaggattggttgaatgagtcttttcgaagtttgcagcatccaatagaaaggtgggaggcggagttaaagcgctaagagaagcgttactccgcgagactctcctgaaaagtagtccccgaggtcacaaggcagtggcaggtgtctgtagtcctcgggttgactgcagctcgcggtggtccctctccgagcccaggaagccactccagtgccgagggagaggcctgggagcgctcggagtgtgcgcggactggagaagggggaggtggcggagtgattcgtagagtaaattcggtaccgaggggcggggtcggggatttgaatcggtcggcgggcggaggaggcgggtggaggaggctgccgggcagagcgcaggccaggatcagcgcaggctgtgagtccaggtcagccgtcgggacctcgggctccgggttcgaagagcggctcccggctgcgggtgctttgccaggagagcccttccggacagaggagccggggtctggaaggagcggccgacgcgacgctcgcctgccacggggctctgggagtaagcctgtctgcctggcgggccttcaggtgcggcgtgagaggtaggattgcatccgcgctgccacgg

SEQ ID NO: 50314 - DNA, 1173 bp, Homo sapiens
cattgctggccaacgccgctaaatgccagtagggctaccctttattgataaaaatgccctaccaagttccagccatccccaggagggaaatattgcccatcctgagaaccactgagacacagaaagtgagagccaggtaggtgtctgggttctggtcaagtgaacgcctgcagtcctcgtgggaattagagtgctctgcaaggaaccagcagaaatctagttctttgagggatcaatgtggaggacgaggagatggggaggaaggatacagcaatgtcgcatgaaagccgcttccagttcccatccctgttccctggtttcttgggcatcaagactcattgcagtcccctgccagagggtgaagctagagagccttgcacatttgccagtcctgtcagttggctcaggattgaggcagggctgactcagcccttagagatgacacagcagtgcagctgactatgacaatgacaataacagctactatttattaaataattggcaaggctttactattttttcatttaattttagcaaccaattatagggtgaaaacgggttcacacagatgcaaggagcctggtcaatcaaaaatcattgacacctggcagggcaccaccgtcacagagattcccaaccaagaaatgcaaatctcccgctgttgctaaagtctcacttggcagctttcccagtccagtggccacagagctccttctcccctctgcatggcttgtggggatttcagctgggaggctgagtgcagtcacagggcagtaggtttaccacttccccatcagccactgccctccctgcaccctctcctctttcttcccaccacaaggatgagtttgatagagtcgcattcaacccaccccatgatgccatctcaagggtttaaagcctgacctaaaaaatagggacttctcacgagatgcttggcaaccccagctgcagggcctgggatctcatactgtggctgccagaatcaatgtgctgacagagctccccatccactgcatatagggcttacttctttttgtttgtgtttcttgagatgcagttttagcctgtcaccgaggctggagtgcaacggcccaagttcagctcactgcaacctccgctgcctgaattcaagcgattctcctgcctcagtctcctgagtagctgggatta

SEQ ID NO: 50315 - DNA, 2701 bp, Homo sapiens
ttttgcctttttgtgtgccttgcaattttttgttgaaagtggacatgctatactgggttaaaaaaaaaaaaacctgctgtaagtcaatctttagtggtatggtggtaaggtgtggagggagggggagcactctatggtcccatgaacaggtctcagtcttttaggaagcttgtacctctggactgtgcacttcaagtgtgcttctcacttttccccgcttaggaggaacaggatggctagagggagctagagttgggtatttccctttcccaggtcacttaggctctgatgcaagaggttctcctgagagcagaccttgtgaagaacagagtgctctgacatatttcaccatggtttcttttctcttccccttctggaagcatgaggcgattttttttttcctttgatcttcactctgagaacaccttagagccaccggagttaaaactcacaaaagtgggagtgctcccctctaagactggtcacctccctgaaggtttttactctcgacttgtccactctgagtctccagcaattcgttacttacacttcaggtttctctacttgtttctgcagaagtttctgctcatgggtttcccctggagtaagctgtggttctctgtacctgcctgtctgtctctccaagcaatatgacctgtgaccttaatcctctgatggacccaagaagagttgctgaattgtagtttgttcagctttttacttgttaggacagagtgatggcttccaagctccttatacgctggactggaaacgggagtcttctcctaatggttttgaatgttctaaaatatttctctgccaggtgatgatgaataaagctaaataaaccctaggcaacctggtggattcattttatatgtgtttactatgctttctttgagactacctgaaagattagaaataacatgggctttggacttggacagacctggtttggaaacttgatgtgtctaataactccctgtgtgactctggatatgttatttaataatctctctgagcctcagttttctagtatgtcaaatggaaattggattatactccctatggaattgctatagttactgatgagtctcttctacccttttgtttccttaaatttcttttatgctttactattctaggtcacttctagttaccgtctttcctgcttcttctttcttccatgttaagccttcaatgtcattcttgtctgcatgtaaggatataatccacaggtcgatgctttaaatcatgttcttaggcaaaataagcatccaggaaactctggcataagcttagatctggttgaaatttacaaattggtgatttctctgtatccaacccattttcttttctgaatcactggaataatgtgatgctccctttattttccattggtacaaattaaatgatgttaagtagcatctggatttcaatgtccacaacagtgttgagtgtatttttgaggatggagttgggtttggttatgcaaatcccacagcttctttccccccaaggcttgctaagtgaagtgcttagactcttggaggttcctcattagggagactccaggacacacccagatgagtacatttagtttgtttctagcaaacattccttgttagatgagctaaaaggtcaactatttattaaggtggagcaacaatgaggtgagccctggctgagtcatgggctgggagttagaacactttgaagctggtaatggttaggctcaaagtcagttgtatttcttcctgttgctgttccaaaggcatgaggaggagatgagaaccaacaggaaaaacagcaaatgatggggaagaagacaaaaggtaaggaggaaagaaagacaagaaggaaacctgaaagttacagaggactcattgtatatcaggaactgtcttatgcatttcacattgttctctcattttctccttaaagccaccctctagagtagctattactacgtctatttccgggtggaagtaaatatgtatcagaaagattggtcaggtgtggtggttcatgcctgtaatcccagcactttgggaggccgaggtaggtggatcccttgaggtcaggagtttgagatcaacatggccaatgtagtgaaaccctgtctctactaaaaatacaaaaaaaaattagccaggcattgtggcacatgcatgtaatcccagctactcaagaggctgaggcaggagactcacttgaacccaggagttggaggttgcagtgagctgaaattttaccactgccctctagcctgggcaacagagtgaaactccatctcaaaaaaaaaaaaagaaaagaaagattaagaaatcaccaccttcagtcacttaacaggtaagtaatggagctaggtctgggattcaggtcgttggaatccaaccccaaaaccttcttccttgcattcttccttattttcagccaagctgtttgtctaatatctgctttgtgtcacatactgtgtgataggtgcagtgatataatttcgaagatgccactctcaactcccaatatgacatgttaacagtctggtaggtgactgtaacactgaaatagtttccacatggagcgtcgagtgccttaggtatgtatgagggacaatggagattttcagggaggagtaatcagtgctggctggggaagtgggtctgcaaagagatgaatgtggggaggtctcccaggtgga

SEQ ID NO: 50316 - DNA, 1796 bp, Homo sapiens
gactgtggtattgcagtacagaagaagtgtaattaaagcaaagccagccaagtagaaggacagaaattttattattactcaaatcagcctcccagaggactcagaggctagggtatttatggataatttggtgggcagggggctagggaatgagtgccactaactggctggggatgaaatcatagcggggctgaaaagggtccctgtgcactgattctgcctctggatggaggccttgggaccagctgagtcatgattcacaggtccaggtggggccagttggttaccagaaaccaaaagtctgaaaaacatctcaaaagaccaatcttaggttctacaatactgatgttacctagaagagcactttgggaagtcacaaatcttgtgacctctagccacacgactccttagcagtaagggattatagacactatgcctacattttagcagaattcagctccccagtaatcctaatcttgtggtctttcgttagttttataaaggcagcttcagtccctgagcaaggagggggttagttttagggagagactgttatcattattgccttcaagttaaactgtaaactaaattcctcccatgattagcttggcctataaccaggaatgaccagggacagccagcctgtgcagccagaagcaagatggaatcagtcatcttctcactgccatagtttttgcaaaggtggtttcacaaagacttacataggcttttccagacaatctctatcacactgcttattaaatttattatagattgttttgtatgttgtataggcgtggtgaataagacattttttcctttatatgttctaactggttattcctagtgtgtaaaaacagtatataggttactatgttcatttatttgtttatttacctttttagctttagtgaggtataattgacatacaatcagctgcacatatttaaagcatgtacttggatgaattttgacatatatatatatttataagaatatcaccacaatcaaaataaccaacatattcatcatccccaaaaactttcttatgtctctttgtcatccatctctctctggcaccagcccctgacccaaggtaaccattaattcaccttctggccaattagtttacattttctaggacttttttagtgatggaatcatacagtatgtatgatttttttgtcagtctttttgtctgtcttctcagcataattattttgagattcatccatgttgcttcatgtagcaggagttcattcctttttattgctgtgtagtatcatgtgagtatcatagcatatccacttacctgctgatggacatttgcttgttgtttccagttttaggcaattacaaataaagatgacattaatattcctgtacaagtctttgtgtagacatgtgatttcttttttcttggggaaatacctacaagtggaatgtctaggtcatatgagaggaatgtgtttaatgtttcaaatgttttcaaaacaattgcatcattttacattcctaccagcagtacagagttccagttcttccatatcctctgccaatgttgagtgtggtgaaacttttaaattttagccattctagtgaatactgcattagtatactatattagtccattttcatgctgctgataaagacacactcaagactggaaagaaaaagaggtttaacagagttacagttccacaaggctgtggaggcctcatgatcatggcaaaaggcaaggaggagcaagtcacatcttacatggatggtggcgggcaaagagagagcttgtgcag

SEQ ID NO: 50317 - DNA, 2606 bp, Homo sapiens
caacctctgcctcccgggttcaagcaattctcacacctcagcctcccaagtagctaggattacaggcgcacaccaccacgcctggctaatttttgtatatttttaagtagagacggggtttcaccatgttggccaggctggtctcgaactcctgaccttgtgatccgcccgcctcagcctcccaaagtgctgggattacaggcatgagccaccgtgcccggcccaggtattcctagaagacataggaccccatgaatccttgcaggagagcacgtaaactggactcctaagcccgccccagagccccggcgctagtgctcgaggctgggacactgctaggtgcacacagccgcggcctggcgcaggcggtgcggacagagggtatgccatggcgagacgctggcgcggcgcaggccctgccggccgggacacggagggcggggcacaggcgcagcaggaagggggcgtggccaagagccgcccggccgctcccccgcccctccccctccgctctccgccccagcccggcggctccgccccctaggtgacgtcactggccaggccagccggcgccattttgaaagtggagtcgcctgcccctgccgctgccgccgccgccgtcgctgtcgtagtcgccgccgccgctgccggagaaagagcacgagcggggaagccccagagtgaaatctagcatcctgccggctggtctgcccgcccctccttccttttccccccggcccccgtcccctccccccgcaggtgccatccgccgccatccgccctctctacccccccatccccaggtgaggggggtgagttcaggaagcggagaccccgaggaacccagcagggtcaccatttgcagcgcaacatggcaggtaaaggagaaatccccctcgccccctgacaaggcaccgcttccttattcctccctccatcaccccctagcgaccgcccgcgcctcgcgcagagccacagggcgcccctcgggtttgagggagtagggtccagaggggtggggtgggggcggggagggctcccgggaggcaagtggtcacggtgagagtcactgggcttggagaacggggctggcgccgtggcgggggtgggggtggggtgtgccggcgagcttggggtgaggcgtgggtggggcggggtgggggtgcgtgcagatttgtccctcccgctcgggagcctggtggatcttctcccacctccccaccttgccccccgcctttatttttttttcctgcaggtcttcatttaatttctatttttccccctgctgcaagccttcttgggtgtatatacacatttattttgcctcgagaaggaagagcgccttataagttaaaatacagtgggggcatatgtgtattttttccccactgtagatgccaatatttttgagactggaagcctaaattttttgtttcgaaccatttcgtttccgtttcttcccttttaccgccgaagagtgcaaggcctttcatgtacagcaagttgcatgaaaataatttaaactttgcgtttagcatgttagcttttttgcagatgtccttttcccaaaagggtttggtagagttagttaaaatagttgcggagttcagagatataaatagcaaggaggagagagatttaggtagaagctttgaaggggaggggaaaggatgtagagagaaaaccagtttggaaataaatttagcaaggaataggggtgatgggggagagagaagtaatgtaattgctttgagaattctttttgtacatgttggtattgctaaatcttttccttcatgtagtagaatcagttgcagatttagattcagtttctttctccctagagccccaggacattttcaatcatttcgacctcagtacttgcacgtgaaatagaaacattccgagatgagaccagttttccgtgctgtattcattatttagataattaaaccttttgaaaaagttaacatgtcggattgacttacggtttgctataaacaagttgcttgttggccttgttgaaaaatgaaatgagattaaaattgttttgcacgagatgacattagcaaaatgaattctttgccaggtcctttggagtcaagggatgaggtgaagggaggcagaacaagcttcctttgacagtctctttagcagcattcatttcggtttcttttcctctctgtctggagccagtgatttgctggtaatgaatgcaaagaaatgggtgtagtgtttgctgtgtgtgcactttggtgataaggttcatatgaatcattactccttacccaggcagtaatgttcccgaagttttctcttcgttctatgtttcatggtagtttaaccttattaactcttctgcaggctttttgtacacttaagaaaactctttaactcttggtatttactttttttctggtaggtcttgcctgaatgtaaggcttttactgtatttgacaggaagtttgtgaacagatgtttaatgaccacagaacatgtgcctttaaatatttcgtacctggaatcttttttttctttctaatgcagtaccaagtattggggactaacctctttccaaactggtgctcttggtggtagttgtatgt

SEQ ID NO: 50318 - DNA, 816 bp, Homo sapiens
cttgtcatattttgcagagctctctcacgttccttttctattggatcctcatctgtttcttagatgagaaaccagaaacaaaagagactgactgatggtcatgcacatagtgtaaatcaaggttttctgatgaagtcagtggtgtttgacttgttcagagaagtaagtcctgacttcaagggaggagttgtgtattactcatgttgtaactacattacctgttgaatagtaaacactccagtattggatcattagttctgtgcagttgtgtaatactcaccaagttatgaaagtgctgtatacttggaaaatgttctttggttgaattccatttattcccttaggaaagttcccctaaatgctgagcactgagggtacttggtgtctggaacataaactctgcccacaaggagctcatagtttgcttgttaaacattacgcagaaagatcacatggcttttatttaatcagaagaaattgatagttcaaagtgaacatcatttacctacctgaaccaaataacttgtgatatacattaagtcctcccttaatgtataggttctgtcaataatgtaatgtcaataggttctgtgactttaagcaaagaaagcaacttataacaaaaccattttttatccataccataacaaaagatgctgagcagaaaacaaagtcaaagttttcaagaacctattgacgtgaagttaggagataaatcagttatagttcccctttgctgatacttagtagctgcatttttctactgattggttaaataattttctttagaggttgttaaatattttaacgtaagca

SEQ ID NO: 50319 - DNA, 582 bp, Homo sapiens
tgcctgttttctgttaatgatacattttgattgtctccatattgcctgcctttctcccgtctacatgcagtcagctgccagggcataccatttttactctgtaatgccttaatcttctttgcatacctgctttcacctctattcaggtttgcactctccctcatccagattgcagtaagttcctaaattattccctgcttcttcgtcctgttttgcttcaaagttaatcttaaatgcagtcccagttttgtcattttcctcataagtctacaagtggatcactgtatccactggattaggaattaagttcaaacatctcagtctagaatgtatgacctttgcccaatatggcctctgctctcagtttatttgctgctatggctaatgacccagctaaacagatactgttcttaaaaggcgttctatgctctctcactttagggtctttgtttttgctgcttccaccttggaatgcctgacaatcatcccacagttctcttaccaggatcctgctcatctctcaagtcacgcctttaacctttttgctaatttcctcttttggaaataacctatttttaaagt

SEQ ID NO: 50320 - DNA, 831 bp, Homo sapiens
tacctttttttcaactccttattcctaataaccctgaaattgtaaagttaaaatctgcattgggcattgggcataaaaatttatgactgttacattctcaccataccttttatctacctacctgcatagtacaaaacccccttttcctattgaattctttttaaaaaaattccaccagactttggggacatcatctgtatttattaggcatgggtcaagtatgctagctatttggcagttagcaggacagttttgaacaagaaaaattgttcgatggtctgcatagcttagaatatactgccaaatgttcgtgatgctggaaaaaagcttggttattttctaagcctacaaactgttttacttaccaagggttttttcaggggatagaggccacgacttttagtactaaagtttactgtgtaaatcaagggaatgttatactttgaaatgttgggattttttttacaaagaattcttcacagttttgcaaaatcacatcactactgcaatgctgctaatggattttgagttgtgggtaccatatacccgtgtaagtctacatttaacactgaaccctttgtgttgagtactctgcatacagtgtcatcataccttgagtatttacatttagtcatcatgttttcaaatagtcccgccctgccccttcccaggactgcagtgatacttacgttagagcacttgatgttatcccacaggtcaggtcttggttactttttcttcctgtctttgctttattttgttttgattatagggtagttcttcaacttcttgatattttccactacagtatttaaatctgttagtcttatc

SEQ ID NO: 50321 - DNA, 2403 bp, Homo sapiens
aagggaattatagattagtaatcttggtgtgactgtctccccaagccatgtaagaatgataaatctgattacatgaaaaccttaagcttctacagagtgaaaaaaacaaattaaaagacaagttagagactgcgagaaacatatgtcactcataaatcagaccaaggagactggacgaagacatggagatgtgaagtaggaggtgtgctcaggaacatagtttaatgtcatccacgtacaggataaacggcttcccacgtcatgtcccagaaatcgattagtcgatgggatttgggtgagtactttcttctctctgttttcctgaatttttcttttttctttcttcccctttcttctttctctttttttcagaatgatggtgtgtttgtaatcgacattttaaaaattctgtaacaattaaatttgggggcggccttcccttgtttcccgtatggagtgttgatgtttcagcagctttatttggagtttacacgtggaggcacctgggtttggggattcctttgtgtccccaagacacctattgcagaagtgagtcctaagaggtagaaaacagatgcgtgcgcagggctgggtgaagcactgtggagcctgtgtgagaggaggcacgggcgcgaacacaggagcgcacttcctcattccgtttctcctcatcctctctcccactgccactggcatcactcatcccatccggtcatcccaagtcacacgcaagagttcgttcccggcgcgcgcgtcagcctgactcgagcgtctccacgtccggggcccgcaggggagcgcccctgccccgtccggtcgcttgttgtgttgtcatcacgtggcctgggcgggccctgacgtcaggggcaggggagggacggcgcaggcgcagaaaagggggcggcggactcggcttgttgtgttgctgcctgagtgccggagacggtcctgctgctgccgcagtcctgccagctgtccgacaatgtcgtcccacctagtcgagccgccgccgcccctgcacaacaacaacaacaactgcgaggaaaatgagcagtctctgcccccgccggccggcctcaacagtgagtgcggggccgaggctctgtgaaggggatgggggaggaggagcagccccggccgccgccaccggcgcggcgcgggaggcgggaggagaaggcagctcattggctcaggcatgggatgtccaggtgactgacagctcccgtcccctgtcaagaggaggggcgcctgccttgctccgggcctctctgttgcctcctggggtcttgggcccggggccgtttgggctcgcggtccgggagcggcgcgggtagcgcggatccccctggtgcggggggtggtccccagcagcggagccgggcggggcggggcgggggcgggcctggggggcggggaggccgggtgggcggagcgggccgcggaggggacgtgggccgggatggggacgtgcggcggggacgccgggggatggacgcgcgggagcggggcggggcgggcggctgccgcgggacgtgtcggggatcaggtgtgcggggctcgcgggcgggcagcgtctggcgggcgcgggagccccccagcgagcattcctttgttgccacacgtttgtcaggaaaattcatttgctcgtctagggttggcttcagtcacgtgtggggtgagaggctgtgccttgcttctcctttttccttttttatttttttattagatttctcgaagttgcccaagtgatttttttttttttaaagcgatgggttgtgcgcccagtaaagctgagagcagcctcctgaaccacccaagattgcacacgtcagggagtctggggccatgcatttaaagaaacggaattaaaaacgcactcgggcagttgaaagttaacggacgaggctgatagacaacccaggccagggtcttttcataacattccgctgcccagacatcttgtcctcagattgttcctagtcgtgagaaccgggagccttcttggaagggttcttgcctaacctttctttaattcaactcttgggaaagaggtaatgggagcagtgagcatatggccagatgaagtcttttcaaaaccacttggatgcttaaaggtcatgcagtatctttcgtaagagggaggtgcttccagtgtggcctgaagattattttagggaagagagtttcagccctcaccaggtagcgatggagtttggagattttaagatggatgctgctgctccaggttttgatgggttaattcccaaaacctttaagtgtcatatattccagaatgtaagatggttatattatttcccacagtaaattaggatgaatgtatgagtctttaaacgttacttgtatcacatattcctatgcaattttaagttatttgcccatgtt

SEQ ID NO: 50322 - DNA, 2394 bp, Homo sapiens
atccgggagaagccacagcagcaaatgcgaagaccctcgggcttcgacgcagggacctgctgttcagagaggctggggcagagccagctaggggcagcgtggtccctggtgcagccggctcgtttttacctcgtctgtgctctgtgtttggggtgtgtcctgcggcaccgtccctgagcgctggaacgtgcgcggccccgcagggcagtgcggccggggaatgcaccgagctgcgcgcttccagcgccgtcggtctggggtttctgccattctaactcccaaggcttttctattttgggcttaaaaagatgcagagtccccttttatcggtcaggcttgtagcagaaggttcaggtccaagaggaccttttggatttagtcctttctgtcggctcccgcagtcaaaacccccttcccttaaactccgcctgcactcgagccgtctctctacaccatggaacctgcacagaggcgtccaggccagtgcacccgagccggggcagacggagaacgcccctgtgctcaccctgccctcggccttgcgtggggaagaagctctgggtctgaccctggcgagtcactgcgtctcccgacgcgcgctgctccctctgcgaaagggggaaatatcagcggcccagctgggtggttctgacccaagtggggtcacttctagggaagctgctgtggccagaaagcactgcacaagagactaagtgtagcgcgccgccctcggctaaaccacggctgtgcggaccaccctggacccgcgccccgatcttctgctttcttctgcacagggagttgtgaggttgctacacccccgggtctggattccgcacccgcagcggcccccgcacggtgaccacataccagggactcgaccgagcatctccagccacaggattccccgggggagcgtccccgagcggaggagaggagcgattggctgggagggaggtgggacgagcggttacgccggcgccaggacactgcggggcggggaccaggggacgggcggggtgcggaggaggggggaggacggagtgggacaggagaggggagaggagaaggagggaggggcggaggaggggagaagaggggactgggacggggtgacccgaatggggaggcggggcagagggtacggggtgggggaggggagagggccggtagggagtggagagggaggttgtaggggagaggaaagggggagagggacccactgcgtagggaagaaggaaagtggggtggagtgagcgaagaggggacaagggactgggtgtggagagaaaacggagctgagtggggaggagaagaaaagggagagaagctgagaggggtgagcaggaggagggagggcggggcgcctcccagcagtcgggcgcaggcctagggtcctcccctcccccagaggccaacgtccctggggcgtgattagcagctccttggggaagaggacggagcctgagctccgggcgcggaggtctgggcggggcgacccgcggcgctgctcgtggccgcggcgatggcgcggggaccggggaggtttgtccaggaggacgctggtcacaccgcgtttctgaagctttcgattcctcttcggctctgctctctgcagccgccctgccttccctctgcgcgtctgagccgagtccccggcgcccaggggcggggcggcggggtggggacactcatggaccccccagcgaggacctgctgggtgcgactacatggtcacccgaaggaccctgagagaggggcagctgtagggggtccttgaagagggtctgactgcggggtttgtgagcgtcagcgcgggggaggcttgggcctggaaagatgggggagatctggccgatagagacgtgagtgccccagaaaggggggccgaggtggtggaggcgggcgcgcggctagctggggtccaggacaggaggggcgggaggcagccgggaaggcctcaggcagggccagcgagcagcacctcctgcagcctgccaagtgcaggtacgaggccacccctgccctcacctatgtgtgacgcgtcgaggtaacctttctgagcgttgacttgtccacatatgccagtggggcaatctctgagggtgatgaacatgtgtaacatatgggaagctgtatagtggccttcccagcgtggctgcttcataaacttagtccctttccctcctggaggaaggaagtcaacccagaggcttctcactaatgggcactttcctagcacaggtaagcgtcaaatggaatcaaacagaagaggcatctcagagttcaacagaacaggtgcctggcctagctggcctccgtttgggggatgaataagaatccccttacaggccaggtgcggtgggtggctcacgcctgtaatcccaacatttt

SEQ ID NO: 50323 - DNA, 531 bp, Homo sapiens
agtgtttctctcataagcagagagaacccttctcagcctgaattccttgacttgcaagtctgtgtgggattcaggattacagatttaatgaccgaaacataatagggtctgagaggcgggatctacagcagagctgtgggcaaaactgctggaaccaggcaggtcctacctccacgacacagcatagagggtgacgtgtctgagggcacacaggctctggttaggctttgtggaattctgacctcaatgagtcactgaattgttgagattgccctggtaagtcagatcttgattcagtttctccatgggtaaattgggagcaaatatactggctgtttaacttcccttagggtaggtgtggtcttaaaatagcttctccaagttgaggcagttggtgggtgtgactgtcatttctgtgggatggaggagttgcagccttcccgtgagatcagtgccctggcatggctgaagtgacatggagaggccaggaggcagcctggcaggaagggtggcatcccccaaagggaggga

SEQ ID NO: 50324 - DNA, 557 bp, Homo sapiens
ggcgacagagtgagactctgtctcaaaaaaaataaaaaagaaaaaagaaaagaaagaaagaaagaaatattagctacaatagtattgttattgcatgggaaggtctggaatgtagtgactgttccagaccttcctcagctcaggtatctcagaggaagaattcttccttctctgagtggcctcagctatgctgcctcctggattactatcctattattcacccaaagattgcaggcagctgggcctcccgtgggacaacaatctgaggcaagggtgacaaaccaggcagaggaagtgtttgttttcctaacttcttgagcgggatccaaagacatcagttgcttagctgactcagcctctttgcattaggagaccatgagtggcacccacagggcaaacgatatagctctgtgtctgagttggtatccagtttgggatttgttatttcattcatttggttgttaaattcacacatgtgtattagatgcctgctatatgtcaggcactgctgtaggcaatgagagacaattaaaatgcaatgaattaaaaattaatta

SEQ ID NO: 50325 - DNA, 906 bp, Homo sapiens
gctccttatgacagcacaggctctttctcctgtgaagcgtctgtcacagtctcaattttatacagcatgtgccttgcatttagtgcccgctttcaccattaaattgtgagctccacgaggttggagattatatctgcttttgctcaccatttatccccaggacttaaaacactgtcagacttataacaggcactcaataaatatttgtcgaatgaattggtgactacataaatcactttgctatggggccctcgacacaggactgaccctccccatcgccttctcctgaggctggcaaaataatgcaaattgtagaaaaaaatagcctgaaaacctgagtgagtctaacacagatgaatcctattagactctgctaaaaagaatggtttttgactttctgggaaaggatccagtacaaggaaatagtgtttctttctcccagcacacggctgtgtccaaagtccagcttgtatttgacatcatccccgtttccttagagctcaagcaaagctctcggtatttcagatgccaaagtctggacacatttgtgaggtttgaatttctgcaccttacttacgtgactcacaggaggaaagtgcctggacttggcagtggcagcctcctctcccatgtggatcaggtcgccatatgatgggctcagatggggacctctgtttctcccaggagcccacagcctgtctcatccaggacagggcatgcactgggagcatgtttggaccacagaccctcctgctgagtcatctgcctccaaactttgaaacaaatccattaagggcagctttggggaacgacgtaatatttttaggtgcctgctcacttcatgcccccttctcctgagaatcccttctgcagaagggcagggctcagctagcaccatctcaggtc

SEQ ID NO: 50326 - DNA, 2479 bp, Homo sapiens
cataacagtattttagaagattgtactgtttccagaaggcagacaagtggaatgagagggataatatttaccactctttcataatgttccccctggacaaagagcagaccagtgatgccctgtggtgagtggacccctcactaggtagggagtgagcccttcctcctagtccatgttttcctccttctataaatagagggtggagtgggctggatctgtcgctaagtgtccagaagtagactagtttaaaaaccttcctggaccttacctccggatattctgttcaggatgtctgagctggggcccagggtgattctgatggaggggagtacttgggcacaccaacggaaacaagtgatctccaaggccctgccctggcttggagaccagcacgcaggggaccacgtgcacactctttgttcgccaccagagggcaggcctgaggcacgatggctgagctaggtgccctttgtccccatcagggatagaaagaccccagggaacatctgtagccacccagagaatgaggtgcagggtgggcattgcaggagttcttcaggaggtgtgtgcgctaactggggataagagaaagcccgagtcgactagattctgtgaagtgcatgcttcctctgtgccctcttgtccagcaggatttggacagatgagcttcttgtcttcctgcagggaggatgtgtcctcagaatcctagcagagcccccatgctggccggcagtctgtacagttctagccaaagcagcgtctgtttcggagggccagtcactgctgaccctcatttgtcaccactgtcactgctgctaaaaggatgcagccacaggggaaggcagtgggcaggttccgatccaatctgcagtctctgacccttcagagctacacacacaaagaaaacgatcgtcattgcctgattccatctgcagtgaagaaggcatcacttccagctcaagtgtcctagtcaatgccctttgttttggcaaagaaggattccagtaccttctctttactgccgcattcatttcaaccttctctgcaggctgtgttagaggccacagcccttggcatccaattgcagcactctgggcattggggattttctttgccacctctgggctctgttttgtcagcagtttctgctctggagttcccctactctgtgaaattctgaacattgcactaacgcagagacccagggcgccacagaagcagaaatggctactctagctccccaaaggggaacatgaaaccaagagcagcagtgggctagtcagggagggaacacgttccgggcagatgctgaggaactgagagcagcacagccgcccgaggcactggagttatgtctgcatctccccagccccacttccctgcagtttggatgatgcaaacatgtgcaaagggctggctgggtgcctccactcatacctccctccctgcattcagtcctgcttgagcccccagccttgtcaggccctctgtaaggataaggaatgagtaagacttttttgtttgtttttgagaaggaatctcgccctttcacccaagctggagtgcagtgacgcaatctcggctcactgcaacctccgtttcccaggttcaagtgattttccagcctcagcctcctgagtagctgggattacaggcgtcccctaccacgcccagctagtttttgtatttttagtagagatggggtttctccatgttggccaggatggtctcgaactcctgatctcaggtgatccgcccacttcagcctcccaggtgttgggattacaggcatgagctactgcgcctggtcaggaatgagtaagacttttgaaagagtttttcttccctgtgagctcaaaccttgaatggaagaaaaatcacactcacctagttatggtgtcggtgaggattgtattgtgtaggtggtttactgcgatgaatgggatcacacagggatgtacgaagaataatgggaggatggagtaaaggacagtttcagaaattgagaaaaaattactagagacaccttgtatgacttcgaccttcattttaggattgggtgctgtctccgtgttctaccaggcttgctgatacacagcagttttgttagtggaggcggagcttaaaatctaggcagctacagccccgcagagaataataagctgttaataataacattaggtcttcctggagtttcaggggcttggagaaggggaggctgccaagaaggaaggcccggcaaagtgatattcctgactgggtgtggtggctcacgcctgtaatcccagaactttgggaggccgaggcaggcagatcctgaggtcaggagtttgagaccagcctggccaatatggtgaaacccccatctctactaataatacaaaaagtacctgggcgtggccgggcgcggtggctcacgcctgtaatcccagcactttggggggctgaggtgggtggatcacgaggtcaggagatcgag

SEQ ID NO: 50327 - DNA, 2675 bp, Homo sapiens
tggaaggacagacattcccctaaagtggctaaggtggtgaagggcagaaagattggaagtcaggcccacagcagctcgaattattccgtatttatctagctaagctttgctgagcaggtgtgagccaattacatactctttcttcccccaccccccagcccatgattacgtagggattctatgtatccttcgacctcaagcagagaagcccgagcgctacgagggctggtccagatgttttagttattgtacctgccagggcaacctcccacgggggttggcctcggtagattcctgaggatcaactggatcagcgtttttctttcccacggaccctgaagttagagcatcccagcatggcttggacaggcaaagctaaggggtcccaggcctgctcaattgctaggaccacgaaggggccttgagtgccgtttgaagtgacaaggctctgcctgggcagtcaggacactcttgattttaactccgattcagtaggttttccccaagactcagtttccctttcctgtgggatataaactcttcctttcttgctcctccacagctcatctcctcctctccgccccacggtgcggtgtgggtcccatccactggcactgtaaaccctcaggaccccggggcgctgggatcgcagcagctgcccccgacagcgctgcaggcaccagcgaaatgcgctgcgcccccacgcacccctcagggagccgaggtgggcgtgactgtaaagcgggcgcacagagcgcagatcgcgccacatcggcctcggcgggctgcggctgctccccattcctccgccctactaagttcctcgcggccggaaggcacaaaaggatgtttcagggcggggtttcccataccccgcagccttccccggatgcctccttcccggctcggagttggaagggtttcctcagggctctcatttcctgcagcccggcgcctccacgcgggccagatcccgtctctgcagcctccccccggcccgcgcccattccccgcccccaggagccgggcccggacgctcccgggaagcagccgccctctccggggccgggcgtggccgggccctccccgccgggttcccgcccgccgccgttccagtcctcagccgcgccagggcgggggccaggcgagttcagcgccagcaacggcgggggaggagggcccgggagccctcccgggctgcgcggcgccggccggcggtgcagtcgcgcgctcgccgccagcgaagccattggctcggcgcagtcaccccacgcggggctgccgcggcggcctccgcggattggcgcgcaggcgggcagggaccggggcgcgcgcaggcgagtgcgtgcggccccgaagccccgccgtctcggggtgccgcccctccccccggccgcgacgaccacccctccattgtccccgcgtggcccaggccgcgcctggggccgccgccaaacccggtccccaccgccccggcccgaagaaagcgcgcgaaaggcgcgctcccagcgcgggcgctcgcgccgcctgccgcccccggccgttcactgccgcatttcgcgctctcgcgccgcgccccgccccaccggcctaaatttgcatatcccaggatcgcggccaatcgctgctcgtctctctcgaagcggatggcttttgcctgagaggaaagggagtggctggcggcgcatgcgccacggtggccgacttgaaccgaggcttttattgctgtagtttatttccacccccttccctcctgtttctctctctccttctctctctctctctctctctctcttttttttccgccctagctggggctgtgttggaggagaggaagaaagagagacagaggattgcattcatccgttacgttcttgaaatttcctaatagcaagaccagcgaagcggttgcacccttttcaatcttgcaaaggaaaaaaacaaaacaaaacaaaaaaaacccaagtccccttcccggcagtttttgccttaaagctgccctcttgaaattaattttttcccaggagagagatgtcttatcaggggaagaaaaatattccacgcatcacggtgagtttggtacttgggaaatctgcggtcggccagccaccttttgtagcacagaaggtctaaggaatttttaaaaaggaggggaaaggagagggaccgaactttttttttcctttctgttgctaacggaggcgatggtgatggtggtggtggttgtgggagatgcagtgatccaggattagaagtcgcatcgtttgcaaggcattaaacaggagcgcgagtgcacgaaggtagccttaggtaacgcgccagacccggtctatcttttattgtcagtgagagatgctgcagcgtcggcccgcggggtgcaagcaaatggatgccagattgaatatgcatgcctggagctcggatattgttctctgggctgcgtgctgcgaggctggactcctccagcagcgatggggagatggggacttggatcctccccgggtcttccgcccccacccaaaaagggctttctggagccttctccgggtccttggaaaaaggagcgggtttgagccctaaggcgtaatgacagcagagggatgctgaaaagggcagggtgtaccggaatggtgtggaaacgggaaggaaaaacagggacgaggtgatgagcagag

SEQ ID NO: 50328 - DNA, 615 bp, Homo sapiens
ttaaagattttctatgatttccttttcttggtagctgctaaagagaggtagcacttgctgagaatattgttttgtaactgaattttgagttaactattgccaaaagaatgtcattctttgaaatgtgttgcatattaaaagggcaatgtatggttcagcttgccaggtttaagcccattctgtataatacaggtgcatatttactgaacactcgatgccagcattccttccatcagcagcatttgcaataacgatgagtcataatgtagcatttctgtcacattctcagactttatctgctgcttgtcctttattttttagcataaatatcaccggttaaaatataagtgcatcagcaatctgtagtgcattgcatcttagaatttgctatctcagatacttattcgtgggagtttacctttttcttaacagcctagttaaaatggcatcaatggcgtattttttgtagtctttttgctatacttgctgtgatttacctcaaagataaatgcaaatataaaggacatattgaatggaaaccttgctatggttgaacccagtgtatttgtgtggtatatcccgtgacagcagactttttggtcaattgtgcttgct

SEQ ID NO: 50329 - DNA, 749 bp, Homo sapiens
gtgacgtgatctcggttcactacaacctccgcctgctgcttcaagcaattctcctgcctcagcctcccgagtagctgggattacaggcgcccaccaccatgcccagcccattttttgtattttttatagagatggggtttcaccatgttggccaggctggtctcaaactcctgacctcaggtgatccgcccatcttggcctcccaaagtgctgggattacaggcatgagccaccgtgcccggccctatcttctttatatgaaataattttcactgctttttttttttctttggagtccaaggtctaattgaaagagatggttcgtttatctaggataagctgtccctgtgtgttctgactcatcaggtgatgaataggttgccacatacaggcttacctttgtcactgaacctttccaaaatgggcttattttgaacatcacttttgaacagtgaaaatgtatccttagctcacatatcttagcacctgtttctcataggtcagttacgcgttgtgaccttactgcctctttgtttcagagcgatcgtcttctgatcaaaggaggtaaaattgttaatgatgaccagtcgttctatgcagacatatacatggaagatgggttgatcaagtaagtgtaactcatgatatacagatgtatttgaacactttccagacttcccaagtattagataccattcgcatccaaagtatcaaacttcaggaacatcagagagtgaccaacttagtat

SEQ ID NO: 50330 - DNA, 658 bp, Homo sapiens
ttagtcataatcattctagcagggcttctagatgctgaacaatgaccgatggtgccacttgatttatatgaagatactggtttagttttaaaagcaaacttacattgaacaaagtgtaggaaagagaaaggagagggctactcaagtgcctgaaggtccgagcagtgaagaacatgtttccatatgcctgccacccttaggctaaggacacggttttcctatctgtttattgaattgggtcacttgctttagttataatatatgaagggataagactgaatttcacttctcaattaactagccctcttgctctcttttgatcacacgttctggggtcagattccagctctgccagtcagtggctgcactggccaaggccacgtggttgaccaccatccagagttctgccaagagccttacctgccagaggcacgggaggtgtggctgttgcgcagcttctgtggcccaggccctctgcctggcacattttaagtaatgtgagcggattacttaatcttactgtctgttcagctgaaaactagggccaaccctggctcagagctcagggggccgttgcgaggattaaatgagagaatccatggaagatgtttagagtcgtaccagacacataggaagtgctgaataaatcagaatggtt

SEQ ID NO: 50331 - DNA, 1176 bp, Homo sapiens
aagaggctaaagttgtctagaggcaggtgtgatgtttggtctgtcctgtgtgcactgagcaccttctgtataccagtccccctgcttgcttcttccagacagaagaaaacacagatggcaattggtcatatttgaacagtgcctcttatagcttacaaataccatcttattgaacactcatgaaaaatgctgggatgtatgttatttttactgtttcaaagatgaaaaaactcaggcacagacattctaaatagttccagctcttaggaaaatgcttctttagcattgcgggagaaacagtatatttgtacaaggcaagtagttcaccctgtaaggcagcacgtgctttggaggcacctaaatactacacagtgttttatgcatgggcgtttttcttacaaaggaacatagctttatcttcctgggggtgtttatcaaaccacatctatgtagcagatgctcttcaagcatttcccatattccctcgtttacaacaccctggaaccctgagttaattattagtcccatttcatggctgaggaatctgaagctctgagagtttgaacttcttgtctaaagtcacatggtgaggaagtggtagaactgacctggaccccaggtatctggctctggtctttccaatagtgcctcttcagtgggtatcccttaaattctcaggggcaggtgctttctcctccttttatgccctttttttcagagcaaaaccacgttatcctaactgccaagcacaacccacaaaggctcttatctctccttcaaaaaaagccattccctgcctggttgatgaggtcacctggcattttgcagggcattttgcagggtagatgccagctcgggaaagccacatagataagccagtggatggcttgtgttactgcctccctgatggtttgcttttaattcaagtcgattcatttatctgagatgaaaaagggagaggctgattcacacacattgaaaagcagggaatggtgctggagaatgaggccgtgactatttggaataagatcctggagatgggcagtgctgatagagtaaatatccagggagcaggggaaggtgtgtgcactgacaacaggagttttagcatctgcccctccttgcttcaaggggctggcgggtacccgaggcggggtcggagggctgagtgatggc

SEQ ID NO: 50332 - DNA, 440 bp, Homo sapiens
tttcattttatctttcatttgactctttctcagtccctctgtcattctctctctgtgtctttctttccctgttaggaagggagccatttgacctctatggcttggtttctacttccctgcatcatgcaatccacatggatcaaggtgggctgtgggatttttttcactggcgggtgacttgctgcaagccctggaacaaattgctcaatgatgactgagtcatcttgtcccagagatgatgacttccagacggacccagcgactcctggccctggttctttggagtgctcctggggcctctgtccttaggctacacatcaaatggttgctgcctttctgtcttctcctggcaccttgaaggaattgccttttagaaataagaaagcattcacctaaaataatgtaacctactcagaatgagctttgagttgttttctagg

SEQ ID NO: 50333 - DNA, 1145 bp, Homo sapiens
atgcccactggggactttgatcctcttaagccattgttttctcaggccagtatccatgcagaaaactggatgacagccattcttattatcttaaaggaattgattgactgacttctccctaacagaagtaccccccagccatttgattgttgttttaggatctgccgctttgggtatctcttccctctgggtctgggctttagagcttagagatgtcctctcttgttaacaggacccagggcaagtctgttaatgtcttacgctcctcagctgagagtgaggggttcagacgaggtctccaagtgtcctgtgattctgtgaggtcagcagacattaagcagagttgttagacactgccgattcctcacaagcaacatggtataggcagaaaaactgaaggaatatgcccagagggagagctttggaaaagaaatgggcctcgggcagaagagtttcgtgtcaggaactcatttgaatcttgaagacagctcaggccagcaagcactgacacctcccccacacaccacgacagcttagggcaggtttctggcatttctccgggacaaccctgggactttgccctgtcccagtcctctctcatttgcacacacagaggtgtttgggctgcaatgggctcaggctcagctctggcttctgccacctgtgaggaccagggtggtgggtgtttctcagaagactgttcaagtctgtgtttaaagctgtctttctccctctcccaccaccactcactggctcagcctggcagcgcagccttatgatcgcgccccttacagcccagatcatgacttcttgggtgtcctgactggctattttatggtcagggatcctagggccctgccccatgaacctccctattcatgtgcctgtaacttcacattctcattgactctttcatttgaccttctcaataaagggactggtattattatcccaatttgggaaaataaataaacggaggcttagagagcttaagtgaccagtctaatgttacatagcgattttgcggttgagccagaattagaacccaaaattgttcaggactcttccctgccagactgcatatgcagcctcttggtcaggcttagacggggaaaatgcttcccctctcttgcaaggttgcttcc

SEQ ID NO: 50334 - DNA, 2699 bp, Homo sapiens
aaatattatagtaatttttgtctgctttactgacacttacacctctgacagcacttagtttgtgagaactggagttgggggctcattaataaatattaactgttggaggagagttcagagtttctctctacgctctctcagcttggtaagggctgattagatttaatgatacagactgggccacatttgctctcgggtggctttcctctatgttcatagagtctctctggggtgaatcctatgacctgtctgtgagaaccagttgaaagcacaagagattccggtactaaacattgataacagtgtcagcaaccttcctctgtcaatgctgtaaggccagggttgaaatttagccaagttttatgcttgttgattcctgcccctcactacttactccaatttcacttcttaaaaatgtggtcactatccaatattcttttttttttttttttttttgagatgaatctcgccctgtcctccaggctggagtgcgatggtgcgatcttggctcactgcaacctccacctcctgggttcaaatgattctcctgactcagccttcccagtatctgagattacaggcacccgccaccatgcccagctattttttttattttttattttttatttttagtagagacgaggtttcaccatgttggccgggctggtctcgagctcctgaccccatgatctgctcgcctcagcctcccgagttgcttgtgaattgcctttgttcctggtttaggtggcatgaggcattgaagctgtgctttcacttcctaagattagaactaggacactggagactgtgtcttttgattcttctttctgagaattctttcaaatagcttcaggtccacttcctgtaagcaaattaacgttttgactgtgagatttgcactggccttaacgaagtattcatgattcaattgaaagcaatttagcgattgctgtagtgagtactgacagaaatcttcaaaatgtctagccctaaactacaagagtttgtttggaatggttatctatagcatgtcaacgaatcacaacagctacttgtttcaagttctatttttgaaagcaaagtacagcagccttgaaagtcctgaactggaggaagaaaaaggaatcagaagagtcaatagaatgacatttcctggcttttctaaaaaaataataggcctcaaaaaaaattagccgggtgtggtggtgggcacctgtagtcccagctacttgggaggctgaggcaggagaatggcgtgaacccggaaggcggagcttgcagtgagccaagatcacgccactcactgcactccggcctgggcgacagagcaagactcagtctccaaaaaaaaaaaaaaaagaaagaaagaaaaagaagaaatatccatccatcattttcaatacctaggatatgaatttaatcacatggggtggcttagttctccccaaaacttgaaggaatcctcaccagcatctcctacatgtgtatttcctgtgaataaaatggtagcagcacttaagcagggaaatgaagctttgatcatgcatcggcttcagtaccagtgacagcaagaaacaacacaggtacaccccaatatttctcttgttgtctgctattggtttctgaataacagcatttagttttttttctcaatcttgaaagcctgagcagcagctctgcaatgtgaatctagctcttaaagtttttgtaagaagcaaaaagtgactatagctgatgaaatgtatttaagtgtgtagcaaactcaaatgccctctaggtggagtattcacagacactggcagaaatctctaatggggctgactttatttataagcaggcagtgcatattgaaactgatatcttggctctctgtgcatctttaggggagcaacaccagctgttctttggaaatttgcaaacaaacttgcagttgttctcagtagttcatagcaggtgaaataaaggagatatcaccaatcggatttgggggagttatgtgctttggttctgttgagcttgttggcaacccagtctcctgaaatcttgcaactagtacatttggaacatactatactattgcagcaatagtctctctttttgatgttgtaggctttctttagttgtctggtaaactctgattgcttgttcatatttaaatatgaggcaatagaaagactgacctggatcttggtgggagaggacgtggcctgctaactgggtgagagggcagggggacagtcatcacataagtgccctcaaactttgtcattgtccttacaaggctgtaggcaaggtaacttgtgtcccctagttgatgtttttcttttttttcttttgcctttccctgtcatgtatgtgtgagaggagactgtagacatctagtttctctgctgctttgtggtggggtggtgaacttgggcatacacagaccttccattaacgccctgtctcctggcctaccttttctgctttccctgcactctgagcccagtctgctgggtaggtctgtggcttccaaggttgggttcaaagccacgcatgctcagctttccttcactggccacacccctccatttgtatcctgtccttcagaggtgtattgaggtgccttatttactggtgaacttctcccgttctctccctaatgctttaaaaattggctgtaagcctattagtagcaggatggtgagtttctaagt

SEQ ID NO: 50335 - DNA, 681 bp, Homo sapiens
gatttttaaactatatactaaaaagttatagaaaaaataaaagaatatttgtcctaagaatttattgtcccaactggcacacctttgagggagcaagggcacactattaatgattacactgagacaaacctgggactgtcccctgcacccagtgatgtgtgtccactagaatcttgatggacagtcagtgcagatcatgattcatgatttcccagaacaggtcttaatcccattaaagtttatcagaaaattgtgtaagcatttttatcaggaatactgtttttctttcacaatgaactgtgaattacaccatacaaaaaggttctgtcccatgctaggcttagcataatttttctttgacattgccttttgatccttatggagtcagcttctggtgggtatctaggagtcccttctctctctggtttctcttcctctccttcttttccccatgtctctctgccctcttcctcaagtttcagatccttgctagtggtactccatcttaggatttcttaatagtattaggaataataacagcaaattcttatagagagattaacatataacaaatattgttctaaatgctatccatacacttacaagagtcttttgaagttgatactgtacgtatctcattttcgttaaggaaacttacgcacaaagaggttaaacagcttg

SEQ ID NO: 50336 - DNA, 831 bp, Homo sapiens
agtataatgattcacacacataaatatattattctgacacagaagagaatgctcccttgaatagtatagcgtgcataccaaactctcagcacgattcagattaacttttttttttaaatggaaggaaaggtaatgacatcgtcaacttagtcgaccaaataccaaacctggagaaggtggatgtggttcacaaacactgcacagttagaaattgcaccttacatggaatcttatttgtcacaacaattgttaaaggttacagaaaaaccatagcagctaaaatcagccagtcagcccacatttgcttctctggcaacatggaaatgctgtgtttgtattttaaacaaatgtaacaaggagacaagcagaaacgctgcagcaagccaggaaatgtcaccgggttcatggttaaatggcgtcagctttatttactaaagtataattttaatttcacaggcaaaatgaacctccagatttgttttccttagccccagcaagtcaagtccttcctaactgttagttgattgcaaaagtgcagcttcaagtctgtcccttttgctttcatttcccccctgccccacctctgctccatcaggtttgtaacacaagcagacactctttcatacgcttcaatgtagcgtgagctgtgacccttggatggtgtgaaagccagcctttggggatattatagtgattcagttattttctgttttttctttttgttgttgttgttgttgttggaaaaacttgttttttaaaaacatgctgcataacatcttcttgctaaaaacaatttctcaattagtaggaacactgaattgctttgtatat

SEQ ID NO: 50337 - DNA, 677 bp, Homo sapiens
ttgactttgaaacagatgaacttgaactctatccagcttgtaagctggggactctctgtgcctctctgtgtttttcatgccaagtgcagggcggggtgcaggagaggttgtttgctgctgctgatgaccagtgggtatgcaatgacccacaggctgaccgggaaaagaattatttcccaaactccctttgggacctctacgttcctgaggacattaaggtggcaatcactgccttacatgtcaccctgtggagcaaaccaagagcctcctgccctgcctatttccttggctctgctgctgccatctagggagaaacaacagaatcacatgtgcttgtctgtcagtcaatgacagaagcatagacaaatttgccctcggcccctagaacagtgacatgctgcccagccatggcagagataaggcaggagagaaagtgccaatagagctggaattataggtcagggacaaatgagtgagatatgaacgtcaagagtgtcgagaaacacagtggacctgggaaacatggaggtgtcatggaaaaaggagtcggaggctggatttggggatattcaaagaaacccttaaatctcccacctcctcttttctttatatgctaaagtgtaggtaataatctcttccttctccttctactgcacagggatgacttaagataggca

SEQ ID NO: 50338 - DNA, 2657 bp, Homo sapiens
cccgggttcaagtgattctcctgcctcagcctcctaagtagctgggactacaggctcctgccacaacgcccagctcattttttgtgtctttagtagagacggggtttcactgtgttagccaggatggtctcgatctcctgaccttgtgatccacctgcctcggccccccaaagtgctgggattacaggcgtgagccaccatgcccggcctgaagaagttttttgacttcctaaacttcaaactggaaaaccagcctcctctgactgtacctgtacaatgattttggtcctttattgggcttaattacatgctagtctccaccttgaagtcagggtctgttcctgtctggcgcctggtagactctcaatgtttcttgaataaagtaaataaaagatattttgagatcttagtccactctggggtggcttcccagaagagaaaagctgggatttattttaagaaatggaagtaatttggcggaaggaggcatatttcttccttagtgccctcaccaagcctagaaaataggagcaggtcttggggtgggatggtgggaagggtgtgtggggaggaaaggcacaaactatgtgattcccctatggctagagagaagctctcggaggcaggctaactctgccaaggtcaaggagcaaacaggaatggaagccttgaccctcggtccagcctcacaccacatgttctctataggagacacctttgtacggagctttgcactgaccttgagaaataatttccatctggaattctgggtgaatcacaggaaggcaatctgcaatttctcaagtttgcacttggctggggttgttgaatctatgttgtaacccttatgaaacactattgctcaagaacattcgaatggatgcaacatttgtaaattaaaagcctgctgctttaattcccttccaatggacacagttagacatatacagaagtcacaactggatgcagctggaggtttgactttgagaggatgggagactggaaatccctgggcatttggtcagcacagtagcagagtgctggggtttgggaaagtagcggttgggtaggagaaggtgttgcatgcaatatttttctttctggtatttgtcccgggagatccatattgacacctgaactttgtgacacagtcgagccctgctccactggcttctatacaaacaacatgatgcaaaccagctggggccaaagcagttaccatggaaaccctagactttggtttggaaagtaaaagtaaaagacatttatgatgaccacagcagtggtttgtaccaatgcacttcttgggaagtttcttttttatcctgaactttagcgttctttttttttttttcttgccctgtggaatttggcaaaagaaaaatttaaaatcagattggaattattaccttccccattaaatagctaaaacaggaagtcttgatttattcaaaccatatttgctaaagacaaatttaactctaaatggagaaaccgcttaaaggtcaagttttgtcttggatactttgaaagagttgctaagcatttttgtcccctatggaggctgggttgacaccaggaagtgttatttgtgttatttcccctcaaacatttttccacctctcagtaatgacaggagaattatggctatagagagcaaacacagccttatgtgggcatgatcacagttgtagcaagccagtcatgatagcaggaataggctggttgcatgagtgcactgggtgaagactacagaggacattaagggcaccagagggaacaggttcaatttctactctgtcacttacttgctgcatgatcctgggccagttacttaaccaccctctaccacagtttcctcaggttggaaatgagaatcaaaatgcccaactgcccccaaatgttcacatggattcaatgaaataaagcacataaagcataaactgaaatccaaatggaaagcaatcacaaaaagaatccagtggaagggaagtgggaagtagcaggcagatcacgctgacaggttggcttcaagtgaccgttccaatctcagaggaccacagtctcaaggccacctacagtttcctttaccacccactgtctgagccaccaaagcctaccccacccttgcacctcctttcttactcccttctaactgtgaaggcatcgggctttcccagatatcctttgcattcaaatcctctcaaccactgcctgcagattcccctccttctgtactcatttttcttttcttggaaaaaaacaaaaacaaaattggacccttggtggagcccttgatggcgacagcacaatctttcatccctttgctttgtcctctcaggtcctggctctgttcctcacctccacttttatttccacatcctccatgacaagcctcctgtccctaacattcagctgaaactgttcctagatcccaaactcctaccctagcacaagagaaagctggtggcattcctatttagtgacatctcttcccaactctgcatcagctttgataggtcacaaatgacctcagattactaaacgctattttttttctccttttctttccccttgacttctctgctgcatttgatattggcgccactttctcttcactaaaattctctcttctttttgttgccaggattttatgc

SEQ ID NO: 50339 - DNA, 1869 bp, Homo sapiens
tctgctgatctctaggtcaaccctgtccaacagaacattctgagaggatggaaatgttctctgcctgggctgttgaatgcagtggacattagccatatggagctatggagtacttgaaatgcagttagcctgactgcaaaactgaatttttaattttatctaatttcaatttcaatttaatttattacatgtggctagaggctaccatattggacagcatagttccagatagtttcacttaaacaccatcatttcaggcaaaatatgatcaatactaaaggttttctggaaccaactcctctcccagcctctctgtctatggacaactaatccctactgcatgcaaagctcaaaagcctcttttattaattccactctgattcctcagacgcagtctctgattcccattgacctgccttgaaatatccctgttctctccccgaccttctgtattttactgccacacccctgagcaggtcctcattcaaacctaaacagccagcctgaatctctcacttcaacacaccttgcgatcactgcagaccggatcttattctaacactgctctgcaatgttgcttccctgcctcaaacccccagtggctccccacttcctctgatttcatggccaaaacctttgtctggttttcaaaaagacacccagaataatatcatccctggtctgggtcaataatattgtcccaccaagtctggataataatattgtcccaccaagtctggttttccatgactctctctctccctctctctctttctacacacacacacacacacacacacacacacacacacacacaccactcaaggattatctcacaagctcatgaatgtgctgtgttcactcctgtcttggagcttctattggcttttcaaatccgctattggcttttcaaattctacctttcaagacccagttaaagactccttccctctatggaaacttccctaattaagacctgcctggcatatctcccctctggattcctagaccatttataatgagtgttatcttgtcctgatgactattgtttcaagtgtgctatccttttccccagattagacttgaagaaagtggctcttcttcttcctgacctccagaagacttagctcagaaccgagcccgcagcagatgctcagtgctttgtgaacatgtcttgattcatcagcaagtgcaggataagaactggatgtgacaacatctgagagctcagtgaacattagactcgccttgttaataatttactccctttgtcccctagtttcctgctcatccctctatttctcctggctcttttcagcttcaattcctctcatttgtccacttcttccctttgtccagtaaaccacatgggctgatcagggttggagtagagagtgtaggattgtctattttctcttggaactgatggccatggtgaacaccttgcttgccatatgatcaacatggctctatgaggcagttaaaactatgtagacaaaattttttttgtcagataaaatgaggataaaaatacctcctcatcaacatatagaggaactatggaattaaatgaataatgagtaatgggctaagaatataggattggatgtaccagaatcacagtgcaactgcctcatggaaaagctgggcattttcatcttaagggatgatccagaagggcaaagtttaaaacaaaggaactgattcaagtgcaatattttacattgtgtaaatatctgaaggaattcacaaacggaccacaatggctgcagagacacagtggtaaagtgcttaataaattggcgaacacgtgttgtgccataaatgttagtgcatgaagcaagttatgattatttgtttccctttgtg

SEQ ID NO: 50340 - DNA, 591 bp, Homo sapiens
aaatatcatgtcatatccccacctcccaccattgaaagctctctctatacccctccagctacaccgcatctcctagctccagtgtatagcaaaacctttcagaagagttgtctattttccctgttcccactttttttatcctttgttctttctagaaagtacacaatcaggcttttggttccatcactcctctggacctgtgagcctcacgtgccttcctcctatcactaaaaacctgcttactgccaaatctagtgttggctcccagtcctcctctaacctgacctctcagctgcatgtgacacagctgattactcctgccttcttgaaacattttcactaggcttccaggacatcacattctcctgatttttcttctccctggctactcctttgcaatcttgtttgctggctgtttctcctgtttttcctgacctgacccccagaggctctgttttttttttttttttttttagatggagcctcgctctgcacccaggctggagtgcaggcatgatctcggctcactgcaacctctgcctcccgggttcaagcgattctcctgcctcagcctcccaaatagctgggact

SEQ ID NO: 50341 - DNA, 3704 bp, Homo sapiens
catcagttggaagccactttacagtcgaaaaagtgctctaggacctaatataaatgagactggagtagaaagagaatgaaaattcacttttctacaagggagccttttctaattgccctagagctgtgctgtttgaaatgctaatccttcctcttccatcccggactgggagtctggggtaacagaagccgaggagggtgaagacccccagatgctaaagtgaggggtgttcaagacttaccaatgggcatgactaagaaaaaaggcagccagcagaggacgaagcagccgaccacgatgcccagcgttttggccgctttcttctcccgggagaacttgaggagcctcactgagaagtgcgtcttggtcttggcgctggccatcccgctgcctcctgccggggcgtttttccgatggatgcggagcgtcacttgctccgagtccgacttgtcggtcttgaggccagacttgaggccccggctctccctcttggccaccacgtagacgcggcagtacatgaccaggatgatggccagaggcaggtagaaggagcccagcgctgagaagagcacgtagcccggctcctcgttgatctggcagatggtctcgtcctcgggggccggctgcctccagccgaacaggggtccaatggatatgaccagggagagtgcccagacgcagagcagagccatgagacccctcctctgggtgacgatggttgggtagcgcagcgggtagctcacgccgatgtagcggtcgatggagatgatgcagaggcccatgatggacgcggtgcagcacagcacatccactgccgcccagatgttgcagaagaccctgccgaaggcccagtagcctaggacctcgaagatggcggagaagggcagcaccgtggaggtgagcaggaggtcggccaccgccaggttgacgatgtagtagtgcgtgactgagtgcaggtgtcggtgacaggctacggagaggatcactaggatgttacccagcaccccgaaaagaatgaggccccccaagatcaccccgagcagaatggccttggaaatgttcaccggtgccggcggttgggtgcagttggagctgtcggaagcatttcccgagagaaacaccatggtcccagccggggccgggcgaggtccggctgtccagggccacctcccgggctggcgcggaggcgggagcgcgggagccgggaatcaaaaggtctcggctggagggagccctgccaggtgggtttggctgggggtgagagcgcgcgcgcgggtgggaaacaaccctggccagccctgggaaccctcagaaggccacatgaaggggcagggcattaaagacatggccaggggcgcgcggggctgccggggaccctctccacctgccgggctggcctagcccgggacccggactccctccctacccgaagctgggtgcgaagatccaggagactccttgcaacatgcaattccagaattacgagaatctgcttttccgcgctgtcttattcgtcctggctgggggaagattcagcattctgcacatgattcggaattcaaaactccagcgccagtctctccctcaaaccaaaagatcagccgtcgacgctcaaaggcagggaccgatggttgggtagcgcagcgctacaggttgggcgctgctcctggcccgcagttacctacattttgagctgccccaccgaaggctcctgctctctccagcttctaggagcacaggtcaggggacgtaggtgtggaatatgtgctgagacccaggaggctgcggggcatcgtttgaccgcgtccacctgaaagagcgcaaagagaaaggcggctttgagctaggcgccccagggaaagaggctgtgctgagcttgacgggttgggggacaccagttgggagccgggttggttctgcggtccagaagctgcttcgcccggcagcggtggaggcgacttcggagctcatctcgcgcccccaccactgggaacctgcctagcgcactctactgagtcacctctgcccgagttcaggatccgaagcgaaaaacaaacaaaaaaacaaatccccaaaaccccaggctccagcgctcgaagtctggatttcgagcgcaggtaccacgaaattaaaatcctcgaagccccggaggggcgactgcggctggcgagtgtgtcgcacggatcctagccggggaattctggaggatgtactcggtttccgttagaacaggttgcctcgcagtcacctggagggggcggcctgggagagggaacagctgcgacccagggacctcagggccaggaccacgagcacgctcactctcacgccggtggaattcgcactcgggtgtgcagagcgcaccggtctgtccaccagccaagctggcttgagagccaggtcccgagcgaagccgggagggacccgaagacagaaagcgacccaggtctgtccacgacgcctttccaagcctcactgttggccacccgaggggctccagctgccagccgtagcgggactggcgggggacggggtggggaggacgtccctctgcagagggagctttgcaagtgacagtcactgcggattttgcaggcgtaaacattaagccggcatgccagcgggcaggggccgccttcgattttctgggctgggggccaccatctgcgtaagaaacctgggtttccacaactgcgaacctaccgcagggactcggcaggacagcgcggcgtgaggaagtgcccaccttgccttctggggttgggccctgaggtgggacctcgggcaaagactcttgttaaaatcgcaagttggagacctcacaggtggtattaaaaacgtgccactgcagaaacccttttcctcctacctcgagggtgataaacacagggttaaaaagacacttgttcagtagaaggcaacttcgcagaagatgtaagggaatcgggggtggggtagaggggccggtataaaacctggtggaaaaagcgggaggcgctgggaaaagtgggggttccgtctcaccagacggcgggggaggtctgccctcacccactcggccctgcgggacgccggccccggcgcactcacctgaagcgccgctgctgagccaccagctcgcgcgcgggggatgtggacccggcttcggtcccgggagctgcctgcctgctcttctctggaggcggagaggggaccgtgtctccgaggcaccaaatccttgtccttttgcacccgctgactcacccctccaccactgatgtctttaagctcctgaaccgctgtcactttacctgcattttttaaaaagagtcaaaataagaaaagaaaaaaaaatgcagataaccggtaactccacaatcacccttttaatattcagctccccgacaccagaaaagaatagcaaggaactttgcagctctcgctgacgtaactcaggcagtagcccagctagtaccgtaatctcctgctgctaccgtattactctacggcaacaggcacaagtgcgtatacagctgtaatgttttcctctggcctagagggggttgggttctagcgtttctttaaaaaggtttgtgtgtgtgtgtgtgtgtgtgtgcgcgcgcgcgcgcgcgtgtgtgtgtgtagagtcatttgtagtaaataacttctttaaatgagcttttaaaaataacgaaaaattgacacccttgctagatattgctgtg

SEQ ID NO: 50342 - DNA, 1561 bp, Homo sapiens
catcagcctcgttctcgtaaatagagcacatttttgctgagaatatctggtaaatttcaaatatggaagaaatcagaagtctcatgtaaaactgcataagaataatttctggttcttctgtctttcctttttaaagaaaaccagatctttattatggctcacaaagccagccattcccaggccttcaatgatataatgaaatcaagaatttgacatcttgttcatataaagaccccaaaataccaaaaaggtctcatatttccagaggctagatttaaaaatgaatccttctccagaaatatatagtatcataacaattttaggccagaaacacaaaatacatgctaaaaatgaaaaacacagtaatcaattcttaataatatactgaggggaaaaaaggcaattatcagatgttacacacttcgaggaaaaaacaaatgggaaagggtccaaggactggtttatgctttaactctctatagattttaggcatagatggaagaaattgaagcttttatgaaaacggccacagtcaacagaaaaacttgcacaatgcttatttatttgtgtaacccaaacggccccggacatcagcaggcttcaagtgcatgcaagtaaggacatgcaacatgaatgtccaaatggaatcagctccaagccttccccaaccaaggcagggcttcaccccctggcatcttcagggagacgccccgctagtgttcccatatgactggttcagctccactggtgcccgccttagccctgttgcatgcctgctgatatctcctaccgacagcgctgccttggagaacctccgcactgtaccgtttggaacaggcatttggaaagtctggtaatgatgtccaacagcaccacctccccatgctcagagctgctgatctttgaagtgcccccagtggctccggagcagaaatgaaagagttggccaggaggagacaggcagcatatgtggactttgaagccaggagtgtcaccagctctgctctgctcgcttgccgaccccaaagtagacttctctccccagccctcagagtgggcaacatcccctgccccacctccaccttcttcaccctccgaacactctgctcttttcctttgtaaaaatgatttgatgcctaattaatgatacaaactttacagcatccgtatcttaattaggcctcttccctaacacctagcacaatgcatgggagaaattaggtgtctaatgaatgtttagagaacaaatgaatgaatatttttcctggagataagtccctaaatttttacagctaaatgctttctcataacaacaattgtaaactcattctttctatgtgttggcacttctcccagtcatttatatgtttactcacatattcctcactaaactcctatggaacagatactttcattttctccatgtttacagaggagggaaatgaggaacagagaggttaagaaacttgcccatagtcatccaagtagtgagttgcagacctgcgattctgaaccccaacaatctcatttctgaattggtgctcttaacttcctattaaat

SEQ ID NO: 50343 - DNA, 1360 bp, Homo sapiens
ccacacagagcaaggcatcctgtgcaggctgggccatccctcagggaaacgtagggccacaggagttgagcattactgagacgtcaagtttttgcttctcacccctaagcctcccccataaaggccagcggagggctttctttttaaatttttgttttaactagagagtttatcaatgcttacaagatgcaaaggactattggtggtgctttcccatgtttcctcatgcaatccttgccgtcctcctatgaggcagggattgcccttgctttgtgaaaaaggagactgaagatcaggcagggtgtgcaaaagtgcctttgccacacagctaatgactttgtgttgagctgggatttgaactgaaatctaacactgaagtctacttctttttccttcaggatgcggcacgagcttcctaaaaagactggtctgggctatgtgtgtgctaccccagaggcatggaacgtggtttagtcctcggttgactggcggaatttcctttactctgaaatttgtgtaatttgattccttaggaggtttcttgactcaatgaaaagaaacgataagaaaagacagtgagtaagaaatagtggggtggaggcagagaaaggcagggaagaagaaggaagaagaaaaggaaaacacacatttatggaggtcctgctgtgtcctagatactgtgctaggctcttcacttatacgcaatccccttaaaattccccattcctgaacctttaactcctagtgtcacactaatcacccagcaatttaagaactgctagtccatggaaagtcccagatagcaacttgaaacaaacagcaactcaaagatgtttttattttttaatgccagagattaaaattcctgggaaaaccagtattctgtgcttgggcacctccttgtggtcacctgcaaagacacatccaggaatttgggaccttgaaggactattaaaacatggagggcattatactcagtgaagtaagccagaagaaggacaaatactgaatggttctgcttatatgtaaaaactaaaagattcaaactgatagaagcagagaatagagtggtgcttgccaggagctggagggaaagggaagtggagagatgttattcaatgggcaaatgtctcagttgtgcaagataaaaaagttctagcaacctgctctacaacattatgcctatggtaaacaatatggtattgcacatttcaaaatttgttaagaaggaggatctcagggttattatctcaaaaaaaaaaaaaaaagaagaagaagaagatgacaaacaaacaaaagcccagaaagagacataaggaaacttctgaaggtgatggatacatctattaccttgattgtg

SEQ ID NO: 50344 - DNA, 2239 bp, Homo sapiens
caggaggctgaggcatgagaataacttgaacctgggaggcagaggttgcggtgagctgagatcatgccactgcactccagcctcggcgacacagcgagactccgtctaaaaataaaaataataataatgtatgcaaaataacagacattgatgataagaaacaaacatcatgcacatatataaaataagttaatttaaatagtagatatgtgcgtcaccaagcctgtagcaacaatggtgaatcaatagcatattcactatcctttaatgtccctgtcttagtttgtttgctctgctataacaaaatacctgagactgggtaatttataaatgacataaatgtattttcttactgttctggaggctggggactctaagatcagggcaccagaaggttgcatgctggtgagggctgctctctgcttccaagatggtgccttgctgctgtaccctttggaggggaggaacattatgtcctcacatggaggaaggtggtagggcatgagccaaacactgcatgaatctcatttgtaaaagccttaatcccattcaagagggaggagccctcttggcctaatcacttctcgaagtccttacctttgaatattatcatgttggtgacatggattttggagagaacagctttcaaaccatagcattcttcctatggcccccaaaaattcatgtccttctcacacacagagtacattcattccattccaatggcccccaaaagtcttaactcattccagcatagaaattaaagtctaagtccaaagtgtcatctaaacatgtgagtgagactcagggtatgattcatcctgaaacaaattttcctctagctgttagcttgtaaaatcgacaagttatgtgcttccaaaacacagtggtgtttggatatttctactccagaatagatatttctactccaaaagggagaaataggcaagaagaaaggggtaacaggctcccagtaaattcaaaatcaaatagggcaaacatgaagaattgaggtttgagaataatcttgtttgaccccatgccccactttctggacacacttgggtgaatgttaggtccctgaatgtcctggtggccccacccccatatcttcgctgggcacagtccatgctgcagctctcatgggttgaagtccagtgtctgcagttcttccaggatagagttgcacactgatgactctgtaagtctgaaatcttggggatgtccccactcgcatggctctgctgggcattgccctagttggggctttctgcagtattcttaagaatctgggtggaggtagacatactgctacagctcctgtcctctgcatacctgcagagctagcaccatgtggatgccaccaaagctcactgcttgtgtcctctgaagcagcagcccaagctatacctagacccacttaagcacagatggagtagccaaggagcaccagaatggagggagcagagacttgaaatgaccttgggcagtaagtcctgaggtcccatgggcatctcccttgaaaccgttttgcctttaaggccctggcactctgaacctgtgatagttatggcagccttaaagatttccaaattgccttcagggtcattctcccattgtcttgatgaatagcacctggcttgcttctatccaaaccagtatctttatcaaacagtcacttggccacgcccttagttttctcccctaaacacattttattctatacatgatcagacagaaaattttccaaacgtttgtgttctgcttccctgttgattataaattctacctttaaatcatttctgtcttcttacattttactaccagtagttaagaaaagtcatgcagcaccctgaacactttgctgcttagaaatttcttctgccaaatgtctagttcatcattcgagttttgccatccacaacgttctaagacatagaatgattcagcaagttgtttgccactttacaacaagaatgacttttcctccagtttccaccatcttgtttctcatttctgttggagatcttatcaaaatagtcttcactgtaatggccacttagatcatctctaagactaaggctttctctacatctctcctcttcttccaagcccccagaatcatccttaatgctctgttcacagtaatccaagctttttctaacattcacttgaaaacagttccagcctgtacccattacccagctgcaaagctgcttccacatttttaggtctttgt

SEQ ID NO: 50345 - DNA, 868 bp, Homo sapiens
cagtttctatcttagtctgtttgtgcttctataacaaaacacctaagacttggtaattcataaaacacagaaatttatttctcacagttctggagactggtaagtccaagatcaaggtcctggcaggcttgatgttttgtgagggctgctctctgcttccaagatggtgccctgaatgctacatcttttagagggaaggaatgctgtgttttcacatgtgaagagtgagaatgcaaaaaagccaaatgctgcatgaagtctcttttataaggttcttaattccattcatgagagaggatccatcacggcctaatcacatcttcaaggcctcacctcttaataccatcacgttggccattaagtttcattacttgaattttggaggggacacattcaaaccctagcattcccaagccagtcttgtttctgccctgagtgcccttgctcacactgttcccttggcccagaatttttttttctctgcactctgccctgaccttcttttatctcatgtccagctggacagcatccaggattcagcccagtgtttcttcatccatgaagatttgtcaggcatttcctggcagacctcttgccattctcttggcacaatgtgcctacgtttatggtaaagtctacagcactttattgttccgaattgtccacatttctctcttcccctcctatagtgcagaaactgtactgcatgcacctctttatcttaatacctagcaaagtgactgcaccataatatgtgctccataaatgttgactacaaagtaaattatttaatctaaatcctgttttatacgtacctttagggtatattgttatcaatttctcccagtctgaacatgtggttattggg

SEQ ID NO: 50346 - DNA, 633 bp, Homo sapiens
gaccgaacataaaaaggttagcaacagcaaacattcatatttttccaaagcataggccagcgtggataacatggtaaaaccccgtctctactaaaaatacaaaaattagctgggcttggtgacatacgcctatagtcccagctactcgggaggctgagacaggaaaatcgcttcaacccaggaggcggaggttgcagtgagccaagatcacaccactgcactccagcctgggtaagagagcaagactccgtctcaaaaactaaaaaattaaaattaaaaaaataaaaaaagagaattctatcaagacttgttatctgataaagttacaggcatgactgaaagcaaggaatgaaaggatcttggctcaattgtccatgccacagttacacattacacagggtcacgttccaaagtctacagcaaaagataacacgtaggctggtaggctgtagaaaaatattctcgaagagcccttaagtagctaaaaaggagagtatgcataactagggaggagactgattttccaattcttcataggtccaaaaaagtccgtttttctttcaacaatagaacttaagttgaccaccaaagtatttggtttctatttaaaggttatatcatattttatttagt

SEQ ID NO: 50347 - DNA, 1370 bp, Homo sapiens
gaactcctggcagagattggatggattccagtgtcaatgcccttctcctttatacttgctccttctctgtccccaaacaccatcctggatgagaggggacagcccacatggtcaccagagcagctctgaatgagaagatggatacacagaagggagaccccagcagggcactttcatgcaacccacacttccaggctttccgtaattcagctgatgtccagggggcaaacagaaaagcaccaagttctcagatgacacgtggccacctactgggtgtatgcctgacctcttagtgcctctgactgcccatacgacagaatgaacaagcattttattggtcactgtaagaaatgccccaagaatgcttgcaggatgtgtcaaattccatctggactatttttgagggatgagcagataatgcatgtcccagtggcttgaacagagttgtacctggcaagggtttcggaagacaaatctagaaactctggccaagaatcaggatgaatacctcatggttgtgggggcaatgaattctgcctgaggtcctctaaccacaagcagtacaggaaggtggttctttaagtctgtgccctattgccaatcttcttcaaaatccagttgaggtcatatatttacccaaaattagctgcataagctatctaaatgccacatttatttgctttgggatgaatcatgtcagctcagaacagtggccctggttatttcatgctgatcaaaaggctctgattggcagccatgtgtcttctttgggtttaaaatcaaaaggagataaattattttttcataaatgtggttttcattctttctacaatatttactgagtatttaattatgtgccaagccctctgctagatcctaaaataaccacaggagtttttgttggtggaaaagtaaaacaggtccctggatgggtatctagagccattggagcctttggaggctctgcagatgctctgcgggcctcagcatggtcttccgcgataatgtggaccatgccataaagggagaaggagtgggaattagagtgcagaccaagaaggaaccagcgagacctacagagggaaactgggcaaaacagaacagtgtgtgattcactgggtctggggaaactggcattgtttaatcacctcttaggctcttgcttccaacagcatctagaggaagagatgatggggacctggacaagggcaactcccagagggtacccaacaggcttaggcttctaggaaataagcacctatgacaaaagcagaactctgaaggcctgaatctgaggagtccttcttagcactaacagctatgttaagaggcaagtcagagaaggaaaattaaactggaaaagtgacagc

SEQ ID NO: 50348 - DNA, 1593 bp, Homo sapiens
acaaatctcacacttttgagtttaaacatataaaaagaaactgcataaaaatgtttactagtattaactctggatggtggaattctgggtgattccttatacatatttctgaatcaacatacattatgtataaatatatggtctatattatatatggtatattatgatgtatatatggtatatggtatattttttatatatggtttatatagtatgtatatttaacaatactcatatagttaaatatatttatagaaattatatgtaaatttatatatggcatacgtaaatatatttatataaatttatatatgtatatatgtaaatatatttatgtacaccatgtacaaatacatttatatagatttaaggtatatatatgtatatatgtgcacatatacacacgtgtgtgtgtgtatatatatatatacctatatctataaaacctgcccgtctgctcttactcagtttatttccatttccaccttcttactcctctgtccggcaaagcatagcgaaagagttgaggagggttgtttttgttgcccctatggcttaggaagagttaattaactcctaattaacgcattagactaggaggagcaactgagttcagattggatgacagtgacatcatgccagtcgcgggagccaatagcagcgcccctgccgctgaagtttcttaagccccggatgccttaatgagcctcctgcacccgctgggtagtagtagttgccgttctgtacgcagccggctgagctcctcgggcgcccgtcctgcatacccggaccttctgggctgtgcctagcgagggccccttcccactctagttcctcccccagcccctctcttctggggcgtcaccagtttctctccggggaacttcgccacttgtttctcaggaggtgactgcgtcctgctaatgagtcaaggcagcgactttcctttgtccccatatttttctcttcctctctcttgggactctgctcaggggttacgcccgctctcgcttgtggtgaggcttcctcatagcctcgcaactcttaaaagaaaaccctgtgtccagggcaccaagaagcacctactaaaccaaacctaacagactggcgttttcataccgcgaccctttctcactataaatgtcacgcttctcattctagaaaacagaggagtcggagtctgggggtaggggtcaacaaccgtgcaaacagcatccaaagatatccatggcttacaatatctaaaatatgatagatttacaaatttggcatcgcactgactatagttttaggtttggctttagtcaagtgagcatttcctcctctctttaaatattctctatttttttaatttttttaaattttatgttgtttttaaattattattatacttttaagttttagggtacatgtgcacaatgtgccggttggttacatatgtatacgtgtgccatgctggtgtgctgcacccattaactcgtcatttagcattaggtatatctcctaatgccatccctcccccatccccccaccccacaacagtccccagagtgtgatgttccccttcctgtgtccatgtgttctcattgttca

SEQ ID NO: 50349 - DNA, 3533 bp, Homo sapiens
ttacatctgaattcggggtcttttgacaccactgttcaacgtatttgtatttgcatctgttacgccgccttcctttggttgcaattctgcctctattcactcctcgtaagtctttaacctgaatcttcagcccccctctaaaatgtgcccgtgccacacgactccgtatctcccgtgcagatcctggactccagagctctctaatggccttgagctctctaatggccttccctgtgcttccacccaatgtcctcaaacacggcactgacctcaccacgccgcagtgaccagcaccagtcattcaggccaaaaacctggcagccccctttcttcacctggtccagtctgtacacagtctgcctggtaatcccacctcctccaggatttctaatcgcccacttctccccacaccccctgccttacccccacacccccatcttagttcagcccctcatcaactgaactgcctggattataccacatttactgctgcaaacccagatgttttgagatctagggacagtaacaccaggagactagggtctgaggttcagctctgtcactgattagtcctgtgaccttgaacaagccccctgacctcttttttaagcctatctcacacagtgctcaggtagtagggattaaaacagagcctacatgaggtgctttattaagtaaacaagggaggttttgcacgcctatagccaacttaagaggggatagagagtaaaaagcaccaatatttgttgagccccaagtatgtaccataccctggttggggcacttctcacacaccacctccctccatcctcagggctccacactgctgcctatccagagagcaggggaagatacggattcgtgtccctagtagggggctgtatgcaacccggctgcccagaccctccaactcgtttccatgtgcatttatgttcctcctgggtccacattgttcccagactgtctgttctctgaactgttatgcaaatcccagctagtccagtatccatagaaaccagaatctcccatcttcctcagcttattccctggcaggagaatcccacccaggtgacacccacaaacaaggacaaacagcaccctagagaaggggagcttccccctgccctgggccatcagacttcagtacttattgttcagcaggtcctgaaggcatttgtcaggttctccaggcatggctgggaggaggagtgagtggcacaggccagtgtaagcagctgcattttcgttttgaaatctggaagggagatgctgtaatcccagcatctcacatcgctaacaatcatttttgtccaacccaaacagctccactgctactggaagttaagatcaccttcacagtggacatgagtcagtatttgtcatcatctttaatctcatacatacgagtacatatgtcatctctggaacataatgacatgatttcattgtgcatagtcaattactaattttatgaacattttttaaagatctcactcctctccagaataacctgtcttatgcctaaaacattatgactcattagtctttttttttttttttttgctagagtcaaaacgtgagacaaaagtttctgctcccaatcccaagttctggaatattggccggcagcagcaccctgagtcagcaatccctactgtgcacaagacataggcttttgctagtgacataaattatgaatcacaggatgctagaattggaatgacctggaaaacacatgcaaatgcccaagtttccctgtttacagaaaaatacttcaatggctatatcctgcagctatttaattagcagagccagggtaagacaacagtaaactctcaactgtgccagatcctcttctaagtgtttcacacatttgctcatttaacctcatatccaccctgtgaggtaggaactcttactatcttcattttcctcacgatgaaactaaggcacagagaggttaagtaactcccccaaggtcagacagtggttcagtcagggtttaggtccaggttgtccaatctggtatcccagcctcttaaccactagaaacctttgtaagggttctaatgaattgagattttaaaaatgcacattgaggccgggcacagtggctcatgcctgtaatcccagcactttgggaagccaaggcaggcggatcacctgaggtcagggatttgagatcagcctggcgaaaccccatctctactaaaaatacaaaaagtagccaagtgtggtggcacatgcatcccagctactcaggaggctgagacaggagaattgctcgaacctgggaggcgggggttgcagtgagctgagatcacaccattgcacttcagcctgggcgacatgtatattgaggtctcagctttaaggtttctgcttggctttttctctttgttttaaaaccttaaggtgaaatatttaaacacgaacaaaaagtaaaatctatccactgaatggactgaatgaaaacatcgtacaaacctcccccttgagagaaaaggattttagtaacatctttggggtttttgcctcttggttgggttgcttagggatgagagctagagttgtctgctctaaattataatgtattggggtgaacagaatatacccatcaacaggatatgtgctatgcataaaatatctctgggaagtttgaaaaaaactagtaatatatattgcctaccaggggggttgctgagtgtttgggcagaaaaaggagacagactgttctagtacattttgtacctttggaattcacagccatgtaaacagattatctaatcaaacaacacaaattaaagacaggctcctgcttgtcttgttgtgagtacgctgcatgcctgtacttactgctttgaatcctatttttttggttcttacaacataaccattttctcatgctactgaaagtttttcatgaacatgagttttatgcaaacgttcttgttaaaaatctgaagaaatcggaagactcccaaaacaggtaacttctatttctcaatctctcacttttctttgggatttgtcattattgggaatcacaatttatatattcagaatctcccatttctgaagaattcaccaatgtgtattaatcctatcctaggtttagaacacaatacttggcatttttaccgtcattttcctcatcgaatccccacaagtgcctgaggtagatattgtcatcttcgttctgtgtaagggagcagagggtcagaagattcaggcagcccagaaatcacagggcttgcatctggatccagaatctggactgtgggcttcatgccactttctccttaccaaaatgccaccagttggtctgtggcactttcaaaggcagctttcctgccccacagtgcacgtctctaaccatacatgcactcaacaatcatttatttatttttttattatgattttttattgagacggagtttcactcttgttgcccaggttggagtgcaatggcacaatcttggctcaccgcaacctccacctcctgggttcaagtgattctccttcctcagcct

SEQ ID NO: 50350 - DNA, 2482 bp, Homo sapiens
ccagactgccctgagtggacccaatcttcccacttggccccatcgttcgctcacctgattgtgcttggcgatggcctcataggagcgccgcatggcccagaaggccttggccttctcccgcagtgcatgctccatgttcctgcacttggcctgacatgggaatgagagagagggaggaagacaggttagggctggaggctgggcagagagggcagacacatcacatttacaactgggactccacttcaacacaagtgtaactcaactgcatttgcctaaccccatccatgccaagtgctctgggcacaaatggtaagtaaggtcctgatcctgaatcagacatccatgggataaagagccctcagacatcctgtagcccagcctggtacagactgggagatggggctgagaagaagcaagctgctctctctcatgttggtcacagcacaggccagaagagtgtcccatgtgggccaaaagctggttcatgctgggtctgaatccctgagctgtgtggacaactgcagacagtgtggtcataggttccctctgcagtttcctaaactgaatgggtctgcaatctctaatgtgaggtgactgacaatgggggtggagccagtcatttcccacggggttcagttacctcccatgaggcctcacctcaacatgcccaacatgcccctccatacccctcctgcatcctgacattctaacactgcttgtatcgcacggaatactttaatcagcaggcacaaatacttttggtttagtagtttttgtttcttaaactttaatgattgtttctgatgtccttggacaacttgaagaaccactagagtgttttaggttggattcctgcctcttgtatcttaggcctatcattttttctccctcattatccttttcgatctacattctcagaaagcttctcaagttttttcttaagaaaaataattcaaataattataaatggttatcatttattcagtacttactctgtgccagggacaacaccaattacttgagaaattatgtcatttaatcattacttctccctagtagataagtaatattattggccccatttatagatgagaaagtgaggcacagaagggaaatgaccagcccaagggcacacagctagtatgtggaaggacgtgaacctggacagctatggaggcagctgctgagacagcacccagtgatccctccctcctgtgagatgagagtgttttaagctgctaaatgtcggggtgactggatatgcagcaataaattatacagatgtgtcgcccaaagcctcattcccatctggacctgatttagatgacaaatctggactttgggctgatgctgtaaagggatgagatgtttggagagcttgggagagggccagtgcattttgcatgtgggagggacatgactccttatggggcaaaggacagattcaggcaggcagcctctaaagtggccccagtgaccctcacctcctgatactcatgctcttgtgaaatcccctcctctgtgggtgacttgtttctaaccaaaagaatgtggcaagtgatactaagtcacctctgaggttaggcgacaaaggctgtgtacaccctgccttcctctctctagcttgctcactgggatggtagccagctgcccatgtggtaatttgccctgggagtgactgctggggcaagaaactgagagtggcttctgacctacagccagtgagggactcaggctctcaggctaacagcccgtgaagacctgaatcctgccaacaactacaaatgtgagtgtaaataaggatcctgccctagctgagccttcagatgagaccacagctccatacctacagcccctcatgacagaccttgaggcagaggcacccagagctaaggcaggcccaattcctgacccacagaaactcaaagataataaatgtttgttttaaggcactaagttttgggcaatttgctaggaaatagagaactagcccattggttagaactagcccacagaaccctgactgcagcccctcatgagacaccttgaggcagaggcacccagagctaaggcaggcccaattcctgacccaaagaaactcaaagataattaatgtttgttttaaggcactaagttttggggcaatttgctaggaaatagagaactagcccatttgtcccactcagtagcccattcctttaagtctttcactacagaaaacaaaatggttactgatttcattttctgcagttctgttttattttcaactcattttgatcttttaatcttaagtgacaatatttaagatttttaaactttgttttctgtagtatatcatctctaatttgcatgagtgcccccacaaaaccactgaaatgtcattccaatgttttattttatagaatgagatttttgatacaaaatcatgtaatacagttcaaaaggaaaatttagtgatttgccaaattagttaagtgac

SEQ ID NO: 50351 - DNA, 4784 bp, Homo sapiens
tcacagggtccttatgagagggaggtagtagaactggtcaaagaagtcaaagtgacaacagatgcagaacggaatgacacacttcagagctggaagaaggggcctctgcaagctggagaaggcaaggaaataaattctccctggagcctccaaaaggaatgtagccctgcagacacctcgattttaggacttccaacctccagaaccataagagaacaaacttgtgctattttaaaccaccacatttattacgcagtaacaggaaacacaggacctgaaaatacgtttttgtgagcattaaatttgttgacgtgtgaacactgaaaagcatctagcacacagtgagcactgaaatgtgttagctgggatgattttgactttgctgttcctcacatagatagttggcaaagtaatctttctctaaaacacacatcccatcacaaactcccctgtttagaatctttcagagctccccacagcacaaaacggaaaaccccctcagtgaggcacacagcttcttacccagtcccttcttaccaagtggtggagggaatcttcccataccgctcccccacaaccacctaccttgaatcacacagaactacatcttgtctattgactgtctatgccccctgctcaaatgagaattccatgaagctaagaagaggccacagcacacaacagccatcagtacccatttgtctagtaaatgagtgatttgcaccctgcatcaggctgaccacacctggctctcattcttctcagatccatttgggactagactactcagcccctgacatcatcctgagtgtccactgacttgacaccatcattcttctgctaaaacccccagctgctgttcacagcaagggtgagccaccggcctcctggatcctcctgcacgtccctcctcattctaactacccttaaattccctcagtgcctagaaagtcaggctttcccacttctggacccttccaaatgctgctgcctctatctgaaataccctctttcacctggctaacacctcctcttccctcgggtctctgctggaagctccttgaggctggaaatggtctatcttgtctcctgcagtatccctgggaccttgcagtaccaggcatctgctggtgcatggctctctgctcttgaatcctggcttggccccagcctgggggctctgcctgggtgttctcagccctgaccccagcatctcctgatcagcacctcggccagccaaataggcatcagtcatgacctgaaccatgatccctcctttacctgggccccagacccctggctggccagcacttattccagctgtcccaaatcaggatctgtcacttctgccagtggaaacaggaaaagcattgacatggacccatgttaaacaaaaaagatgacaggagtaacagggttactcattgagacatgcgtactgacagcatccttacattccccttcaattaaactttgtcaaatgcatttggagcggaacagacttccgtatttaaaaaggtattgcaaaaaaagaaggcagggccacagagggggccagaaaccaggcacaggggactcgggcagctcctcctctccagtccatgcagcttcgggccagctacccagtgttctcccaattggggctctgactcatgcattagcaggtgatgaaataaattcaatgtttcacattctgggtaatttttaaaagtaacagaggccaggcggagtggctcacgcctgtaatcccagtagtttgggaggcagaggagggcagatcacttgaggccaggagttccagaccagcctggccaacatggtgaaaccctgcctctactagaaattaaaaaaaaaaaaaaattagccaggcgtgttggtacatgcctgtaatctcagctactcgggaggctgaggcaccagaatcgcttgaacccaggaggcggaggttgcagtgagctaagagcacgccactgcactctaacctgggcgatagaggtctcaaaaaaaaaaaaaaacaaagggaagtaacagaaaatatcagagtgccatggacatgttcagaaaacttttgtttcaactgatacatatgttctgggtcacaagggaaaatgcattgcttcctatgggctaagattaaacgttttggaaaatgctgagttaggctaacccttatcttctattcatttttccttcctatatcaaagaattctccatgttagttttgccctgtaagttgctcctgggtttatgtatagtcactagaactctagatatggagatgctgctttataaaccagaataggccagccagccagggtcagagacctctcactcagataatacaaaccgcgggatcagcttggcaagtaggtgactggtttgggggaaatcttaagactccacacccctggccaggtctgtggctcctcctccacttctaaattgagtgtgccaagctacagggctcgtgggctgcacccacatccgtgccgcttaaagggacctgggccacacccggctggcacaaggggtgcatggcctgggcccttcagaagcaagtgtcgctgtcttgggaacatcatgtaacctcatctgtcactttccgttcgcattctcttctcccagcacgggcccctgggccgaccttgaagaagcagccagccctgagaacctgggtcggagaggtggggtcctgcatgctgggagcgagacgcgggcacactgggctctggcaggcaggaggggcgggagccgcagagccaagggattccgggttccagacccggctcggccgcctcgtgcaaatcgctgctcttacccgaaagtcgtgggcagtgtccttcaccggctgcacgcggtgcccctggtgtcgggggtcggcctggcaggagcagcacagcagctccttgtcctcgaggcagaagaggctgagctgtccgcggtgcaggcggcagacacgcgagaagcggtagctggtccagcgcgcgccctcggcctcctcgcgcagcagcttctccaccaggttgttgagggtgtggttggtgcgcaggtcggcgggtgacgcgcggtctttgcacactgggcaggtgggcgacacctgcacctcccagcagcggctcacgcacccgcggcagaagttgtggccgcagcgcagagtgactgcgtcgcggaaggggtcgtagcagacggcgcagagcaactcctccttgaaggagcgggaaggcccgggggacacgtcgggactccgctccatggcacgagcagccggctcgggcgcccggaacttttgctccggcccctcccacccgcccggctgccaacgcccgcgacccgagtgctgggaatcgcccagtcccttcccctggaacgctgagagacagcggcgctggccaatcgtgcgggggggatggcgagggggagggagggggcgctcggaggagccccacccacttccggtgtgcgcgggaaatcttgggagagcggggtgggccttctgcccgcagttcccgcctcctcaggtccgggcgggtccctggccggggtagcacggaagggtctcccaggcggcgtagtagggcttccgtgttactggaaacctacttccggctgcaaatgggaaaaggagcctctaccttaaccaatccccgggaacctcaggcccgcggatgggagaaaccagagatgccaacttcctgcttccgaagtagtggctgggtcttaaagcaccgtgagtgcaatcaccacttaagtttgcagcgcctttttgaggacctatgccactcttgcattagtcgtttacttattttggccagtcttcttctggcccgccgcggtaaggagaaacaagagaggggtggcggcagaagagctccgagaaaacctgattcttgtcctgtggttgaaaaagtgaacaggtcatcatgtttcaaagtccatttactcatgagtacaatggctgtaatagctctgtttccatgaagtgtgaggataaagtgaaataaatgtggaaagtgctcatgacaaccactgttttaatgggcaagtgcccattaaaacagtgaaattgaggacttctgcaaagtttagctgagataactagagttcatgctcaattcttgccaggtacagtaggcctggatggttccttcagatcttcattcctgcttcagtttgatcactttacagcctccagatgcagaatacttttcacacgatgcactttcattccttttctattgggagacaattcacatgtgtcatgttcctgcatgtcttgagagagcagaggcactgactgcctttttccaactatcttttcaaggatgtttctgcattgaatagccctggaagacagaattcttgtctctccaaagatctggcagacttattcccaattataagagatgtgagtttcctaaacttggggcccctctcctgtaatgcaacctactgtagccttcatcacatagtcttgcaagaattagggctcagaaactggcccaatgacaatactgtgactactattattgctgttagtattatcctttgtctctgacccaggagtttcatcttttagcagtattcatgaaattttggcatgcaaacttgttagtgttgaaactcagaaaacaataccccaaaatggcctcaaaagcagaaatttttctctgccctcctatctctcagtcccccaaggatagccatagaaattagaattccttttccccaaggcaggtcatagaaaccagaacccctttttcctaaagccagtcttgaaaccttaa

SEQ ID NO: 50352 - DNA, 2261 bp, Homo sapiens
cataaagcttactttaattgctatcatttctaaaaattatagctatagaatttttcatagcatttgtacacctatcacttaatttgggcttcacaataccctgggaaacaggtagaacagataatacttatttttctacttttctagattaggaaataaaagctcagaaagatggattcgcatgtccaaagtcacaacctcttccctcttgactggatccttcctgtgagcattgaaacctgctctactggctatcatcctaaatgacaaatcagtcctctttcaacccacgaccccctccaatatcccctggtctcaattgcccttggcagtcaagctttccaggactcatcagcgcgtgccgcctctgtgtcttcactttcagtttacttatcagcccaccccacttgacctttggctcttcattcatttgctcctggtaagagcttcacttgaagtcctctgctgtctctgactcttgccttagacaagtttatccattcttgtggtttcaaatgccatcccaaaagttaatcaccagctcaaccacctttgtgatctccagttagtgaaaagataagaaaagagaacctgaaccaggatgggtcaataggacaggaaagaaaacgaggaataggaaaaaagtttgtgggactcccaggacttagagattggagattgcatggctgcagggtaaggagggagagggagagtcaaaggtgacttctcttttgttgacattcacagggagggctggaacggggcttgtttgaagagcaatatgagccagggttatagacctgagtttggggtaagagtggaacatccaaatggaagagtccagcagctgaaaggacatttgttcaaaggcctttttcattacagttttctccttcttctgatccaggtatgcatccccccaacacccccacaattagggcctcccacatggcacttggtcagcttgagatacagaagtagaagggaaatatttttcttctctaactggggtagatcattattgcaacttatgccatatggagagcatcgccatggatagtgtcttttagggatttccatggaatttgagggctcctgaggcatttctgatgggtttttttaaaaggcagtaacaggcagaaatgcatgaccttgtcacctgagttgcttgtacatgacactggacagaacctagggagacctgatggcggagttggccaccccagagagtttctcaatgtctttttcatttaaaaagctatgggtttatgattctgtgaggtagatttgggagattctttttttaaagtgctgaagaattcaacaacctctgaaaactcacctttcccagaattggtcccagcaagataagattgtagttcatttatgtggccacacaggggcagcacacacaaactctccttttcttaaacaggtcttgattgtctttgcttttagttcccactgccacctcctagtacagactctcaacaactcacccaggtatctaacttttgtgccactcagccttcatcacttcatttccaagcgcaagaatacggaggggacacccactgtcagatgccctctgaccatgtccttgccatgtagtcaattacctgcctcctcatccccacaccttccctgctaacttcagtgtacctctgtctgacttgcctctccatccctggccaagttctcccacctgaccaccttctgacctgctgaccgctgtgtagtcaccaagattacctccaaaatgctgagtgctgggaacgtgacaaatctgtgaatagcacaaatgggaaggggtgggggggctccagctgtcaaggctggcagtgcccatcaatgggttgtgagccccatgctgggcaggtgggccctagctgcagagagtctgatcttcatcggacccagagtgacatccagccaatagctatgggtagtccactaattatactttgagaaacattgacttcctagctttgttaacttatctaagtctccagtttcttttcagaaatgggaaggagtcagtgcaatcttggaaactgagtgcttcctcagcacaactccagggggcgccattctcagaaagtacattgtgaatagcatcctctagaattgtgcaacagggcagctctgggaatcagattccaatcctgcacaggacacagaataaagaagcttgggacaggggctctggagaggacattgtaggatgaggatgatgctgcgtacactccacttttttcact

SEQ ID NO: 50353 - DNA, 3521 bp, Homo sapiens
tttaaaatttttgtagagacgatgtcttgctatgttggccaggctggtgttgaacacctgggctcaagcaattctgcttcggcctcccagagtgttgggatcacaggcatgaaccaccacttcttccccctaatttgaggaattatatctgtcctcacaaagtttatagtatggtaggggaggcaatacatgaagataaagaactgtaagatatttatttaactctaagttacttaaaggtaaataatgtgccataaaagaggcacgaagtgctatgagattgcagggcagagattccttctggctatggactctgggaatgcttcctggaggagacggcatttggcaaagctctgaaaggatagacaggatacactgtgggaacttgagatggtggctgtagtcaaagaagagtataaataacagcagagagatggagaggtgtggtttgagtgactcattttgggtggaaccaagagtggcaaaaggcaatcagagttgggggtggaacggaagataaggcttggacagggaggccaatgtgtttgggagttatcctggaagtcccagacagccatggggctttattctgaaggcagtaggagctgttgaccatgctgacttcggtggaggtgcgagggtcagattctggtgtgtagagtggatgagagtgaagagagcttgaattcgcaagggagcagataagagagtgttgtaatatttcaggcctcacacatctgaataaattgcgtaactcagatactttgcggtcctgtggagcatgcaggcatcccctggaggcttctactttctctgagctgaaattggttctttgatgaatttgagagatatataacttatgagaacatccatgagaaacccaccattcctcttcacctctgtcttccatattcttgattcccagcctggccgcttccccctgggcctcccctctgctaggagtgtgttaaatgccaagcctgtctcaacctctatctggcagcaccttgaagtatcaagtcaggaatatgcacttagatccacaggccccttctccatcatgtctccggtgaccatccagatgtgatgattcccaggaccctccctccctcccttagccctcacttctaagagtctgtaagatattcccacttgaggagcttgtcttcttcaatgctgtatctcagaaattaaactcctccttttctcacgccaaaccatctctcctcctggcttctctcctcttcatggggttgttcatctcccacacactcaggtcagaaaccttgctattgcctcccctctttccacgcccccacttttttctgctcatatcttgcccatcactcaatcctgcagattctttcttcatgcctttcattccttccttcccgtttctatggcccctactctgacccaaatcatattacctaatattgcttcatatttttacccaagagcttcgtcctatctctggttcccttggaagctccccaatgcctgcaggcaaatccagcccccttaaatttaccattcagtgcctcccataatccaaccttgatctgctcttctaactaaactttccccatacccaaatgaagccccagccagcctggtgtgctccccagtctctggcaagcctctgctcaagtcctgtgttctgtttggaatgccagccccatgcacttcaccagtcctacttactcctttaaggctcagtcggtgacccacccttttggaggacatctgagctccccatggcagcttctgggcttctttgcatcctgggatctcccagaatctatttttcaacctgatgctacattcctccacagcagggagatgccttttattttgttcttcttccttataccgtcaaattccaaggatagaaaattgcatttccctgggcctgtgaaaagggatccctccctccctgcacactcatgcctggctcacacggagtgagccagacagcgcttcctcattccccgcagtgggtgtcgcaacagccagttgcaactagaataggggccacatcccgagtctcttgaattcttgccctgtggttaggatgcccttcttgcctgtcctgaaggtggagatttcctacagccgagagagagggagtcagcagtctagggcaggaactccatcatttctttattaaaccactcctaactctctctaatctctgtgagtcttgcctttcccttttctctcctcctcctactgttgagtacaactaggccaggctgaatgagaggagaaagatggggaggaggaaagaagttaggcagccttggcagagggtgcaatgctccgggaaaatgggagagatttacaaggcagagattgacagtttttagtaacttgactttgacctccagtgtacacagacatagccttggctgctggactctgagctttctggccctgggaagctcgagatttgcaaacacttgttcgacaatcacctcgtttatctgcattgtcaccagtgcagcctctgagccctctccctgtctttacttgaccctgtatagaaaaatgctttcagggccaattgcagtgactcatgcctgtaatcccagcactctgggaggccaaggcgggcagatcacctgaagttgggagtttgagaccagcctgaccaacatggagaaaccccatctgtactaaaaataaaaaattagccggatattgtggcgcaggcctgtaatcccagctaccagggaagctgaggcaggagaatggcttgaacccagtaggcggaggttgcagtgagccaagatcatgccattacactccagcctagctgggcaaaagagcaaaacactgtctcaaaaaaaaaaaaaaaaaaagagaaaagaaaaatgctttctgcacccaacactgaagactcagccccagcctgtgttcatgccctgggggtccctggaagagggcacaggagctgccctgagcctaggagccctgggctagtcactgcctccttcatatcccaccacatgctatggggtgagtcccctgggtaagcctgttcaagcctcctgttttttatttgtatgtgcaatcagggggtgtggggactttttagcaaagctttcttcaaagcagatcttaggcaagagcccaatataaaccaggcaaaaatattcctatccagggttgaagtgagaaggcgaggtacctaccaggcccttgagtcccctccatggatctcctggggtgcaggtcatctggaattctttccgggtctcaggctcgtgaggtgctcattgtgtatgtgtcatgggagctggagaatggctgtaggtgcaaatggacttggaaaagaacaatgtcaaagtcgtaagtccagcctggggcatggcaggtttatgtatgtgtgagtggcgggaggggctgtagatttgaactccctgaaagaagatatgtgtaattcttaccaaagagtaaatgcatatgtttatgaaagaaagttcattgctatcatctggctctccaaggcacctgtg

SEQ ID NO: 50354 - DNA, 617 bp, Homo sapiens
catatgcaaagataagaaggcactgaagaaatggggcctgttttggaagctgggaacatctcagggtgtctggatctagcaggagcacggtggagataaggcgagaatgctatagagacccttgatctgggtggcttagtgttggacatcattctccggtgacaggaagcaataggatagataggataggataggcagttgcaagaatttttaagcagggaagagagtcagatttttgtttgaagaggactttggccccaggccacaggagctcttgcaccaagcatggagaagccttggctgggcatgggcagacaggcatttctggggtgtggccagggctgcaggcagggctgagctggtgcagcaagtgggaggtgccagccctccaggggcatggcccaggctgccaactgctgcttgggcattgaagctgtccatgctggccgctggccagcagggctggtgaaggaagaacccacttcctgcctcttgctgctgtttgcgtatgtgcagtggggaggggggcagacagaacagacagggcttggccaggcgggtaagaaccagccagctgtcagcaagaggtgcagtgggagagacggatgaaggggata

SEQ ID NO: 50355 - DNA, 3004 bp, Homo sapiens
ccttcccaccctcctgagtctccaatgtctattattccacactctatgtccatatgtacaaattatttagctccagatttagctttttatttcttttttgtttcctttttgtttgtttatttgatatagggtcttgctctgttgcccaggctggagtgcagtggtgcaatcatagctcactacagcctcgaactcctgggctcaggtgatcctcccatcttagcctcccgagtagctgggaccacaggcatgcaccaccatgcctggctaattttttattttactttttgtacagatgggggtctcactttgttgctccagctgttcttgaactcctggcctcaagcgatgctcccactttagcctcccaaagtgctgggattacaggcatgagccaccgcagccggcctggatttggctctttaaaggaaagagcgagccctggactgggcagggtgggaaaatggccccagctctccctctgacttcagggagggaccttggatagggggcttatgggctccaggcaccttctctgtaaaattaggtcatactaagggagctggagggcccttctctttctggtatcccaggtggtctccccaggggtggtggttgtggctgaggcccactgcctgcttttctggtgctctcaatgaagtacagtcctggggtcctctgtatgtggatggactaggctgtgaagtctatccgcccccctgctccgctccacacccacacactgctcttcactgataaccccgatgatgcagacagcctccctcaggaatttttctcatcctcctagtcatcatttcagtcagccctgccccgtgtgccagacaagcacactctatgtgttcaaaggtgatgcaccgatcgtgccctgtctgatgtttactaaccaacctgactgggtctgtgggtgacaagggcaggccctgtttcccttggatcttccttttatggacacaaatcgctgacctgtctgggcaggcctgctctaatccaggtctggccctgagcctcctgtcattttgctgacccagttcatcatcctggaggcagggcttgagttgaaaagttagagcctcagggcagcaccaggagcctgcactttccggggcctccccttctctctcccctaggctgacctgtcctcccctctccacttcctgggcgtgactcacaggcaggccctatcggcatggcaggtatgtgtcatttccttatgctggtgagacccagagtttcagtgttagcacccccacactgtggctcttctagcccaatggagaagggctaagggtttctaaagtcgttgacctagggatttactgttgggatgaatttctcacctaggggaggtgttctgtttttgctgagagatgactgtggggagcagggttctctgctcctctgacactactcatcctccttcccaacacctgtgggcctttagcaaagcaacaccccacccccaccttcaccctgaccccagcagtgttttctttccccccaccaagacttccttggggccctctggccttgccaaaccccctttgtagcagcctccccttccagcagtgacaggagggacccagcctcgggagcctgtctctgagagacagatgcaggcaaagagccgttaccatgcaaaatctagaactgttcccacgtgaaatctagaacttctcccacacgaaatctagaactgctcccacacgaaatctagaactgctcccatgcgaaatctagaaccactcccatgcgaaatcttgaaccgctgggtggaaatgaggttcagtaggtgcggcagtgtcacctctctggagcatcttcccaagtctttatgacaaacagggataccctcatggccagagtcagctgggaatttttgtggaagcagctccttggatagcatcactcctgttctcgtcatggtggaaaatgactaaaaactcaggatatcccactggccctgggcaaattccctcattggagtagggactaggacaagggccagcccatcctgtcaggccagagcacttctgtggtcttcagcccagttctgagggcccctcttgaaccagcttttgggaagctttgagggagagaggggagccagagaggacgtctcgtgagaagtgtttggaggaactgaggcaggtccagggaaggcctgggagagcagaggagctgttttccactagtgaaaggtcaggaggtggaagtgagatgggttttgttctgtgcatctccatgagcaggcccaggaagttacagaaaagtagatttgggatgaatataaaggaaggttttttaataattagagctccgagcaatgggacaggttgcagaaatgttgagagagtgagtttctcatcactagaagaattcaagcaggaagtgggcaagagggagtgcccgcatggtctgggatgcagggaatggactctgactgctcttgctgctctgagcctcttgattctgatttgggtctacccctgcccttcttgcaagtcctcctttttctcatcatggacctcctccccggagccaggcagaggctcaggggctctcccatgtcctgtctgagtaggctgcatgatgactattgattggctgaagccccagaaatacctgccatgtgctgggctgtgacagtcacttggcgttcctgggacatgttcatgtgaattctcaccggtggcttcacccacccccagtcctgtgggccacgattactctcccacgtgctggagatgaggaagtgaggaaatacccagggcgctgcagggctaagattagactagggcccggccgcctgtcttgacacatgcgcacaagcagctcccccaagttaagagcctgtgtatcagctgagtcccagggcctggggctctccacacactctacatacaaacacctggcaaggagtcctcacaacagcgctgaaacagctgcatcagcgtcccgttttacagagaaagaagccagggtt

SEQ ID NO: 50356 - DNA, 680 bp, Homo sapiens
ggagaaaggagaccggctgcccaagcctgatctctgtccaccggtcctttataccctcatgacccgctgctgggactacgaccccagtgaccggccccgcttcaccgagctggtgtgcagcctcaggtgagcatggagtgtgggctgtgggctgggggcccacccggctgcaccagggagcaagaccagcacacagagaggtttgcaccacatctccctaaagaagacgggccagggtcaaggacaggaggctgaagccaggttcactgtcagatatgagctcagagataaggcagccgtggggaagcctgactcatctgggcatctgtcaacacagagcacagagccttgttcaaaggatgtgctcagaaaatattttctaggttagactcaaaagcctgagccagactctcatcgaagtgcctgtgctctttgtgatgttgaggcatcctacctgctttcctctcgccttgtctctcgactttgatctttcctcccagatagcaaggaagggagtgatctttgacctgttttcaagactatgacccaggggccacctctcccttctgaatgggggataagggacctgagggcccgtcggtgcccaggagccatgattccctaggtctggggaggtcactggggaagaaggtcatctgtttcagaggttcagggtcccc

SEQ ID NO: 50357 - DNA, 735 bp, Homo sapiens
acagcatgtgccctcctgagggaggacctggggcacagtccaggaacaagctaattgggagtccaggcacaggatgctgtgttgtcaacaaaccaagcatcagggggaagaagcagagagatgcggccaagataggaccttgggccaaatccgctctcttcctgcccctctttctctttcttcctttactttcccttgcttttccctcttttcttactcctcctctttctctccccaacccccattctcatctgcacccttcttttctcatgtgtttgcataaacattcttttaacttctttctatttgacttgtggttgaattaaaattgtcccatttgctttgcggtttgttttgtttgtttgacctgccctttgggggataatggggactgtgagccaagtcctggaagaaacctattgtgttcatgttggacagagatcaagggctatccagcgctggtcatcagccaaggaggtttgaatggtgatatccggcagtgggtcaggggtgtgcgctggcccttttgcccttgcagggacagtggggggcaactttccaggagggacccagagcagtcccctccatggccacatgaggaatgccatgtcatttctctcttagtgggcccccaaaccacccaggctctggaggggcttgggtgacactggcgatgttgaagtgcagctggcaaggagggggtcgcacagttgagtcagcagtaggtgcagcttt

SEQ ID NO: 50358 - DNA, 1356 bp, Homo sapiens
ttgccgcattgaaaaaaagacaaaacttcaagtggtttgtaggtttagaaaactgccagaggtagctttactttgaactccatgagtatctacagtagagagaagcagcagtgtaaagtcctccctcccaacccctagtggttaaacagattttataaaatagggtttgacaatcaaggactagcaggaagttgcagaaggcacaggaatggcagaaaacccaaaataaaccttaatgaggtcagtgtacattcattatgaatttagtgattgaaatcaggtgtaatttataaattttcactactacattagccatcttttatgattcatgctatcacctaaaacatatttcataaatattaaaattagaagacataggggttaggatttacatttcaaaaagccacccagttcccatagccctgctgggtaagcccttatctctctgtaccttagtagcagaaaacacaggagaagcacgaccatgaaaaagggcaaagtgcagtgaaatgcaattgagacctttaatctttgcctaagcaattcagccagaaagctctgtaactcacaaggcattataaaaatattccacaccagagctatttacaagttaactgctcctgaataaataaaagtccatgtgatagcttcatggctttctcttaaccaaagaggaaagtaaaactcatatttctatgtttttaaatttttcttctcaaaagggggctttatgaaatctagttctgtaggtatgtcgttcctctacactttactgcttgtataaatatacttacgtattcataagcaatactgtgctagatgcagaattcagatgcaggcaacagaaatcactgtagttattttaaatagaaacagaagaaagggatttaagatgagagactgcaagcctacacaatctttgaacggaatggaggagtgagctccagactgagcctttaggaaggactcccagaaaacaccaccatagaactagaagctgctatctctgcctcaatcagcaggccaccgctagaaacacgaacatatggtttggctgggagccaaggatctggaagcaactccgtggtctcgggactgagccactgagtcaatggggatgccagtttgtaagatagggaacacactaggaggaacaggcgtgggaagtagaaatgcagagagagttctgttttagccatgataaatttgagatgcctgttagacactcaagagaagatgttcagtaagaagttggatattgacgttgagtaagatgttgagtaagaagttggcaagtctggagcccaaaggaaactctaagttggagatttaatttctttcttttttttttttgga

SEQ ID NO: 50359 - DNA, 2650 bp, Homo sapiens
caggtgtgtgccaccatgcccaatctggagatttaacaggtttcatactatataggtcaggctgcaattttctttctattttttaaaattcaattatacctttgagatcaactaacttcatgagaaactagcttgctgtactcccttctctgcctatctttcagtcttcaaatccagagtaatccagtttctaccataaagggcccacaaaaagtgttctgaaacatccggtgtcatccaagtccaaaattggacagcttttttttcagttcttcctgtaacatttggcagtgttggccactctctgcttctttggcaagaatctcagaaaacactaataactgctccaggcaggagcctggaagaggttaccaagctagagaaggaagcaacagcatagcttgctaagggcaaacagcccagaggaaacccacggctctggtcaatcctgttgttgattgctagatccagagactgttgtagacctcccagttacagtgaggtatctgacaacccctcacaaggttcttgaagctccgtggtggagggtatcttggataaatccacagagacacattcaagagtaaattctccactgttggagacctcactcactctgtttggtctccaccaaagacacggtttttaattcatggagctgcactacaacagctcaagaactcccagccaaagttttagtttttctaggaacataaacgagccaatagtgtggaaatcggtgattaaaaacaaacctcgcacattttaagacagaattattacaagtagcatgtacaaaaggaaaataatagcctacatttagttcttctaagcttcattccacaagagattgaaatcgaagtattctgggctggcacacgatagctggaacatcatattttattctagaaacacatttgccttggcaaagaagagcgtgcctagaggagtggtcaggatagtgagggatctgtgatccttcgttctgaatctagaaaagtcactggatatgcccctcccccgccccccaacacggtcttatgttctgaatgtagaagtcactggatgtgctgacacacacacacacacacacacacacacacacacacacacacacacacacacacagagtctgtggcctctttcccaggcattccaagtccagcaagttcgcagggagctgtcagtccgtccaggaaggcccgggcctgggtttgcctcttcaagcagctactgcaggggcgtggggagggggcataagagactttggactttcctttgagacagtagaaagcgttacatccagaggcgagattctagcctggggtccccgccttcccggcctcctcttcctctccctctgactccctttcctgtgcccctccccctgcctctttcccggccagagtccagccttaacccgggcagagggcggagtcccgttaagggggtgtggggaggaggcggggccagggcaggggcggggcagagccgggccaagctgggcgggtcatgcgccctggccttcgcgcatctcccaggttagctgcgtgtccgggtgctaggctgcagacccgccgccatgacgctgcgcgcggccgtcttcgaccttgacggggtgctggcgctgccagcggtgttcggcgtcctcggccgcacggaggaggccctggcgctgcccaggtaagggggcccagcgccgccgccgcagtgggtcggggcctcaggaggcagaccgcgctgggcttgcagcccagctttcagattgctcctgtgccggagccctgcgaatcatgcgaatcatgaaactgaagacctggccctgaagtcccagtgcatatgaggagatccgttgtctttctaaatgttcataattaaacgttgccaaggtctccaaaattgctttctgtgaacttttccaaaagggagaggagttactcatggagctttgtgcttctgctgcctcctgtctaatggggtggcgcttaaagatgcgagccgagattcaggagagaagaaagttctctccccaggtgtgggttgcatgcttacttgtgtaatagcaaactgcagcaaccgcccaaagccacatcactgggaaatggtagatggggtgtgcagagtgagagctcagggacttgggaaaacacctgttctactacatgaaaaaaccaccccaccagaatctgaagctatttatacaatatggtttcagctatggaaaaaaggtacatgcagaaaagtgcctgaaagaaataggccaaagtacatcaaatgagattaggaataatgtaatgattttctttctctctctcttttttttgtgttttttttttttgtagtttccaacttctaaatttataaacaatgtattattcccacattcagaaaggagagaagtatacttatttataaagtgaaaaagaaggccaggcatggaagccattgttcatatcctccttttacatatgaggaaactgaggcacagaaagaaaccagctgtccaaatcacatagctgttaaagagcagagccagaaatccaaccccagtagtccatgtccggagcctttgcttttaatatagtaaggaagatgagatggcaagtagcttgagggaaaggcatgtaatctctgtgctttgggaagctaa

SEQ ID NO: 50360 - DNA, 2596 bp, Homo sapiens
tttaaatgtaccacgtgttctttgtatgccaggcctgcactgggtgtgtcattccttttaatttttgcagcatccctagaaagtgacacattgcccttactttacagatgaggaaactgaggctcagagaggtatctccagagggtctgtgatgagcagccaggatgggatcataggactcactggctccagctgagccctaggctgggctgtagtgttttctcccaagccaggcagcccgacagagtccacaccagcagcagagcctgggggacccactggagttcatggcatttctgggtgtggccaagattgttccgctttaggtctgaaccaggaatcaagggacaagtcggcctctttcctccagaggatcggcctctccccaggggagggggactacaggtggcactagagggaccccactaaacaaaccatgaggaagactaactgcctgaaaggtgctgggaagtgaaacacaagaagccacgtattggatctgggcagggaagggccaaagagcagtgagggagaccagcccaaaggccttgctctgtctgggttacagatttggggtgagaatggaaagggccccgcaggctttctctctgtggcctcagctccaacacagctgacagctttatgtgcctgtgtctgtagagccggagctgagccagggagcttcccaataaattaaactctaaatcacacctgccaccttccggcgaacagccagaagctccaagagagctccagggcctctgagctcagcccacgtggctctccggcttagcagcttcagcaaactgtccctggggagtgagccagggccagagacacactcagcgcctgtggttagaataaccctgtgccctggggcctgtggaagctctgccatggccaggctggtccccaagacaccacagagcatctgcctagaaagaggcaagtgcccctccccagtgtgtactctgcatatacccagacctgatgcccagaaactctggctccttgggacagtggaagatgcccaggctgtggattcaagtggacttagcctctgatcctcgcccctcacttacctgctgtgtgactctaggtaaatcgctctgcctctctgagctgtggtttgcccatatataaagtaaagctggtagcaacaattggggttgggaggattcagcgtctagtccgcatgaagggtgctcaccagatgtgccctcccttctcactatgataaacaaagattcttcattctccatacaagacccccacctctggtgtcatctgaaaccccacaggaggtgccctgggcatctggtttatggcccacagtgagatggcaaggatgggacagtgggacaggcttgtggggtgggagggggcgaacgacctctccagtgaatccagaggaggggctgggcactggcgatgcaggcccagtagaggcagcagcgcattcacacgttaaccaagccacagaggccaccagctccagtcccagccctattatgcaaggtcgtcagtggctccaggagaggcaggagctgcgatgggaggggattagcaccagctccactcagaaggcctgagctggcctttgtccctctggactcctccagggcccagagcagacaggagctgagttcatgaatgggatggctggacgggcctcctcccaatcgtccctccactcaaccatccccacaacaagccactggactttgtcccctctgtcccctgcccctagagttcttggctgcagatctgaggctggccttctctgaggctgccttttagcctctctgttcacggcctcagctctccgcccttaatatgcagaagatgtcacattttcaaggacacagccgtgaactgttcacttccctggatgatcctcgccatgtttcccatgtccctgttccccaagtgcatgtacaatagtgcgagagcctggacttctgggcttcagccagacctggctgggatcgatgccctagtgactccatccatcaaaaatgcagctacaaatgctaggtctgacattgcactggcattgagaatgctgactttatggtcttggcttttcaaaatatctataatgaacatttagttcttttataaagggggtaaggggagaagagctttagtgtgtgtgtgtaggtgtagatttggatggtcgtgccttggtgagttccttcctggcccaagaagcgtggagccctccctttgcaattactggggcagttctgccatcatttctaaggataagaatctgtgaccagagaccccaacccagaacactggtccccattggccactcaaccccattgatcccagccaggtctggctgacacccagaagtccaggctctcaacccttacaacaatcaaggcttcccaaggtgtggaaggaggtgaattagcacagtctgtaaggaaattaatctggcaagaagcagctgaagttaaaactctactttccctttgctccaacaatctggaaaggctttgagactaagacattcgctatagtgcagcgtgtggtggcacgacactgaaaacatcccacatagacaccgagagaaaaatggtgg

SEQ ID NO: 50361 - DNA, 2097 bp, Homo sapiens
tgattccaccacagcactccagcctggacaacagggcaataactcatctctatttaaaaacaaacaaacaaacaaaaatgcctcgtgttctctaagcatgtgggctggtgatgggcacaggtttcaacgtggaaaacaaacaccttcctttgacagtgtcagtgcatctctgtggttttatactcatgtggtcatttgtaaatatgttgaagtcttcttatgaatatgaggctggagtaagtgtccccctgtcaccccctcctcatgatgaaccttaaggatggggctagtctttataggattgggcacctgagcaggactaggggtgaaggtggggtcctgggagaatgtctggcaccagctcaatgtcatggtctttgttcctctgggtgctggtggcaacaaatgaggataggcaggtagtattgctgtacctctccctgtcccctttcctaccctgaggaagtccccaccctgccttgggctggaccagagctagctagtggcagctgttggacctccagtgagctagccctcagcgtggcattgtgggggccagggcaagaggagctgtccacactgtgatgtggccccggccaacactgagagatgccatcatctaggaggattatgaccaaggggctgggcttacaggttaaccagatcagcgtaggagaagagcaaacaaagagttcattattaaccttgtaaatgtgtcccccaggcctggccttcgctgctatcacatcggctgacttagtaatcattggttctataataaaccgtggagacccaagtcctctttgcattgtctctagaactactggatacttcctgggtttgccactatcctattttctagtggggccctgtgatccccagagacagacccgtgttcattcttagcttcagcacttaccagtggcacaactgcaaaaaagtggtccctgttattcccacagcccagcctctctcggggtgacctcgccctgggatgcgtcatgtctcagcctcacgcttcattgtggataacagctcctggaaccggtttattgtggaggctcagctcatttgaagacacaaacgtgaaccttttattcattctaaccagtgttccatcacctggtaacatctcaagcagactctattacttccagataaatccacagttaaaagaacaagtggtttgcttgagaatgtcaggcattttcacatcaaagcactttgcctcccactctgctgccacctattctataccagagctctgctctgcacacctgggtggcttcctggctcccacccctttcctactctgggccacttcacagtgagggatgggcaaccctgaagtcccttcagcaggctccgtgggccacaaaggcttggggtggctgctcccccattctggccttcctagccccaagacacttatctgatgcaggctattctgggaagtctttgtaatgtggggaaagtaactcctgccttggaaataattattgaaacctagtgagattacatgaagtaattggcccaaggccactgtttacagttgtacaagccatgcactgcacaactccagcaccgtttcaccttgtacccatgagagattgtatcttattacaattttctggcagatgacagttgagtgtcaacagaggggctcagcagggttggtgctgcctccctttccagacagatgtcaaatccctctcttctcagcacatcaagccctgctccccctttgccacaagagtcctagaagccagacactaagggctcagggtccgcagtcccccaggcagaattagcctcatctcatccccacaccttggtgacatcatgtgctgactcagtcttcccagtgcctcatgttggaacctctgtcagggatggagagacatctaaggacccccaaccccaggccactgtgcagaggggtaaggaggtgcagagaaggggtctcaggaagctttagagccagctttaggatctgtctttcagggtgctagtatttaagagtgtaaaaaaaaaatccaaaacactggatataaaggcctggcacggtggctcacgcctataatcccagcactttgg

SEQ ID NO: 50362 - DNA, 589 bp, Homo sapiens
cattaagtgaatcacactgactttactctgaatttccttgacagccatgctaaaatacttaccttggacataagctaagctttaagtttgttgtttataacttcaaagagagacaagggacagtgacttaagaatattctaagctataaatttacatgtggactttgctacacacctgggatgcagccagatgagttttgttccattgcagtacatctgatgaccagaattctatcagagaatgttaatgaacgaaaagcctgagctttaagactgagattggtaccacgggtagtcatggccacctgctggcagcgtagggtactgcagcccagctatggttcagactaaaagccgagaaacgcctgtggtccagggaaaggtatgaagatcatataaaccggcggtggacaggaaatgccacagtcaagaagatgcccctgggatgctgagctcttacaactcgaaatcaacagcttttacaaataaaaccgctgcaaaagcaatagctcttacaaataaaactgataatttggacttctgggcaccaaatgttttcataacgaaaacatcaattatgcattataat

SEQ ID NO: 50363 - DNA, 1019 bp, Homo sapiens
caggagttcaagaccagcctggccaacatagtgaaatgctgtctctactaaaaatacaaaaattagctgggtgtggtggtgcacacctgcactcccagctacttgggaggctgaggcaggagaatcacttgaacccaggaggcggaggtcgcagtgagccgagatagagccactgtacgccagctataatcaatgactgataagactggcgctggctgcactctcaactgtaatcaatgactgttaagattggcgccagacctgagcccagcctgggcaacagagtaaaaatcagcataagaggtccaatctgggcacaggcatctggacatcttttctcagaccctaacatgactttcttgtggtgaggtaccatgtaattgatgccactctatgatattttttatagaaaaagccccaaggcctggttgtgcactcatctacagcaacttatacttcagcctgttaaagcacaactgtttattttgcagtggcttctaaaattataggagtgaggctaggaatgtttaactagaccctggcggcctgccatggcaaactcaaactaagcattaagtaagagcaaagccaccagatcgataagctgttgacaaggggaaacaattaactctttgtgagtatgaactgctgtgtaccaggaactagtccaaatactgtcacagctgttatctctaagtggaaagaagttaacccataaccagagctggtgaaacggagggggacagttaaagggaaatattccctttgcctaggggaccaaccaaccgaccaaagggactattgcttggatgcccaggtactgagacccgtgacttctgtggccagaggctgcgaggggccccaggagagaacacagcgccctaggattgaagcccagctcgcccatgtcggggtcaatcttggataagttattaacctttctgtggctcagtttcctcagagggtcattctgaggaaatgaggaaatgtatgtcgagtgtttagaacagtgcctggcc

SEQ ID NO: 50364 - DNA, 7644 bp, Homo sapiens
gggagctgggctaaggggcctgggaggggaagagctgaatgaaatgcaacagccgaaagtgcttgggaaatgcctgcaaatgccggcagtctgatgcacgcagagcctgaaccaggggcctcggagctgaggctcagagtgggcccagacacaggcacccagacccagtgcacaagataaaaacggtctgtaacactggggcctgatagagaggcactgagcagaattagctaccctgccctctgacctcatcaccctgtggccagaggaacatcatgcttggtctactcaccctggagctcattgtctgagaccgtctggtcccccaggacctgcccactctcccaggtcagcagcagccccacaaacagcagcagagtcttcatcatgcctccaattctggagtctttgcacgcctctgcagagaacaggagaccatcatgggaacagctagacagcctgctggcgtcccgcccacctgctgcctgcagcagctccccagggcctcactgccctcagctgtccccacagcaggcactgctgcacttttattcctgaggaaatggggggaaatgaccagacttgccatggacacctcgaatgaaagcgaaggcaggaggtgcagggagggagggactgcaggacagcaatgttgagtggaagaaacaagaaccctggcatcggaggaaccaggctcttgtccaagccacatcctccccgacaatcagcgaggcacacaggctttctgcatcctggcctccttgtccagagtggtatcgatcatgtcagacactgaaaataccccccttaggtcatgcatccgtccctccccatgccacctccacagagggactgcatcccagagaccagccacgtcctctgcaatgtgcacctaaaccttcaccccagcagacgctccccattcaccacagcgctgcagcccccagggagtctcagcaccacctgaacttgactttcaagagccggaggcaacagcagccagcccttcacaccgaatccatctgcatccctagtgggagacttgggccgggctgcctgtgcattcaggggtggaagtagtggaagccaggaaggacaattcccttcggagagtagagagggttcgcagtggcccgaggagcaggcttcccagagaaagtccctttggaaggatgagtcctcttgctctgccaggccctccacactgcccatcccctctaagccgacagcaggctgccctgccagtgttcctgccaccactgggctggctgccctgagccacggggcacaggccatagccccggtcttacacaatggaccctttcccagaagctgaggctgttgcataaaacagaaacccctccccctgcactccacccccaccatgcccctcccaagaactgcttatctgagctcacccatttgccatcacagaaccaacaggacgatggggttccccttcctgaaatggttcacatccaaagcccgctcagcccagcaggcccatctggacactcagtagcacattaacaaggagtgcctctcatgagaagtaatcaggcgcaaagagccagggagcagcgtgggagaagagatggggtcagcgccttccccagagatggggtagggggcggagaccgggctcaccaggaaggctgtggtctcacgggctctgccccagctgcccactgagccctgaaatgcctccagcaggaacagagcctttgtcatgccagagagacaaagccagccagaaacacctctctgccaggggcccctgaaagcaacaacttctggaaaaacccattcagaactaggttctgaccagaagacagggtgctgggccatgaagaatggggcagccaaaggcaagatacaggaaaggaattccagactcagcagcgggcacagagtctgctccagggagcctggggtccctggtgaaccatccagctcagacctgggaaggaggtcgttctctcacccaacctctctaccctagcggtgaggctgaagcccagagagggcatgggactccctagagtccacagcatgctcatggtaaccctgggatgagagcccagccctcccgacccctagtccagtattctttccttgattccaagtcacttaaatatctgagcctcagtttcttcatctgtaaaatggatctaatccagacctcagagaggggaatgtgttctgtaaacacgagggtcttatgtaatcatagtaaattctgactacttccaaattagactgaggtctgaggctgggcattggcagtgtctaatcaacatgtctggagaggggcaggaaaaccgagacaagcacacagaggccacctgtggtcccccggactgtgtggctctgctttgctgaaatgattgaccactttttaaagtacttatgaatcactgcagggctggttataatgttggttctgagactgcttttccagccagtctgcaggtgatatggatgctgctgatccaaggaatgttctagaaccgtgactgcacagccgacctcctttcctttgctcggactcacctcccccctcatctcctctgcctcctgggagcctggctgccagctgccctgggtggaagagccatgccaaggccaaggccctcgagtccccagcactaccacacagcctcattctccctaagaaggcttaaaccacttggccttgctccttctaccagaaaaggccggttctgtggacaaaggggctgctcaggggaagaggaggaggagaagatggcggggggtggggggcagggggggcggggggagcaggcagactttgggagcaactcccctccaggcacaccctcctgggaactttgaactgagcagcttcccaaaacgtttccaagcagggcagggctggaggcttaagaaaatcaatgacctggcagggcgcattgattcacacctgtcaccccagcactttgggaggccaagacaggcggattacttgagatcaggagttcgagaccagcctggccaaggtggtgaaaccatgtctctactaaaaatacaaaaattagccggatgtagcagcatgcgcctgtagtcccagctactcagaggctgaggcatgagaactgcttgaacccggatggcggaggttgcagtgagccgagatggcgctactctactccagcctgggcaacagagtgagacttggtctcaggaaaaaaaaaaaaaaagagagaaaagaaagaaagaaaatcaatgactgtgaacagggagccgtggggaggatgggaagacagtgaagagggcacacagatggtgagggtttcaatcccaaagccccggctcctatctgcttcttcaaatggagaaaactaaaccaaaaggaaaataagaaaaataatcaccggtaattcatatcacccagaggcaaaggttagcactgtggtatatttccttctgtcttccatgcagtttatacaagattcttcacattcaccatcttcaaatattctttaagggcatacttttatggctatgtaatactccacttactcacggacctaagtttattttaccattctcacaagattggccatttcagttgtgcccaatgctccactattattataacttaacattttcatgggcatctttttttatatagtatctgtactttcctttaaattcctaacctctccgtttaaaaaataataataaaaatcatattttttttaactaggtccagaaattctggaaggtcaagaggctttggctcgaatcccaattctgatacttatttgctgtttagtgttggcaccagtcctaaacctctccaggcctcagattatcatctgtaaaatgagactgtggaatcagaggtctgaggcctggtggatcttgtgtgacttttctctgatgcacctcagatgcattaggaggcagaaaaagtcggatttcggtggttgcagcatatactgaaatccgcagcctcatacttacaggcaacagtgtccagagagctagagaatttagaagaaaactagatgactcatgcatgcaagccgaaagccacaactgagagatccgcatcttcgcagaggatatgctgcaggaaggagctcggtgcaggccagctctgtcacctgctagcctgggtctcccgcaacgcggcaggtctccaggtctcagtttccccatctttgcgaaaggatgatcattatatctgttctatttacccccccaccacagaattgtggttggagctcgtgctctcaggcggcggttgcgccggggcccctggctcagctgcctggtgatggggctccggccacctcccctccctggcttcctgggctccgtcgaaagcgcaggggttgtgactgcgagctgtgtcatccctctctgcctggctgccatcccctgcccgcccatccgtcctggtgtggctctgctcaagggtagggaagacggggacatctcaccggtcagcggcaccctgtgcccgcgcgctcctcctggcgacgccgcgttgtgggcactgggaggcgccgtatttatagcgctctgctcgcgcacacaccccctttggggctggctgcaaacctgcatgactcacgcccaaagaatgccgcggaaagcaaggggagctttctggaagccgggaggtgggggccggtgcagcaccgggctgggggcgccggggggcgcatcatcaccacgaatagctgtgctggctccaggagagaccctgaggtgcggccgctcggcgcttccagtagggaagagcctgaactcgcgtgcccatctgggagcccctctcacgcggttagcccggctgtctgtcccagtccaagacacaatctcacagttccctggccctactgaccttaaccttcacattacacaagcgccacttctcttgacccatttaaatagtaaagagtcagacataatgagggtgggatggagaggggccttgtgctggagaagagagcacaggaagtattgaaacgcctactcctggaaacatcacactgatgggggtccctggactgacccgccaggcctggaggaaacagaattgtgtttaggagtgatcagagcagatatgtggagagccagaaggcctctccggggtccttgatccacagagcttaagcaatcactgtccccatctttttggaacccaaccaagcagggtgggcttcatggctgtgggacccttgcagatccacgtttggtttaatgggctactgtgacggtcttgaaattcttcatagtttttgaaccagtggacctgaatttttattttgccctgagccttcccagttaggaaatcagatctgtgtccagaggggtttgctggtctccaactgctggagttccttctgctgagagcagggagaatctcctgtcgcagccacccctccccctggcaaggaggggcaaatctaggaaccctggaggtgcagctacttcttggggaagaaagtgagctgcccattttggagccagggatgtttaagccccaggagagaagtcaaggggctgacagctggggcaatgggtggacagggcgggtacaggcagccccactgtgggtggcagactttgaaaaccatgtgaaacaaaggggcttaaaggagagctgcgtggtcaggggctgagttttccagttcaggatcaggactatggaggcacaacatggaggcccagtcccttgcttgcccaacgtccaggggccactaggaccccagtccttttcaggaggcagcctcggggaatcttcaaggcccatgactaagtgggagaacccagaccaggtccatgaaagtctgattacagtcctaggtgtgcccctagacactgggtgacctcggactaatcactttgcccttgggcctcagtttcttccatctggacgatgaggaatcgggaatggatcatctccacggctccctgcaacctaacctagagccaagccaagtattagaaggccattaacccagaagaagaaaaaaatgtcccagaagaggctacactttatttttcttaaaaaaaaaatgtctaattatcagtaacagctacattttctgtggacagtgcctgctccttatcagtgcctgctccttatcaatacctgaggttagaagaattgtttttgagctcgctccttgtaacttttctgttctgtagctccctcagcatccggaacagaaggcataaatctagttatatttttaaaaattagactttggaggtcagtcagtgagatccgccttagccagctgaattaggggaagggaagagaggaagaaaggacttgggagaaaatagcatgattcacagattcacagtcatgactgtgatcccttgggaataattacttgattattcccactactaagcaaacaaggttcagaaggtcaaactttgaggaaagaaaagtgtaaattttgaaagcgccataaatgcatcaccagatgtttcatattctaagcagatcatagacattgattggttcaggactcacacactgcttgattcctaccccatccccagcatctgcacccggtggtcatcctgcccatgtttgaatgccaccaataacagggagctcactacctgccatgcaaccatttgtctagtaaagctgttgataaagttagggccttctttggttgagtcacagtctggctcgtgtatgggccaatccggagcccagttctgccctctggagccacacagagaaaatccagcctatctctcccatagtgccccttctgatatttgaaggcaacgtagtctgcttttcccagtgacctccaggcttgcagctccttgccttgccgtggtttgcagacttttccccagccctttgacattctggacctcatctctcttgaaacccttggcccagccctggactagccaatgccagtggggagccttggaccagccaatgccggagggcctgagcacacaaagcagaacaggaccaccccttcccttgccctaaacactccaaataagctttatcagatgctgagtcactgggctgattcatagagaatgcatcatcttcttggcaggtgctgctgtttgatcctctgtctcccattatggacttacacagctgggtttggggcattagcttgatttattttcttggagagtcagagccatggggagggccagggagggatgagtaaagacccttgcatttatctgtttatctatgctttgtgcaccatctctggctgcctgaatgtctctggggctgcttcgctacgcagtgtccttattacacatccccaaccagcctttgtctggctcagcaccacaagcaggacagctcagccagcagtctgatacagctggaacaaactaggaatgggcaagagcagtatcctgtggcctgtgattaagaatcactctcagatgggcgtggtgactcacacctgtaatcctagcactttgggaggctgaggtgggaggatcacttgagtccaggagttcaagaccagccagggcaacatagcaagacccagtttctacaaaaattaaaaaattagccaagcatggtagtgcatgcccgcaatctcagctactcaggaagctgagatggagtatcgcttgagcccaggaggtcaa

SEQ ID NO: 50365 - DNA, 690 bp, Homo sapiens
accttataaattctttgtcccatatcttatttctaaatcaatacatgataagttggtccctcccacaagaaagcccttcaaacatttgaaaaccaatattgtatctcagcttaaatgtatttccttacagtgtaatgtccctcaacatcctcgcatagagtggagtttccagataacctcactcttctcatccctgcccccaaggatgccacatttcttcattgtccctctgtgtggcttttacaccaaacacaggagaactgctttgactggccaggggagagtgtggcagggcacttactacctgtgatttgagaggtgtcactccctgtgctcccaaggcactctctgcttccttttgtattatattataccacactgtgcttctcagattggcttgagctgacttctggggaggttgtactgtacacagagacaaggaggccactggctctggtattactcagagattcaggggggaaagttaatgtttagtgagtaaacttccttttcccttccctccctccctctggctctcccttcctccattcctttcttccctccttcctcccttcccttctcttcccttcccttcctttctctctgtcttattttcaattcctcactaaatctccggcttctaaagttaagtggatgtctatttatatacatacatatacatgtatttat

SEQ ID NO: 50366 - DNA, 814 bp, Homo sapiens
cagtactaaaatgtgcggacgtccttctcccggacgtccttctcccaggccctcgacatcataagatgggcgagaaaaacgtgcagggctaaaatctggggtccccacccctgccccagccacttggcggtcccgatagtgaaatggactaagatcaaggagctctcccggtgagcccccccattgcggccgcagcgcgggcagggaggacgccgcgggagcccgggttcgaggctgggctgtggggctgcgggggcgcacgggcgaggtaggcggggcgcggggcccccgcggcggcacaaagaggccggccgcggcagttttgaaaataccaaggaagttgatctgggccggggcccaagaagtgacgaggagggagggaggcttgcgagcgagggaggaaaggagggagagggagaggagaaggcgggaaggagggagggaggaagggtgcgcggggcgaggggcggcggcagacctcgcggggccccagcgggaagcgcgggcggcggcgggatgcgcgctctgggcggcggggcgcggcgctaggcgcccggcggggcttccccaggctgcgaccccgcgggaccctccactcctcccgccgcctccgcagcccgcgcgccggagcatgagtcccggccggagccccacggccgcgggcggcgcctaggacggcgatccgcgccctggaggatccgccggccgcccggctccactacagctccagccgcctgcagcggggccctcctgaggccccagaggaagagaccatgaaaggtaagggcggcctgtcgggggcagctccgagggg

SEQ ID NO: 50367 - DNA, 2136 bp, Homo sapiens
gcagggagctgagctcacctgacctcccatgcctgtgcaccctctattatatcactcgtatgtctaccattgtttgcagatcgtgagctgcttgatgactgatgctagggtgaccaaccaaccaagtatgccccaaaccaaagggtttcctgggcttcctgagctaagggatgttcagtgctaaaactgggaggcccaggcaaacggggaaaatgggtcaccttatctgagaccttgtgctactcatctctgaaagcattcccaggcttagccccctatcaggtgggtgatgtatgctcagtaaatgtttcctgaaaggctagaatatgtgtgagtaggacacttgaaattctcctttggtttcccatgcaaactgagtcctacagtgagaaagccaagcgtagtggcagatcctgccccagacaccaggctcgcttgggtcctgcctagggcgccagcctctctcccatgtcattggtgttctggaaagcagataaacaactgacttcaagtcctatttaagttttatggggtagccaaggtcttccagggctccatctccaggaagccccctccctgcagcctggctggcttttcttcttcttctggtgaagtcatccgaccccaagtggcccacagtttcctttctctccacacctcccaaacccgctgcccagtcctggcactgcctggggttactgctgacctttcagtgctgtttgctcagaaagtgcctttatgtcaacacaaacagccttcaggtttgccagggcctggctccttttctccctggggtccagggtagaaaaacaataaccagtgggaaggagagcgagccataggggagtgacgcgtccctggaccttgggtctctgtcctctcagccctgtccctcagggcctcctttgtcagaactcagttctgtggggagagggtactggggaggcagcggctttaaacaatgccacagtgtctggcagggagctgcgtgcttgacctgattaggctcagtgagcccgggggagggagggagtgaaggcaggcttgggaaagtgttttccatccccacccaacagactttgcttccttgtatctctgccaagacctctttttggggaggaaaggccgaatcgcctcatttctacaggggcaccttggcctcgctcctctaaacctgggtaagctctttgacctgcctgtccccctccctcttgtctttccttcccaccaaccagctcccaaacagaaagtgtttttcacactcgcagctctccctcctcaggccctgccaggcccgaagctgggcccagaggccagctggcacccacatgaaaggccttcctgtcgagaactggcatggaacccagggcctcaaggctgcccacaccacagccctggcccagggtccagagcacagggccacggaaacttggccacaaggctctggggagaaaaacagcctgagccgcacaggagaggagcctcccatccccgcagcctggctgggcacatcaagggagaaagcgcagtgcccagaatcctttgaacatgaagccgcagcacctgcacctggcagaggacccgggaaccagggattcgtgctgggggcagcacttggggtttgttagtgcaggtggagagaaaacaggagagtagcaatttccaacccatcagcagaaaaaagtgaaagctgagaagtcagggtgaggctggaggggacaggatggggtggctgggtgggcccagaattgagatctgatttgcaaaatggtggcaaaaggcaacagactgcggctcccttgagagaaaaacctggtctcccaaccggcaatgggtgtggttatcaaacgcacagccatgcctgttcccaggatgcaggtgcagtctggataaactgagactagggttgggggggatctgttcaaggttgcacagcaccttcaagatggggcttgaactacaaacccaggactccggacctggaaagaatctcctaggaggttctggagggttcattcttggacagaaatctgggagaacctacagcaaaatggcaacaatgtgattgtgggtaacttaaagtttgtggttttgtgtgtggttttttgttttttgcttacctgtgctttctacttt

SEQ ID NO: 50368 - DNA, 919 bp, Homo sapiens
tcaataacttggatcaaaaggagaactgatcaaatgctgttggaaagctacaggaaactgctaagacagcacagagaaagtggggccactcaaagctgaagaaggaaaaggcttcatcgaggaggctcacagagctcaggggttacggcagaacacttgagccaaatgggttgacatcaaatccagtctctactgcactttagacctctaagaccttgaacaagttccttaattctctttaagatcagtttcctcctctataaaatgaaaataatatctaactcaacggggtggataatttatgaagtacttagcacagggccaggcatgtaattaacactccatcagtgttagcaattactaccaccactacacctactatgtggaccttgaaccttagcttgaatctggactctgatgactgacaaagacaaacctgagggcagagggaacaatacaagccaggtgcaaggtcagaaaacagcaaatattggctttggctgtagtgtgaaatacgtgaagggaaagaagtctgcagtcaaatgagagacgcttaaatgctggtttcagaagtccggactgaacagtttaggccgaggagagtcaagacagtttctaaacttctaaaagtttaatctggaaagattcactgggtgaacacagaacaggctgacctaagattctagacctatgacccagaacaggctgattctatagcgacaaacaaatttagccccaaagcccttggttctgagcactgcagatggtaaaccgggggaaaactttgtccctacaaagtgccacaagtggagtgtcctctggaaatctcatagcaacgaccattttctccactcctcggcacataatcttctactgactcacaagagcaagacccttgggcataggtccttatttgcta

SEQ ID NO: 50369 - DNA, 1959 bp, Homo sapiens
aaccttattgtactgtactcactccttttcttcttgtgatgatgtgaccacggaaagcgaaatacaggacaagtagggactactgtaaagagatcctgtccacgccctcaagggacttacactctagctcaagcagacaccatttaataccacgtgataagtgcaatgccaaaggcatacttggaacgttaagtgggtcccaggaaaggaatagctaagcaatcttggggtaggagctagcatcaggaaaggcatcttggaaaagatgggccaaaactgtcttaagggaattagctgggggttgattttaggaaaggggaataacaggaacagaacgaaaccaagtcgggacactgcatttcctgggaacgaagggcaccctttccttatctgtcaaagataagtcagaagcattaccataggtcacttctgagatctgggacatcaactgcccggagagtggctgggtggacatcccagggtctttttattgttttctgttgcatcccagaccctacaaccccttcctgaaagggtaagtcgcgcttcccttaagaaaaagttgttagcaggtgtctcctttctcacaggggataattacaagggttcagccagaacaaaggccgcagatggaaggtgggaagaagacttgggataaggtgtgtggaggagcccacaggctctgcccaatcccagggagtgacgggacgtctttccgattaggggacgagaactccccgatacaaacatagcagtggcatcgcccctccgcgccccccacgccatgacgaggggacgccgggggaaatcctgcagccgtgggagggacggatgtgctgggggaccgagaggccgcgggaagaggcactcgcatccagaaggcattttagagcgagggtcaggcgcagcggcggactgcgggtcccggcttcggagcccgctgtccagcagggtccaggaggacgtggcgcccactcaccgctgctgctggtgaagtagaacaccatgatcccgggagcggtgcggtgactccaccgcggagcagcagcgctcaactcacgaagctcaggataccagactcgcggcggccgcctggcccccggaactcctccgtgcacttccggcggacgtcggggcgcgtcataacgccggccgtgggcgccatttttaatcctggcgaggcgaagtgtagtggcaaggagtttggttcagtgatttgtgggttaagggaaagaggctgggcatcttgggcacgttagttaacctgtctgtgcttcactttcctcagcagcgaaatgaagatgatactagagcagctaactcacaggatattttttagggttaaataagttaatgggcgccaagggtttagaacatagcacacaaacgagttgtttctgatactcaccaggacaatatgcctcttggggattggactttgttctggcttaaatcgaaggcctgccatcccaaacctctgaacctcagaggtcctcctgctataaagtaggaataatcatattcatgtaaagctcctacagcacttggctttgccctgattatttctcttgagaaagcacttttatctgaggaatgtgagtccctttaaattactaggtctggagaggcattaagataagaccccatcatgttctaccacccccttgagctatgtattcatctactgaaactacctgcttctgccacaggtagctacctactaacctaacactgccacacaagacactatgacatgacccacaccctatagtttaacaatgtctagccaatcactgatgcttgtagtttctatacatcaatgagaatgcttgacagttgtgtatcagcccacttcctgccccccttcttcgtctttaaaaacctgcttgtagcaaaggccagacagagctcatatccaagcctgctggtggagggcggtggggggaggggggttggaat

SEQ ID NO: 50370 - DNA, 902 bp, Homo sapiens
taacaatagctaacaataaccgttttaggaactttctggttttccaaagtaagaatttagctctgttctgtaaatagcaattgttttgggttctccgttgtattatttgtaaaatgggaatggcaatagatattaatgccttacagattgtggtaagaagtaaatgaaacaaaacatgtaaagcatctaagaatgcctggcacatagcaggtgttaagttttatattttaatttgaaaaataaatagaaacctaaagttactaataaaaaaagtgaaactgacaatgaagcttcaaatgtgaaaaataagtgcatcgagaatcttggagaggcctttatttatttatttatttatttatttttgagacggagtcttgctctgtcgccaggctggagaggccattttacaaaaatttcttaccccgtgaccccagaatgtatctcaacttcaactggaccgagaactacaattcccagaatgcacctaaacaaggccccgggaacggagtccggcgttgctgcaggggattgtgggtggcgtggtttccctcagagatttttcacctcaccagggcgcgagaatcttggaaacagccaccagggtgggcggggcaagggctggtgctccaccaatcaccgagccagcccctggaagcgctgagccgtggccaatcggaacgcagcggcttcctcctagcctggcgcgcgattatttgaagacgctcacggagcggctggctaggctgaggagagctcgccgggctctgaggcgcaggtaacctctggagtaggccgaggcggggggctgtggaaggctgaggcgagcgggagaccctgtggaacgtgggggcgaatgtcacggggaaagagcttttgctcggcgctcggcaggtccgcaggcc

SEQ ID NO: 50371 - DNA, 563 bp, Homo sapiens
tcggaggtgaaaataagtcgtggccaagtacctcttcaaaattggtcccgagcggcccccagcgagaccctgcagctgcctctagcaccaacacatacgcccggcagctgccgttgcaattcgaaccctcctggctttcaaaaagtcgcgcgctgcgccagcttcggccccgagctacggggcggcgtgaaggacacgccccgccgattcgccgttcctcctccctctcccaggactcccggtgcccgcaggcgccaaagacgagggaaggaaggaaaggcgcggggagcacaaacttttacaggaaccaccagcccttccgaggagcacagcccggtgaatagaacacagttgcctgtgctgaaggctgaagctctctccaaacgctcacatctgtgttgaatgtgtcgtgattatgacgtcaattttattataggtttatgaggccttgaaacactgtaaagacaaatgcgtagcttaaggaacaatcatctttagccgagggaaaaaaaagatatttagaaatgttgctaactcatgtaattgccacattcaattcaaca

SEQ ID NO: 50372 - DNA, 582 bp, Homo sapiens
taaaccacttccctgctgtttggctctaacagatgaactaagtggcttgaacatatttttgttacgtagacattttcagcccctgttgtcacgggattgccatgcagtgaatccggggatggaggagggaggagaggccccttccgccacctccttggatgttgtttcttctccagagcctcttcctggcctggatagctgtagctcttacacaataagccctttgaggcagagaatgatttgcagattaaacgtctcctggaagacacatcggtttacaaattacccaggaaaaggctgcaagccccagggctctgtgggattagtcacacccaaagcaaataaagaagactaacaaataaagaacagttccaaggtgacccagcccaaatacgtatataggatcttgaaactctagctggtgtttcaccagggggttcttgttcacatccagtcacgggaggaccaatacaatgggaacacggtcatcaagggaggagcagtgcatatctgcagtgacgtcaacactgcggtggcgggggatcattcccggaggaatttgccagcaaactctctctgctc

SEQ ID NO: 50373 - DNA, 536 bp, Homo sapiens
tccagagaacaacagcaaaatgcagtgcttaacccagagaagaaactatgcaacggggcatgactgtgttctcagatacatgaagggctgtcatgcagagatgtaagttttctctgaactatcctagagggaggggggaatgccaccaaatatacagaagttcttattcaccactgagctgtctggaccccagaaccctggctgacgcctggaaattccctaccaatggcattgcttaatcagagcttgggtaatctgtactgcatggaagtctcacagagtagtttcccgcactgggtggctgcctgcacccagtaaccccgatgcctctcccaggtcaaagaaggccattagaagaaaactttttccaccttgataaaaagtagcttacaactgactttgtgtttagtttgctttggttggggaaaagaaagaacattccatgcatgtttttaatagcaagaactaaaaacaggaaatattatattcaataaacctaataagtaatactaacaaatatatttcagcggcagatt

SEQ ID NO: 50374 - DNA, 852 bp, Homo sapiens
ctcaaaacccttctggtccgtgattccaatttttcatctggaattaacagagagatgtcacctgcaggtacctggcagggataaagtactaggtctccaaaggaggtgtctgttgaacatcgcagagaagggaaaaaaaaaatgaaatgaaaagccgattaaacaagatagcaggttatctcacacgagggatggcggctcactggagatagcaatcattggttctgaaaatctccaaagagccaggctgctctgaaactctggtaacagaagttatggtatgcttggccacgggcttcagccccttctagatttttccctcctgtggtcataaaaagaaagaaaaaatgcaaggacaccatgctgacacccacggaagcaccaacctcatcattttcacaggctttgttctaatctggaagaagttattttgataacaaccctcctgcccacagatgcctggagacaaattgcctaactgcataccgctacagagactttgagccctctctttccaaaacaggtttatttgatgtttcatccagcttcagaatttaacctcctcttcctttgaccattttaacatacttggaacagaaccgaaccatgttaaaacaacagttccaagacactcacattccttaagagcactctgctccatggagggaaatgctcggaaccgctggtctcgatctgatttccttctttttctcgttcgttctttatataaatcatcttcaactagagataaacagaggatatataagattataggtgttggggtatggtattcttgcctcacctctatcagcatagaaactcaaagggtctaacagactggctgggtgcagt

SEQ ID NO: 50375 - DNA, 1629 bp, Homo sapiens
cggagattcattcacttaagcagtttcccttggttatgaagtgaagggcttgttgggcccatcatcctaaagaaggggtataaccaaaatgttgtgttttagatggattttagaaaacaccccctggtcatgtttacctggctagaaaggggcaagaggtggatctttggggtgaaggttgttgaaaatggttctaacccagggctcctggggctggcctgcaccttagaaaatggccatgaggtgaaccaaaagagtagatccccaagaatcacagggaggccatgaggctccaaaactgagtgtgacattctgaggtcattccctgcagaatcacagagaagaaatgtcacgtggcatccaagaacggcagcccacacagaaggcccagtctctgcctgagggctccagacacagatctcccagacaattcaggcagccctccctctctgttcaaccttgcatcttccagtagaaatggaagccaacgcacaccccgtagaatattctagtgcaagccatgctatttgccaaggcctgaatctctgccacctcatgctccacgctcaagccacaactgagagttgagagaggttatacttcgacccttccctctcagacattctaactgatgattgagctcaaattcaagaattcgccctggctcggtttgaggactgccttagaactaaataccaagtggttgctggcttggtggctggagctggagaggaagaggcaaagaaagaagtctgctggtcaggcccctaggccagctaccggctgaagaacactttaatctgtgctcgaaaaagcatctcagaactccaggatgtgtccacaacctgtctgtggaaagagtggaaagggatgtagactttgtaactcaggaactcttttgggtaaacaatgtttgcctaatctcttagccatgtgtataaaacaagggccaagtccacacatccagggcccttatttcaacattgtaaggactggcaacgaatctgataagagtttggaagcttatttctcaactaaagcaaatgctaggaagtccaatacagcagggtttaaaactttttcttcaatttctaaaatgcaaaactatctggaaaggagaaagtattccatcttggatttataccatacgagggtagtatttttatattagattgtaaccaaaataaacttgtccgaatttagatcacagatcttattattcttgtccatcgctcaagcccttccttgccctttccagcattctccaccgagaaaccagctgttggggtggatagcggcagtccaaaaagcgtagtatactgctgctgttccttcttgctgccacaaggtgtcagttttgaaaactgatcccccaacagcctgagctgagatgcggtttcattgttgactgttgaaattttttttttttttttgagacgaggtctccactctcgcccaggctggagtgcaatggctgggtcacggctcactgcagcctcaacctccgtggctcaagcaatcctccgacctcagctcccaagtagctggaactacaggcactcaccaccacgcctggctaatttttttttctttttttttttttttccagtgatgaggtcttgctgtgtt

SEQ ID NO: 50376 - DNA, 1601 bp, Homo sapiens
aggaaaccgtgagttttctgcctctagaggtgtctgaacctatattgatatgaccacctaataacgacattgagatagataaattttaagccttcttcaaatcccaagattctatgttcttacttgaaattttcaccaagaaagctggtagtagaagtgccctatgaggtcaccaaatttcacaagaggcacaagcaatttctggtttggaatactgagtcagaaatgctgacacacatcaaaacctaggtgagctacaagaaaaaaaaaggtagatgggctataacatgagtaaatataccataatgcatgtcaataattttaggcagggtgtgatggctcatatctataatcccagcactttgggaggctgaggagggaggattcattgagccctggagtttgagaccagcctgggcaatcaagtgagaccttgacactaccaaaaaaaaaaaaaaagaaagaaagtagccggttgtggtgacacacacctgtagtacccactatttgggaggctaagatgggaggatcccttgaaccctggagttcaaggttgcagtgagctatgattgcaccactgcactccagcctgggtgacagcaagaccctgtctcaaagaaaaaaaaaaattagatacagaactaggattacccctaggaaaaagatctgttgttttctgaagagagcagcttaaggagtaactcgtatgaaatgctaggcatcatattatcacagtgagcactggaagcaaaacaaaatgtatgatacaaccagtgaacaaatccatggtcgacctccaggacagctggtgtgctggaattcaaattctaggaggaaacagtggagccggataaagtacaaaagaactgatagaccaagttgataagagtcgtggtcatacagacactaagattagggaccttcaattgagagagctgtggattaaagggcacaaaatcaaagggccttgagtttagagcagaagcagctgtggtcactgaattctggaatacgggtagtagttttggcttctttcagaatcacaagaactttagttcatttgacttcatttactaaatcaacagtacacagtgtccagcaagggccgttagcatgtaactagctggggttggtttgggtttagctgcatgcaatgaagacagaaaaccacacaacttcctccgtagcagcatctatggtttctgtatacaagtaatttgtgaactctaactgaaatttggaatcattggaaattatgtggtttggttgtggtggattgggcttcaaattcctttggccaatgttcaaagactggcaggaagggatcatttgatgaccaaacaaaaacactagcaaatggaaagggatcatttgcaaaaaggctaagaggacagaagaaaataaacaccaagtacataaaaaggaaaagcgataaacaaatgggggtagtttggtacagacattcagtatatagtcattgggttgaactaaatgatgaggtgggaagaacattaggctggaaatctggtgtggaagcttccagctccagctttaccacccatcaataaagctggaggacttaagacaagtcgttttatcac

SEQ ID NO: 50377 - DNA, 1604 bp, Homo sapiens
gctgggattacaggcgtgcaccaccacgcctggctaatttttgtatttttagtagagacagggtttcaccatgttgaccagggtggtcttgaatgccagacctcagatgatctgctggccttggcctcctgagatgggcatagtgctagtattacatgtgtgagccactgcgcccggccctaagcttaacttttttctttggcagagtttagggtcccgagatgttattttccttccacaagagacatccacagctttcacgatggttaccgatcatatgtgccattcatctaagaccaaggtgaccacctggtcccaaagcctgcacctcggattcttactcgattcccgcctggtctcttccaggccctcagttagtttccacaacatgggagggttcctcctccgtggtctcgcccattcgcgttcccacccaccctccccggatgtgacgaccctgggctcccactcccccccatgagagaccatccacttccaccctttcacttaggcttcctggcgcagcctctatccaggaactctgtcccatagctgtactgcccaggtcgagctttctaaccccaagatgccactccgttcagacgttcccatcctccatccctgagacccggggcaggatcgcagcctaggggcctcacgggccgcctgctaccctgttagttgcaacacggggcggggcgtggctttgtgcacgtcggcttccgggaagagctttacgatacattgaccgacattttacgacaggcgggattgttttgtggctgtcagctttccccgtggtctgagtttgtggctgcatttttatctctggtggctctgctacggcggcgcagaaatgaggcagaagcggaaaggtgcgaaaggggaaggagatgggggaaaggggtggtccgaaaggggcgaacgcccaggcaatcaaatgctgaaccgaacttttaccgcgagaatccgctacccagtccagtcgccccgccacctagggtcagtgtgtccattctggtccccgagccttctcgtttttcctgttttgctttttgaagcaccctacccttcctctcttcctctttggcagtcacgtggtgtcttgtttgaatggcagggaaaccattattccaatatatgccctccgaggagttaacgtcgatttaacgggttgtaggacttttcatttgttaagatttgtttcacgacacatttgacgtgttagagagtttcttttaaagccttattttaagatattaaaaaaaccttaattatccttggattcagtgtaagagttgtgcatgcaattattcccatttttattacatcatgagttagcaatgaacaattccacctttggtttttcaacaggacggattcaaatttgaaatattctctcacaggttctgttcctatttctgtatctcacaggttctgttcctatttcatttgaccagctggtctaatcatggtaattgttgtcagaataatagctaccatttattgagcttgtattttgaagtcggtatcatttccattttacagatgaagaagctgagattcaaagagttaagtaactttcccagaccaaaattatactt

SEQ ID NO: 50378 - DNA, 1008 bp, Homo sapiens
acggtccaacaccaaggagccctttccgttccagctcaaatcccacaatctcaaaacatttttttcatgcttctcactcccactctccatatcaacagcccatggaatgagcttctgtctttgctaaccttggggttatcctcctatcttgttctacacaggtctgcttctcttgctagtttataacctgcttgcatcaagtgctgtgtcttattaatctttgtaaccaccacaggctctagctcagcaccacacacgtggcaggcattcaatgatatttgtcaagttgagtgtaatttaaatgaggtcattcattcaggtctgtgccaggaaaaaaaaaaaaagtcaccttttctgagataagctggggtcacttgcataccaagtcagtccaaactgaaagtaacatcaaatgacaaataatcgtctatttcaaaactagaaaagtaatggattttgtttggaaaataagcataggaaggacgtttttccttctactcttccgtgttttcctgtattttgtaaataaatgtgtgctcattttacaataaaaataaattttcacatgagtaactcagaaaacagaaatcatattatcatttatgacattatgtccactggatactttctttcaaagtgctatgaaggcaaatatacttgtttcttcagcctgaaagaatcatttaccagtttcccgatgctatcagctaagtattccaccaaagagggaaaaatgacgcttggtccagctctgtgatagatggaagttaaacatctgaaagttcatcaacccacacgcccagctggccagcttccttgtctccagctgatccttggaatttaatctcagtcccaaatttatagatgaaattctcccatcacatcccatctagttgaattgttaaaatgactctaattttgttctctttgacagagtcttgctctgtcgcccaggctggagtgcagtgacacaatcatagctcattgcagcctcgaacgcctgggctc

SEQ ID NO: 50379 - DNA, 976 bp, Homo sapiens
cacatctcaacatgaaattggaagaggacaaacttctaaactgtatcattgtcctaacacaaagaaccagtcagatcatcaaaatcaccccaaaacattacccaagtggggcttttccctgagtccgagcataagagaaaaatgtctgcatgtgctattttaagttgcgtcccatgtgtcagaggtagccgtgtcactaataaccttccttgatgatctattagtacatatgctaatgtttggtgcccacactttagcatggagacggcccctttgcaggtaggccaacatgttcaccacgggcctgttaccaaatatggacacgtgtattaagttgtgaagagaaagctgatgtgtttattttagcaggatgactcatctccaaaggccccaaattaacctgcactgcttttgaagtcatactcactcttggatccttcacaagcctcctatttctttctaacacatatctgcacagcacctaacagtaaatcgttcagaagtagcatgggttgaattctttcaaatcttaaagacattcttctttaaagtggctcttcagggacactgaagctcatgtctaattctgaacgatggcaatgttctttacctaaacacagttgaaaatcaggcccattaacaggaatccatttattttttaaaaaatgatttgagcctctatccaggcaattggtttttctaatcttctattatgcttccaactgagaggcactgaaacaaagccagtaaggagcttctgtctgtggctctgctcaaatgtcaagttctggatggaaactggaaacattaaccagctcatttgggtattattgatgactctcctttctccttctgcaaccatctctctgcttcttttcccccaacatgcacagttggtgagttccaatatggatatttataagtctataacagccggcttcaaccttgttttcatccacatacacacaccccaacc

SEQ ID NO: 50380 - DNA, 3513 bp, Homo sapiens
gagtgagactccgtctcaaaaaaaaaaaaaaaaaaaaagaatcacttgaacccaggaggcagaggttgcagtgagccaagatcacaccactgcactccagcctgggagacaggcggagattccatctcaaaaagataaaaagaaaaaatagctcctgatctaaaagtctacacatccattttctcacgtactttcattccttgaaaaaatctcttctccacttggatcttggcctcttacctacaggataaaggtcaacgctttaatctgaccctgttaagcagcccaagccactgttaatcatttagcagttcaggtttggggaagacctttatacacatattgccctctggcagggcacgcaaagggataatggaatcaacccaaaaagtcagggaaaactttagccaagtttatactggggattaataggatggaagtgggagaaatacaaatctagactaatccaggctgggcagcatcaccaggcatcactcgatgcctcgcctgtgttaatcagcacactcatgacatttacagatgcaactcgatagacagcacaagtaaccaagggtctttggggactcagagcgaatgacagcatcagcaaaggtctgccaacaggtgggtcaaggagcaaggttaactctgggccgcccgtgacttttcaggacctcctgctgcctcataatcactccgggggtcctgcccacctggtgcacttccaccattccagcggtggcctccttccaacctctctcctccagaatctccacttcattcactcctctggtaagttctttcttgggagctatcaatggtccctataaaccagccatcccctagtttgccatatggttctggagcagccaagagaaatcaagaaacacctatttccgggtaacaataacagtagttcaacacacagccaaatcccactttatgattttacattctcctcttatggaattccctgactgaaacaaactcgtgctgaaggcttctcaggaaagttttaaggggataccaagccctcttgtgttcctcactccctactgccgtcaccaacaggaggggttggctaccctagataacatctttcagtccatgtccaaaaggagttagttcttttctgggctcagcaaacacattctgatgtgctaatagcccttaatgaggacatctgccatcagttaaggaactggaacaggcagaacagtaaaacaaactctctctgtggttcggggttgcaaactgctatttgtcatgtaactgttgctggacaaccacatgtctcagcacacgtaggcacgcccccacacttgtgtgcgtgcacacacacacgcacggtggctgtgctctcctaccacccagggacactgcagcgagctatgatatcacctagcagcacttccagaacacaagtcataagtcaaagtgattcactgcacaactcgtggggtttattttaacttaagaagggtgaagtttggagtaagactcctatttgcaaaagcgtgggtgcttgctacttctctaatgaataatttataggtcaactgagggatataaaccctcctgccaagagcttcagttctctgctaaactcagctctctgtatattttattatctccaccgggtatcactgcaggaacaacagtttaagtttttaggtgtttggttaatatttaaccatatcattctttatcttttatcagaaaagtgccaatttttcctttaaatctataacatttttacttaagtttttcagtgtgatgttctaaacttgcagggcatagtggtacacgcctatagttccactactcaggaggctgaggcaggaggatcgtctgagctctaaataaataaataatcaaaggccaaaatgtttgcagtgaatgtttgcatctcttatttcacaatggaactccatggagaacaagattcccaaagaattcattttcagcaattcttagccaacatctctgctgacaaatgccatgagtacttgcaagcatatttgtaagtatatgcaaatatgtttatggtcctcctggtttgcaggtcaccatttgaaccttggcagaagcaaactgtcccatcccatacccaactgctacctggtggctggttctcaagccttttttttcctggtatgtcttccccaaagaaagtttaaaaaaaaaaaaaaaaaagacacttcgctaagcatacatggaccttttctttgaagaaataggagaaaactcctcctggctttcaatagaaagccagggccttagcaagagcatcaaaagccgtgacttaaaacttctagctctctggaattaccaggtcctgttaccctatttttaagaggggtgtggtgtgtacttaggattttcacagtacaagcttcagacacatggcactgagcatattggtgattgattcaagttctcaatcagctggtcagagtgtgacaatgtggattctcagggcattctaattattgtctttttctgaaggttttaaaaaactggactacactgcatcagtgtagaatagtttagactaccagtaaaattaaaatgatagaatatcaagactgatagggaccagaataattgtccaactcccattcagggctggtattttcttgatggcataccctataactgagcatccagccttcctattactctaagtaatagatgtaatacagtaatggaaaggaggaagaagggactcccaactaacactactattttcatattccagcagatgggccataaaaataggtcatctgatctgcttacagcaaattctctccagcaaataataaacgatcctgatcaacaaatattcctgctggtctgactgcacaacagtcattcaatcaagtaaaagagactgtttctgtttgcgctgctggcaggaaagcgtttccacagctctacccaggaaaaaatacacttccccttccttcacacctacctccccatttgctctcagaaacgcagtgcctttgttcacgactctctggagttcacactaccctattacacaagacagctcttaggacactccttggcacatagtgagggctcaggaatccacaaccctctctactggcaccgatgggactgcagcctccttagactgatcttaaacagctgatcttccagcggtaagaagaggcccagattcaagaaaaacgtgttataagaaagaatacctgctgctggccctaaaatgaaggcaaaagtatcaagagcattcgaacttgcttccaagacagggtttccttaaaaacaggtagacagaaggaagcaggtataagcaggactatgctgacagatgtctgggtgaggggacgcagttgtcctgcagtgtttttgtaaatgcatggggcgctggggcgtgcatgtatgtggtggggcaggggcagcgtgcagtgtggttaaacctgatttaaactgttctcaaaccacatgacagttccagaaggaggtggggagatggatgattgc

SEQ ID NO: 50381 - DNA, 1302 bp, Homo sapiens
agttggccaggctggtctcgaactcctggcttcaagtgatctgcccacctcggcctcccaaagtgctgggattacaggcatgagccactgtgcctggccaatttttttttttttttttttcatttaggaagttaaagtagaaacactatttggaactcaaaagtcatttgaatggatcatcacattccctgacaatgccaaacaaaggagaatcactcctgagggtgaaatggttaaaggagaaaactggtttggaactcaaatgtcacttcaatgaatgatcacattatctgacaatgccaaaccgacaggcaggggagcctggcaggaggatgagagctacctggtgactcacctggctggaattaacatgtcataaaaaggcaactgccctctccttgcggtgggtaatcaaggcacccatttagaggcttgctggtcaaaatgaaccaactccagtgttccatgcttggagctcaacactaagtcagactgctctggccctggagccaaagccagtgaccgacccctgcccattacccatgtgactaggtgcctgccccgctcactttcggtaccgggtctctttcctgctctgttcccccaagcctgaatctcagccttggggccctgccctcaagcctcccccaggtggggcctggccagcctctgggagctaatcccgcccacacgggtgggggcagacccacctggggagggactcaccggaacccccgggaaagggccccagagcagaaaaagcccagcgtctttaaacatatcagccctgctgctatgcaacatgtgggtccagctcttgaccatgcaccaaaccaaatattaagaagcctaagagtcagaccctgcccttaatgaatttggggcctaaatgagctaccacctggtccacacagccagcacttgtgtataaaagcacttaatacgctctgaagctacatttatgtactgtgttgtataatgagatgaatgaatgaacatttgcatctctcaggaaaatgaaaaaaacattcagcaatctgacactgaagcctgatttttaaaaagggggtttttagaatggagcccatgagttagatgaatatccatgtgaacattttccatttttgacatcagttagataagtcaaaataaaatatgttatgaatctaaaaaaaaaaaatccactgagtgactggaggttgaaggagacacaggtttcaccccaaaaacagaaagtcagccttagtgacgagaagacaggcaccatcggggaagatttaaatacatagtggaaaataaacg

SEQ ID NO: 50382 - DNA, 1019 bp, Homo sapiens
cccaggtggccagggacaccggcccacaaccggccacaaagctgtcttcgggaagggcacagccactccctcccttgccacactggctcctaaatgcatgggtttgatctgataggattaattctcatgttttccacaagttctatagagagatagagatgaaggccagaatcgtaaacagtggcacatgccattcttctgtaattaacataaactgctaataacagccacgtggccgcattctagatgcctttaaagaacatcatgcttccaaacgcctcacgctttgcttgagtgtttaagccacactggattacaaaggcagcctggagaagaaccgcaggtgcggtgacggtctccaggccaagtgaactgagtttagaatttcccatccagagtccacaacgggctgcccgttcggcctgtgattcttttccacacaaccactatcaacatacgggtcaaagtcctcaggggttggggggcgggaaccaggtagaattaactaggaggcccagaagagcccttcccaataccaacccttcccacaaaccagcaatggtatgtgcgacctgtgaggccggtgagcatccacctagcacactctaaatcctgcccccttgtcttcaaataactgcttaatgtctgagcacagggcaggcatcccccgtcccacagtaactctaagtgaggaactgaccccataatgcatctttgttacaatgtacaactcaagaaccctacggcccagcagttccactttctcagtacctaccccagagaaaactcacaggtgctatagaggtctgtgcagcaatgttttttggtatcagcgtttttaacagtaaaggatctggaaatgactgaagtgcccatgaattagggaaaggtgaagtacttgtgtagccttctaattcaaagggagaccgggcagaggttaaacaaaatcaaggagacctttgcataggagccgggaactatcaccaagcaccctgttgagggagggagaggcaattcag

SEQ ID NO: 50383 - DNA, 1838 bp, Homo sapiens
tttctattttttgcatagacaagttctctctctgttgcccaagccagtcttgaattcctgggctcaagcaatccacccacctcagtctctcaaagtgctgagattacaggcgtgagtcaatgcacctcacctgttttttgttttgttttgttcatcctttctaaaatgatcccagaagggtctctcaaaaatgctgggacctatttataaacatttttaaagaacacacttgatgatattgactcaaatacttgccactgaaggtaaagcccctattctatgtgtctttcggctttgacaagtcatatattaaataactgaccctctaaattggaagagactttggaggtcggcctaattcctgtccttctcttctaccgcatccctaatcaacagcattcagccctacttgaataccgccaacagccgtaagctcactacttcctgggcagacatttcttctgttggacagatctgccagctagaaaatcctttttcatattgaactgaaatctgctgtcccagtctttcgggtcaaaggggacctcaaagtctatcaacttcagcatgatcgctgatcattctacagacaaggaatcatgtaatcatgccataaattaggaatctgcagctacagagaataaagtgactgtttcatctattggttgtattcgaacaccaggagtaaaaatgaacgtctcctccttcctatgtctgataaccaggaaaatatttgaaggtgctactgtgtacccaatgcatgaatacagtttagttattccctatcctacagcatcctactctcctttccaggatcaagtcttcttgctcatatccctattaactcttggctctccagggtccaaatgtcacctgaccagccaaggtcattaagactagatcttatgattagatcactgaatttctgatcctgttataaactgcattcaattttttaaaagccatatcttagagctaagctcagtggcccatgtgcgtagacccagccacttgggaggctgaggcagaaggatcgcttcagcccaggagttcgaatccagccaggacaacatggcaagactcatgactctctgaaaaaaataaaaatagaaacaaataaaaataaaagcctcatccactgaaggctcacactgaactgatgaacaacagaaaaatcccaacgctttttttctccatgccctgcccctcctcagtggacctgtgccaacctggggtcaaagactctgtcttccactgtgactctagtttctgaccttgaggttgacacagcgagcaggcactcaagattaatcactgaatgaatcatctactttaccctttcttgtccttgaaccataaaaagttttaaaaattgcagatgtccccactgtggaatacatacacaactagaaaagacaaataatacaaacgttaaaaaaaaaaaaaaaagctgcatgcctcaacccaaccagaagcaactggtatttgtattttgatatactattttggtgtatttccttccaattattttctaaacacattgcttttttaacatttgaagtcacactgtagatgtcccttaacttttggcaaaaacatttttccctgttattttaaagctattcctaaacattatttttcatgacttcataacattctattttaaagatatcagaattcacttatttattacctctagcccacaccattggatatttaggttattcccaagtttttactagagtttaaaaaaaaaaatctctgaataatctctgtgcataaatcatcatctacattgtggatatggtctcagctacatccccagaagtggtattatc

SEQ ID NO: 50384 - DNA, 1572 bp, Homo sapiens
aagtgctgggattacaggtgtgagccactacagccggatcagtatttttaaataactgattttagtcccacctgtaaacatcagggtactatttgtcagtctctctcaccagtggctcatctgggacgagctcttagtcttgggtggtaaatcagactattctaggtcacagagtcctgaacttagtcacttcagctggaccccaaatcagcctcgtctgctgggagccatttggatcaataccaggctcctgagaattgtacgtcatatggcacctgatggctgtgactcacacctcaccaaggtatgacctcgacatcactctcagagatccctgccagccagaagcggaaaatggaaaggctggagaaatcttggggtcacttgaaacttgccttactacggagaacacaggtcaaagccctctataattccattcccatcatcataaaaatatttcaaagtcccagccagcagctcctcaaaaagtgctattgacttgcctaaaacaaatccggtgcacagaaatatctcagattccataatgccacactcctacccggaatcctcagtggccacccagagcccatgacagcaatcccgaatttcctggcccagcattcgagtctcttgaaaactcaggtcgcaaagcaaaacgcctacaggactaagtgaagaatggaaagtgactggactgaggcaaaaggaagcccggggaccacaagcctgtctcctgtccataggggacagccttctcagcttgagatgaacaccagatctgactctttaaaagagctgcaaatccagagatttttctgtattttttcccccaatttttaaacacctttatgtagtccaaactagaacacatccatatgcttaaaacactccctggccaccggtttacaacctttgccctatatgtgaccccagcccactttaacaacttgatttctccctaatctctaacaagaaccctctgttcttctctctcacacaatcatagactttacactttcctaactccaaggctttgcccactctatacctccccacatctgcagcaccctgagacaccaaaaacagttcatcccagacttccttccttgtccctaaacgtttttccaagccccaccagcacagaacacgccccactcctctgaaccccacaggtagttattctttatgttggcatttaatcatcttggcttgctccttaatcaaggtgtctctcatctttccaaagagactgtaagtcttccacccttcctcatgctttcttccaccttcagtactacagtagctcttcaaacagcttaataaatactcactgaatgcgaaaactctctatttttcaaactgtgggttatgatccattagagaacgattagatcaacttagtgggagacaagaggtttttaaatgaaaaataatagactagaaaatagaaatgtcagagatgacaccaagcaaagggaggtaggtactttatgaacttagattagatttttatatacatgattgtatgtactaggtcacgatgtaaatttcatttcttaatgtaagtcacag

SEQ ID NO: 50385 - DNA, 3246 bp, Homo sapiens
ggcatgcaatcaccaaaagggctaagactttcacaatctcaaccattgttcctctccacctctatctcctactgttcaggatacattccctggtatggctaaggacatctccttgtctctctggaaagccatgttcattcccacctcacagcctatctcaacagcgtcagcctccagtcctggtgactgatccctgcccacaactcccttctctgactccaacagaactatttctgcacctcgcactttgacagttaccattccctctcttggcgtctgatttcacatgctgacatccttctgtcccctctatgagggcagaagccctggagggagggaatcatctcttacaccttctgtctcctctctccccgagacaggtatgagcctctgctcctctgctccactttgtaaattatcccacctgttactttcttctcctcttgtctttgggccctacgggtgagttactctccacaggcataatttacttcaaaacttagtactccaagtcccttccccaatctcgtttttcctttatctgatatactccctctccagcatctccactaactcaggcagccactgcacattaacttgaacgtaaactcctaaatcacttccacctagtcctaggcttcctgaagcctggggtctcttcggtgcctctcccacctcccagagggcctggcaccgtgctgagagcacagcagctccctgacaggacctgtggagttgaacttaatggccatgtttccctgtgtttcgaggtgtttgcgaccaggtgcttctgtttacacaacgcctagggagggtgtcaagaaggccttagatacctgtggatcactcactttgaagcaaaacccccaggtgtacttttctagaaagggggttctaagaaaagcagcgccggcctgcaggaatcccccgcgcctggtagcctggcatcatgggaacgcctgcccggtggaagtcctccaaggccacagggagctggccagggctgcccaaaaccgggaggcggcggcggccccccttcccgctggccaggtgggcttctttaggtctctgagtcagttccaaagtgaaggcgctgagccctgcactcccaggcagggaagaaaacgctgccttggaaattgtttgcacaagacaaactccctgtgcagccccgccccccccccgggcacccgcgtgagcccacggtgccaccgccggggagggccaggggcgcgggcggaggcgggaccgggcgagagcgtgcgggcagagggggcggtggccgccagggcgggagggacgcgggtcgcccgcgggcggagggtgtgtccctctgtcccgcccgtcccgcagcctggcctcgcgcgccggccggagtgggcaggaaccggcagaaacgcgcggggcgcgggagggccgggcgcgggagggccgggcgggcggccccgccggaaagggccggggaggggcaggcgggccggtccctgtccctgcgaggggcgagtcccgactgcccgaagtcgggagggggctccgagagtgggggcgccggcggagggcgaggtaaacaaggcgacgcgcgggagcggcagccaccccgcccgccaccccggccctgccgcagcgtcccgcgccccgcccgccgcggccccggcctcccagacccccggaccccccaggccgccggcccgacagccgcgggcgcgcggggcgtgggaagttcgcggccgcccccgtccccggctgccgcgccgctaggtccccgcgcagctcacctcggcccgccacgagcggcagcacgcgcccggcttccccggctcggacggctcggctcggacggctagctcagctccgggctgcagcggccgcggccctgcccgccctcccggcgcggcccgcggcccggctccgctccggccgcccgccgaggctcggttggcgcccacctggccggcctgccctcctccccgggacactgcgctcacgtacgcggccgcggccacaacccggcccggattcccgcccgggaagggagcggagcagcacgccagcccctgccagccggcgcccagcggcgacactcgggacacacccccgcccgccccccgcgcctccgcgcccccgcacccgcccagcacgcccccagcgcgcctgggctacacacccccggccgcccgtagacagtcggcgctcaataagtgcccgagcgactcctcgcgcacatgcgcacttgaacctgaccgagtggtgacccccccctccacacacacacacacacaccccgccccgcccctcgatcggaaccggcagctgcagcccggagccaaacttgaggcttggcttttcgcaccgagccaaagtttctctcgctgttgtttttccaggcctgcctctgggacaggctcctccgagaggggccgggctcgacccagggcgggaagggagccagacagctggggcgccgcggacgggagctcggctggggcctgggggacccaggcggcgcagccccagccgccccaagcgcccatgcccgcgctagtgggaggaggctggaaagcgccttcccattttcctttggactcaatgttttcttccccatttcatgacatctcactcctctgtcggtgtaaagtgaggcgttatttactgttgctggaattaaatgggagaaagttaactgttagccttcaatccttacgtaaacaagaccggttgcttttggcaccgttaggctctggcttttggataatttgtaacaaggagaattgaagttgttccattgtgttgttctgtgtttttcagagataagaccagcgccacaacggtagtgagggggccccgtgtctatatatgtgtgggcatcaatatttctattcaagcgaatttaatgactccaaaggtagtaattcctttcccccaaaaaaggttttaaaatctgtgttggacataatgtttgaatttgcagttcaccttggatttaaggtgtgctgtttttctggcaaagagtcagtgggagtgtccgggaaaagggctaaagtctttgtagtcagacaaaccggcttgcagtcctgactgagctacattcactttatgatctccagcaggttcttccactctctgtaccccagcttcttcatctgccccaagatggaataacatagataagtgtgtctagctcatagcaaataagtattatttcccttcctccatctcccaccatttgtgaaataagaacattatcta

SEQ ID NO: 50386 - DNA, 1323 bp, Homo sapiens
actcgggggtgtacgtgtgagtgcgcgcgcgcacgcgtgtctgtgtgtgtggcatgggaggtgggcggcaaggaaagcaggcgagacattttttaaataaaataagaaaaataaaagcccagccttccagggcgtcttcagccagcccctccctccctccctcccgccccacctccggctccggggccgcggctccggcgccgcgttttcccggccgccccgcgcccgagggttaaagctcccccgccaggagtaaacagcaccccagtcggcagccggcagccccgcccctcggcccgtttcctgcgccagccctggcaacaggccccgcccttcgcgacaagccccgccccgcgccatccgtctggcccttcctggcgtccgcctactagcggcggggtcccggcccgtgccgagtgcccagccagccccaaccctcttcccccgggattctgcggccagagccccagccgagggagggtgcgtgccgcgcacgtgactcttgttgtaggcggggcctgcgcagcgtcggtggagagaagaggggaggaggagggagggaggaggtggggaggagggagggaggggggaggggtagatggggaggagggagggaggaggagggacagggaaggaaggaaagagagtggaggggcggagggaggggaggagggagagaaggaggggaggagggagagaaggaggggagggacggaggggaaagcaggggagggggaaggggaaagcaggggaaggggcggggcgagggtctggcctagtctcctccagcttcgtggagcccgcctggggcgccgctctcccgcccccgcccctccacgggtccagctgggaactggctatggcctcgccgcccggcgagggctgcagtgggttccccgacgactttgccgcggttgctgcttctgccagcgcagcctcggagcgctgcccggctgcagggctctcacctcttccccaggtccctgctcagcagagcctcttaagcttcctgcctgtgtccacagaacccgacatctcaagccccctgaacgcacaggctcctgctgcataaacaccccgccctcctgcctcctgcacacacaggcctacattgtagggcctcccacgcctctccgttcctggaatggagctcacctaaccctgtgctcgtcctgctgtcttctctaagggtggggaaacttgaggttcagaaagctggaaggatttcagtgtgcaccatacatcgaccacacaacagtcccactcctaggtattacccaagagaaattaaaacagatgcccacactaagacttctacgtgca

SEQ ID NO: 50387 - DNA, 1819 bp, Homo sapiens
cccgtctctactaggcatagtggcacacgcctgtagtcccagctacttgggaggctgaggcaggagaatcacttgaaccccagggagggggcagagattgggccactgcccaattttatatatatataaaactagacagtggatagaaaaccctatcttaaaaaaaaaaaaaagaactttaaaagtatttgtatcctttgatcctttaaaaaaatgaaaatgattacattttggtacagctgtacaatgttaacatcgaaccattaaacatatttatgatgtgtttaaggaaatgggaaatgtttctaagatattaagtacaaaaagcaagacactaatgacttgcacagaatgatcaagtctgtaaagagaaatagagcaaaacgtgaagaaatatcccactacgtaaagtgtttgcttcgggtggtggaattatgggtgcgtttctgcggggttttttttgtggggggggctaattatttacacttttctgatttgccatagtgtatacactaagcacatattacttttattataaagcggcgggaggaggttgaaaacgatctccaatctcctcggtttccttcccaatcctttgcatcaggttgatttcctccaggccccttcctgaaagttctgcaggtgacgcagccccgcgccggccgccgccgggaagattcgagaggccatcggccagggagcggcggcgtcgggtttccgcgctgctccccccactgcgagtgcggacgaggatgccgggccgcgtctgtcctgcggctcgctggggcccggcagcccctctgcagcgcggtgcgagttcctggaaaggctgcgtttgcgctccccggccctgccctcgaggcggggacaacccgcggcttcagcccggcgtccccctcctgctcggtcctcaaccccggctgcggccggcggaagcgcccgggcctgggagggagagggaggcacctccctgccggctcaaccccctgggcaaggggccgggagggcgcggctgggacgtgcccgggcccacgaaggcctccgccccacccctgcgcgccgcctgcaggggagaccgggcagggcgccccccgcctcccaggccgctcgctgcaggctgccggccgtgcgcaggggaccaggcaagggggcaggccatgcctgcggccgcaacgctcgggtctcgctgccggcggctggaccggcccctttgtcccgtagtcctgctccgccggggatcctggggagccaaaccgagcgcgcgcgctggcatctgtgtggacagcgggggaggctgcccggtctgatccgttggcgcgcgccctggcacggcgtccccacggcctctccggggcccgatccccggcaggcctgagcactgagcactgcacccgcttttctttgggcgcgtggctcgtcctcggcctgctgcggccccctccttgccctggctttgtttttctttttctttctttcgttttctttttcttttcttttctttttttttttttttttttttttttttgagacagggtgctgtgtggcccaggctggggggcggtggcgtgactacggctcactgcagccctaagctcccaggttcaagcgatccagctgccccagcctcctgagtagctgggactcacatgcgcgccaccacacccaactaatttttgaaaaatctttttttagagacaggttcctgctatggggcttgcccaagctggtcttgaactcctgggctcaagcgatcctcctgcctcagcctcctaaagggctgggattacaggcatgagtcaccgcgcccggccaaccccac

SEQ ID NO: 50388 - DNA, 1177 bp, Homo sapiens
ttcatcttccgcttaactagtttttaaaaagcaagaactataacacaacgcaaaaagctaatgcttggtaggcatataattatctgtgggttgttaatttcacaagtatgaatatctggcggttgcactgtagcccaaatgagagggcacaatgaaatccccaagagcactgataaagctcatgggaggccctggagctttccaaagagagagtctccatctttttcatgcactgcccacagctctcacctcttttagcttgtctccctcttcaagcctcaagcgctgacgttgccacagtttcattaggtcagctttttctccgactccctccagtccctcacccctcccagcttccagcagcccaatcaccgtctataaatcccgtcgctggcatccggggtctcttaggcaacaatgtgtgggctcctgattggccgcgagatccaggagggctggctacaaaattgggcacggggataaaattaacaagtgtggcggccaagagcgtgggagggactgcaatgtctcaatataaccctagaatgaagacgcgtcgaatcctgaaacaagtagcgttgaaaaccttcattcaagacgtagtgtgtcccaaatcagccctacctacggagcacgcccagtcacattgtcctggtcactccggagctgcgaaatgcaggctccactgtgccaggttttaagagtggccaacaggtaaacagagggttggaggaaaaagaattcgagactggttcaatgaaagaatagcacctgcaacaggaagtggaaggatggggccaggaggaattgcccaacacagagacacacaaatgcttcaatgcaaatttcaatttattggattatagaattcaggctgactgacagatacaccagggaaccagcagatggcatgccctaataagaataactaaatttaggaactcttagaatcccgtccaattcattaaatttattgagcgcctgtcttgtaatacgaagcaaaatgagaatacaaagataaaaaagaaatctaaagaggaagactggaaggtgcaatatacaaatatttaatggaaggctcacacgggtaacagctgttatagagttatgaacaagtgctggaggataccaaaaagttcaaaattccggaacagaggtcctttggtcaatgtaaagc

SEQ ID NO: 50389 - DNA, 1392 bp, Homo sapiens
tttcctcgtctgaaaaatgagaggttcggtttagattatctttaagaattctttcagctctaaagcagcttatgtagaaaaggagaggagaaacatttcctaaggagcaaaaattggggcgcgcaccagtaacgaccagcgccacctgtttcctaaggtcttggccaagaggctatgaactatcccgggcgagtagcctattctgtccgctacgctgtttcgcgtggagctctgcagcaggccagagctcctgcaccccattccaccctcagcatccggggatctgcctcttgagcaccccaaatccccaggtccggaggtcggcacctctggttctcagaccaggtgtaggtggtcctgcaatcacacctccgcgctgtgtcatcaggggacggagtgcattgcgaggagggccccgagtgcatctcagatgagcgcctccagggctgggaacgagcacgccggagcaagggagctccaggcgtcactcagggcgagaggcagagaacaacgaggcgcgccgggccaggcccgcaagcccaggatccggcagggagctttcggccgagcgtactcagtgcgcctgccccgtgcgtgcgcgcgcgctcgtgagctcgctctccgggccgcgcgccccggtgctcgcgaaagctcgctgtcgctgggaggcgcgcgccggcgttcctcggccgctccgggtacctgagggacgcgcggccgcccgcggcaggcggtgcagcccccccaccccttggagccaggcgccggggtctgaggtgagccccgcgaagcgtgtgggcccctgggccggggcagcgggagaaggagcggcgagtgtggagcccgaggaggcgccgcgcggctgcctgctgctccgcctcagcccgcgccgaggagccagcagcagcccggcgcctcctcctcagggatcgttcctctcgtcgcggccacaacaaaagccttgggcgccggactgtggcgggctgcggagcgggggcccgggcccgcggtggcggctgggggcctcggggacgcctagtttgaggctgggggctgagggctgagggctaaggggggagctgccccgggagactgttaaccctgtccgccctgagcccgcggctcggcaacctgtgcgagtgtggaccgcggttcgctcgcctctaccccggctcagaccctgcgcggcggagagaggggcccggccggagccggcggcagcgcggggtgccgggggccgtaggcggaagacaatgctccgggggctcccggccgcccgaagcgcgcgccgccaggctcccggccccggctcgggtcagcttcgggcccacctttgcctgcccacgcctgaaagtttcccctcccgtccatcagtttgcaaagtccttgctc

SEQ ID NO: 50390 - DNA, 1753 bp, Homo sapiens
ttattacttacagtgagggaaaactgaaatattgcaatgccatccacaattaggattagtcccaaccactcagaaacgttaaaaactgatctaataaaaataaagaaccttaagacgcattaaactctaagctacttggaagctgcttcttctgtttgtggacacgcagatttgccacagttgaaatcactggccacgtgctgtcttgtgtgtgtttgtcacttaacatcgcatgacagaaatatttccacgtagtgacaatgttcatattcttatttaaatagcgacttactagtcatttgttatattctcatttttcactacatttttgtgtaatttattttttaactgcatttaaactttttcctcggggcatgtacgggaagagttctggattccaattttagcccctgtcacacagaaccccgttcttctctagactgagctgacctgtggtttccccagaaataaaaacgacgcgtgcaggtttctccctccccttgacgtcatttcgtttgatcctttgtaatgattttccctagtttcgaaagcttgccctagtcttaacgctgttttcgcgtttccttatgtcgctaagcgggaggtagccccgcactctaagcatccggctcattttcatgttttaccggaccccagcgaccggcgccctctgcgctaggcgcccggtgccgtatagccctccgccgtgtgcagccgggtgctggtgttgttgcagcggcgcccgccaggaggcagcgcaggctcggcattggctgcggcgtcccacaatgcaccgggctctggggcctgcacgacagtcttgaacccagctgcggggccgcgagaaggcgggcccgggagccggcgagggcggggcctccgaggaaagggccgggagccgacgcggaggcggtgggcggggcgttagggggcggggccgggagccgccgagggggcggtgggcggggtattcggggggcggagccgggagcctcccagggggcagtgggtgggaccgggagccggccggccgggccggggatgcggtgagccgagggcggggcctcagggggcgggaccgtggagagggcggggccgggccgctggcgctgtcgccggctgcagtggccgccgctggagaccgcgggacctggcgctgcagcgaggtaggggctcttcgggatcttccctttcgggggtgggaagtcttttcttcgtcgtgccaacgggagaagcggcgagctgctaaaatttagagacggcttcgcacttctcgctgtagcccgggctttacccgggggatcgattttaaaactctttgtctggccccgtcgtcctgcccgcgggccggacgtggggcgcctgctctgggcgtctggggcgggcgattgcaagctcgcggtccatgtcccctgcctcggagtgtggacgtgaactccggggtgggctgggctgggtttctacagaggcgggaatttgtgagaactgggagagtgtggctgtcggcaggggtccgtatcacactgtgggcgggggtcccgacccctgctgcctcgggtacggggtaagcggcatctgccacgcgcccgcctcgcgcgctgtcaggaggcgctgtccccgtgggtaagcccgtgccgtgggtgccctccagtccctgcagccccaaacacacctaccccagaggacaccacagaatgcggaccccaaagccagccgtacctgcgagcccctcagcacagctgactttaatttg

SEQ ID NO: 50391 - DNA, 564 bp, Homo sapiens
acaaattcatgggctaactaaaaaaataagcagatcaagtatctccagcatcaactgtgaatacacacacgttaggttaatttaaaaaatgacccactgttttttacaatcttccaatgcctgtatgcttccaaaaaggcacagctggcatactttttgcttctaaaggaggtaaactttaaaaactgacccgcagttacagaccggcacttagaggagttaactcaaacaggtgagtgactcaccaattactcattttttctgcagattatttacctactaagtgcaagactggactcatagctttagctcactcctagtgaaaacactgcacataggatctataaatggaggctgtgtcatcaagacctcagaagtaggggccggcatatttcttagacactgatgaaacagaaacatctctcagaagaaccataaagacatgagtagctctgtgttaaaacacatcatttattttgaagggaaaaaggaacgcagaaagaacaatagagaggaactcagagcatttcctctgtggcttccccctttgtggtgccaatttaa

SEQ ID NO: 50392 - DNA, 1208 bp, Homo sapiens
agtcatctctgcatccactgccctttcttactctggcaccttggacagctccactctgcctggcccgactaagtgggccccactgacctgctgtccaatgacatcttcagcattatgggaacattttttttattgtaatattttaattttgtttagagctgtaacattcttatgctgtccatctgagcttccttttttatccttcaaggtttctggactacatggtttggtaacaatcatggtttggtttttatttttaatgtatacatctttcacattgtacactctatttttttgctttgtaagagtcatctgtgcttatttaaaaaaaaaattggaaagcacatcaaagcataaagacccggggggaaaaaacctacccattattacacaacttgaagccagtagcattcacatttgggcatatttctctgtggtatcttttgggagagttccaagcttggcttggcagctagccttgcttctatcctgggctctttgacctcctgggcttcactcctcccttaatagaggtttacttaatcgaccttcccttcctctttctgccttcccatagacacaattaaagccagctgcttgaggattctggtaactggtgaggacagctgattctgagcccgctggcaagagggcaggctgagagggtggggttggactctggctgatgcaggggcaccgggcaggaagctcagcagctgggcaggggcctggacacagggctgcccgtgcagaagccacgtggtcctgctctcacattttccctgctgttcagagccagccaaagctgagggcatatgcttgacaccggacggtgggtggggggggtccctcagaaaccaacttcctgcttattatgtcaggcctcagcaggggatattttttcattattctcttaattgttttgagtaggaacacagtcacatggttcatggagcagaagtctccctcctgctcagccccatccaccctgttttcaccctccctaatccactccaggtaatcagcttttcatttctgtgtgtattcatctagactttatttgtgaatactaaagcacataaaaatatattctatattctttttttcccttccttgtaaacaaaaggaagtgtcttatacaccttttctgtaccttgctgttccccccctgcccccgcacttatcttggagactctaaaaatatctgt

SEQ ID NO: 50393 - DNA, 1851 bp, Homo sapiens
ggcataagtcactgtgcctggcctgatagaagcaaatctctgaggccctttatggtacctctcttactctgaaaagcatttcttggtcttcttcaattcgcactgcactaactataaggaaaatgtcctaactttattccgatggtagcatgtatcaaggccattggaacactctttcttaatggcataattattgcagcagttacctacatcagtacttaaagtggagtggggtgttaatgctatgcagctttgctgctctttcatgcctatcaaatgcttctcttcaagttaccatttcctgcataatgctattactctattagataaattgatatgtcctctatagcctctttactttcaaaagtatgtctgagagctttcagaagtttgagaaggggtgtgtgtgttgtgcaaactaagggggaaatggagggcagaaagccctgtcatttttgtagtagctcacatagaagctcaagacaaaagacagaaatggaatctgtccccataattcacaaattatggggactgtacatgttgtttccatttttgatatcatctctaacttctctgttctctgatattaagcaagaaaaattagcatcacccagaatattacaatgggtgtctaaatgaacatgcgttccactttcagcaagcctcaaccttggcttcactcccagggctgatggcacaacagggctgaaatcaccactgagtcattgaatctgaatcacctgtactgagatgccaggttgcagatgtcctttaaagggactttgaggccgggtgcagtggcttatgcctgtgatctgagcactttgggaggctgatacaggtggatcacctgagcccaggagtttgagagcaacctgggcaacatggcaaaaccccgtctcgaccaaaaatacaaaaactagctgggcatgatgttgtgtgcctgtggtcccagctacttggggagctgaggcagaaggatcgcttgagccagggaggcagagattgcagtgagctgagattgcaccactgcactccagcttaggcagcagagtgagactctgtctcaaaaaaaaaaaggttggggggagatgggggactttgagacaggttgctaggaatagtgctaatttttagtgaggtagaaattaaggcagcaaacagtgatttagaaggaatttttggtccagttctgtattaagggattgccagagaaacagatccaacagagtatgtgagtgtataaagatttagtatagaattgactcacacaattatgaaggctgacaagtcccaggatttgcagttggatggctggagacccagaagggctggtgatgtaaattctagttcgaaaaccagcaggcttgagactcaagaagagctgatgtgtccgtgcaagtctgaaggaagaggtgatgtctcagttcaagtcagaaggaagaagcgatgtctcagttcaagtctaaaggcaggaaacagctgatgtcaactgtgatgctcaacagtgaggcaggagttctttcatactcagccattttgttctagtcaggtcttcaactgtttggatgaggcccaagcacagcaggctttactcagtctctcgattccaatgttaatgtcatccccagacacctgaataacgtctgacccaatgtttggacactcctgacccaatcaagctgacacataaaattagccatcacaaagtgcctcctcctcaatatcattttggtatttgggtagtcccttcaactgtctgaaacataaaggagagaatagaatgagagcaaatctttactccctttcctgatagcaccatagcttctgttttttttttttaattaattt

SEQ ID NO: 50394 - DNA, 3211 bp, Homo sapiens
attaaaaacattaaaaaaaatacgttaagacaaatttgatcgtagctcatactgcagttacaggttttaaaagctggtttctaagttaagcaggtgaccaggtagggtgcttgctcccacccccatcccctgttccattatccaaggggtcttatcctgacttctcaagtgtggaaacacacagtcacgtgttccttgggactgtggaaaacgtgcactttggggctcacaggggctggcttttcagcattgacacggtgttcttctttcctgtcttgttttggtgatcatcccacacgactagattaacctgttgtttttgcaaagccccaggattttcctaagcgtccaagccgcccggccttgtctttgttatgaaatagtcaaagggcttcaaaactgcaggcagttgccgcgcacggcgcccgtccttggaggccttttctctgagaatggagttttagattcagggatttatgacttgactttcccggggccggcgcccctgcggaagcggcggtggctcgggagtcagacccggttcccacgccgccgggagcatcctccccgccatctgcggtcgggtcttctcgacagggcccggcggcctttgcaggacgcgagttggggggctccgaaggcggccggcgcgcccccccgcgcctcccacaatccccggcgcccggccccgcgcccctgacccgggtgtcaccgcggagctgcgggaggcctcggcggtcttcggacgcggtcgggaaagtggcgagcgcgcgcccgcgtccgcgcccccgctcgcgaacgccggcttcggccatttccggcgcggcgcccttcggcaagttccgcagtcgcctgtcggaaatggctgccggccggcagggggagcggcggatcaggcgcggcctggaaggcgggcggccggcagccagaacggcttctgggacgccgactttcgcgcaggcggcggcggcggcggcggcgggtccctgagctggaagccggtaggactgctggccgcgcgtgagcccgaggagcgggggccgcgcccggaagggctcatgggagggtgccggggctggccccgagcgctggggacgcggcgggagggaccgggtccgccgtgccccggggaggctgctgctgcccggcggcgggaggcatgcagcctccgagcggagtaggcctgcccggtggctcgggggcccggggagaggccgccaggccctcggccggcagccgggagggctaacgggtccctgggctggggcaccccctccccgcccccacacgccctctctcgtcccagtttgggctgctcgggacccgcctccacctttttttggacgctcggctgcagctgttgggcttcctctgctccctgaagccctccaccctctgtgacccgcggcgtttctctggctgctggcccggagcatcttctgtcggcggaggcgcagctccggactacccccaccccttcccgagcacaccttcccacatctgccccccgcttctacacgcagtcgcctgctgccctccccgctggctctttttgccgggctcgcctcctttcaggagccacagtcagaggagccgcttcctgtccgagggtccaggtgctgcaggaccctggctcccaggcccagctcccctagagccggcctcgcgctgcacgggctggaccggacaggggtgcgcggggcgtgtgtgcgcggcggagctccgagcccagcgacggggacagcacctattccgagcccctcggaggcgagccagggctgcccggctgctgatgggtgctgctttctcttccccacattgagcgagagcttcggctccttttattaataaaatctgtttggctctcagaagacttaaattttgtggattttgcccctcccccgccacccgcaccaccccacccccgcccttccccgcaacctggatttttcttccctttttaaaaactctaaaagcttcatcaagtcctcttggttcgactcctttggtggaggaggaagcgcagaacaccacaacatgtccattatttcccccatatgtgatttacttaagagtcgtctttagcatttcttgtcactttgtcctattctttgtccaatttaggtagcttcatttttactggcagagctccccgtgctttcttttgtttttaaaggctttgtgtgttgcagccatgcagactctgcagttttctgtattttgttcggcagtgagtcctgcattctgatacagtgactatcgctgtgacctgtgtgctgggatagtaactgcggggcacagagtctggagcgaagcgaagccttctcagcgacttgctatttagcagagggactttgaaatattttgtgatgaaagaaaaaccgttttcttaaactgttatttgatgtgttaaaaataccttatcctgtgggaatttcccattcgtttgcttgtggggagccggaggaatcataagaactcacgagcaagagagaatcgagcctaagtgctttctggaagagtcagaattgtggctcttcagacttccggaaacgtgcttaatgtccagagatgtgaggggcatacctacctaaaaaatgattgacaggcgtatgtctgtatccctccacttctcgcttttctagtgggggaaaaccctgttaatacttggtgtgtagttgggatctttcagtgattaggcctcaagagttttgacctcggagtaaaaagattttaagggaacagtttggagagaagtaagtcgggccaggccgagcatgggaaatgtatttctaggagagagggcaagtccagagggtggtttgaagccagcagaagactagagagagacctgttcttttccgcagggccctaggccagctgtggattggagggttatgggtgatgaggggctgcaggagtgatgcggagtccttgtctcagttgagactggtggtcttctggaggagggtgggagggattccctgatgtagactcaggtgttaggagaaaaatgaagtcccatcagacctactcttggtaaaggttcgagcgcctttgtatgttactctagagtgaggcgaggaatatgaaaccaggacgtttcataacgtcctaaaactgcctactccattcgctggttattaagtttagctcagaaaacttctattaacatatttctattttatttttgttaccccttcatttcggc

SEQ ID NO: 50395 - DNA, 861 bp, Homo sapiens
agggtgagcagagatggcaggcgccctgtgttcctggagtccttagtagttgttctcttgttgcttcttgatatctaagtaatggactttaataaacttactaaaaaaaactagtgtgaaatctaggccaaaacactttgatatttgacctccagctgcatgaccccacctaagtcttctaaagcacaagtaggttctcttgatttggttgtttgtaaattagataattttggatatgatctagatatcaaatcattgtagtttttcttgtttttcgttttcaggtgcagagttaggttgtttataggattgtcaagtttggctgataagtaacttcagattttgcaaacagtgtggtgctatgttgatttagcagagagggtgctggcattcacacgtctagtaagaggaagagttggaatttgaacccaagcttttctgattggccccaaagccatgctttctccctctgtaccagtgcttctccccatttaatgtgcacaggaatcccccaggggcatgttaaaatgcagattctgactcagtgggcttggggtgtgcctgcactcctacaggctccggtggtgtgtgctgctggtcttcgcctcacactttgaactctgaagctccttgctatattcctggtttactaattgtgctgtagataatccacctgaaggttaacccacaaaactgataatctacaagccaatattcaagaactgaagtggtttttcttcattttaagctgtgtgagggggagctttgtttggctgaattggcagaatcagttctgtactgagtgaatgctaggtgtgttaggtaaagtgaatgttcgaggggagtttgttgagggagttt

SEQ ID NO: 50396 - DNA, 724 bp, Homo sapiens
tgcctttggaacatctcccggacatctctcccttcccctataccaagttgtccctttaatatgtgccctggggcatctaatactttctatctcagcactgatcactccaaactgaaagtactatttacttgtctgtgtcccccacaggactctgaagctccgtgaaggcaagaactttgtttccctgttgcctagcaaaatgcctggcatacagcatttactaaacaaacatttgctgaacagatgaatatataaaaagaacatggtctggtaggaaacgtcagaatttcacactgggagagtgcagtgggagtcaggaaggtgaggggaagcatgcagactgcaggaggcgggagggcatgggcagggcaaggcagcatgcatatgccaaatgaatgtacttggccaggatggagagtgtactttgggccggagaaaggagttgagtaaagagagtgcaattggtaaagggccaaaaaggtcaggatcatgcccactgacagagcaggcagtgagaagccaacagtctgaagcagcaaatgacattctggtaacagcaattacaggagatttcaccaaaggaggtgggtgagatcaaacagacagagaacatttttaaggcccatatagcagtccagacaggagaaacaaattataatgtcatggcaggtgaggagatggaagcagcagatccacttgacggatcacctgcaccctggagaaa

SEQ ID NO: 50397 - DNA, 2895 bp, Homo sapiens
ctctgcctcccgggttcaagcgattctcctgcctcaagtaaagcttgacaataacttggctgcacaaatatgggttttaaaaggttgagaaacagtgtttcacacctgcctttctacactatgttattaactaattgaatcgagttggaataaactagttagacttgtgtgcacaatgagtcaaatggctcaaatcaaaggtctgaggagcctccatgaaccaggtgcttgagctgtgtgatgttaagacttcaggtataccgagcacgcttcattcagccttggctcatgaagtccctacagtcttagaatggaataccatataacacttctctgcccatctaaatcccatgcagggtttaagactcaacttctccacactctgacctcgtcctgaattccaagggcagtgaggagtctatataacaggatatttaataagtgattacgttctgctggatgttttttactgtctgcttaaatctagccagtctcaacaacagtagggagacaggatactcaagcgccaatcgaatggaaacggattgttaacagcctattataaccctcacgtgggaaccaggacgtccaaacctggttaacagagcccacagagttcatgggcgaaggactgtgacagtcaacctcttgtctgaacaaaaagacccactaacgagtgaaaaaagacctcctgggagggatggggtgggggagagggaattcaaaccttctcaacaacaaaaagcagctttccttagcccactccactttccagctcaataattgctacccctcccgtgcgacgattccctgcccaacgtaggaaaaaaagaggtccaaaaggttatagcatcacctttgccctctgacctaggagcgaagactcaccagtttcataatggacttttggtggttcaatagcagtcactgaactcctcaaacccaggaagcgtcttccggtgcaatctccgccacctgccagccgagagcatcgcgggacttgcagtctttcatcctcacgtcccttccaggggaataatgggaaatgtagtctcccctccaggcatcatgggaactgtggtcgcctttccttttcctccctttcctctccgaacgcctccttccgtcagctcaaattcatcccagccgccaatgcatcctccctctccaccccagcatgatatcatgtcttccttacgggcctggggcccatggtgttctgggatgtgtagtcccgacggctccgactcccctttccctcctcccaaagggaaggcggatgggcacggggcttgccggaagttgtagttcccttggccctctaggcgccgggctccgcaatttttctcaggggaggcaggaactacaactcccagggacgcccggcggcagcaggtgggagaggggctgttgatatcaatatggcggttgtcagccagacaaagacagtcagtctgatgtgattgagacaagggaggtttttcagggggagactgggagataggggcctcccctcccccttctcctcttcctgcgccggcctcaacccctccccagtcccctcccgacgggcgccccacgcggaagacacccctccccctcccgccttccctcctccctatctcagcccttcgtactgggacgttggggagggggctgtgccgggcggagagaactcagcgaggattctgaggtgagtcgagcggttttgaagccggactacctcaagtctctttcctcacttctttctcttcacttaaaacaatttttttggaggggttttggggaggaagtgagcggacgctggggatgggtctcgtaagcggccggattgagaggagggaggaagcagggggcttccgagtgggtgacccagacgcgggctgtggggtggggcagttcgtggggtccggtcctggaaaggcgtcgactgccccccaactcttctggtttcctctacgatgagcggaaggtttgaatcctggaggtggggtctccggtgtggagttctggaaactgtgaggtgatttgcaggtgtgttggtttgtttggggtgtgtaagtgtgtttaaactgtgtgacgtgtacttgtgtgctctgctcgtcttggagcggtgtctgtagatgggaagttagacagcgcgagtcctcgctcgctctgggcctgggctgaggggcgggcgtgaggtcctggtgctgggcgtttgggctggcgacgtggtgcgaggcggccgggctcaacaactcgcttgtgtcccgtcgcccgctcacactctgccactcgcctccgccccctcccctggacgaatctccaccccaaactccagccacgagaactgtagagatggtgtgatgtggagatggattttttgcatcctcaagtcggtagataggtgggaaaggaaaagtgtttcttaatattttattccggaaccgtgttttggttacactattggggctactttgaaaggcgtcctccacccaccttcaccccgaaacagtaggtagaggtatcttgtcttcgtgtgaattagatgaataattgctgaagattcggggggcctggggtgggggtcgggagtgctggattgtgtacgcgtctgtgtgtgtctactaaggagacggaatgtctgttatgtatctggagatagggcgacttattttcgtagcaggaggaactgttggaaattatttgcgggagagggggtgcgccgaaaggcgctgcttgtatttttcttctactccaccctgttctgtcttgcatttgcctgaaagctggtggaatggaacagtgaagaagcattgggtgagtaaagggaagaatgcagttggcattaaagataacactatgtaaagttgaatggtataaagtgattactgtttttatttacgctga

SEQ ID NO: 50398 - DNA, 414 bp, Homo sapiens
aatcaactaaagtttcagtatattaagaaaaaataaacaacaacaaccacttcattttctagagtcgttttaggttcacaactgtcttctatacaccccactctcccactatcaccatccagccccagagtggtacctttgttactgtcaatgaacctacactgacacgtcattgtcacccaaagttcatagtttatattggttttgcacattctttggtttctggacaaatgtttaatgacatgtatccaccattgtagtatcacacagagttgttgcactgcccaaaaacttctctgtgctttgcctgttcatccccttctcccctcaactcctggcaacctttttatggtttccctagttttgcctttccagaatgtcatatagttggagtcatacagtgtggagcttcag

SEQ ID NO: 50399 - DNA, 791 bp, Homo sapiens
cagactgtgtcaacttcagctaaatttaactatatcatttgattctcacaaaataaacttggagatgtacaggggaaatttgttttttcctttgtttttatcacctttattaagataaaatttacataagagtataggtttctgagttgtaccaaacttatacagtggtataatcattaccaaattcaagatatgaatatttcagtattccaagaagttgtctcatgcatctgtgcagtcaaatattgttctcccacccccagtccctggcaaccattcatctgcattccttcactattgatttgccttttctagaatttcatatcagtggaatcatacaaaacataccttttatgtctccaacttctttcatttagcatgatgcttttaagattcgtgagtgttgttacatgtttcagttatttatgacttttgaatgctaaatactaatccattgaatggatataacaaaattagtttacccattaatcagtagatggacatttggattgtttccagggcctgactattttgaactaagctgctgtgaacatcttgtgtacaagtttttgtgtgggaatatgttttcatttcctttgggtaaatacccaggagtgggattgtggggttgttggtaaatatacgtttaactttttaagaaactgccaaactgttttccagtgtggctccaccattttatcttcccaccagcaaagaatgaggtcttactgctctgcattctctttgggacttggtgtttgtgcttctctgtgagtttagtcattctagtg

SEQ ID NO: 50400 - DNA, 506 bp, Homo sapiens
tgtattatgcttacaaaaagaaagtcagactttcaaaacagttttgtaatattcagtaatggtgagaatgtaggaaaacatgcttatactacggttagagtataaaactgagtacagtcttgtctttttttttttcattttttatctaagtaggagaggagtgagagtacagtcttctttaggggacagttaggtgacatttgtcacaaacataaatgctcttcacaaactatgaatcaaaaatttcattcctgtgagtcagccctagagaaatatttatttgtctgcagaaggttgtacatagagtgtcattgcatcataatttataatagtgaaacattaacaacaactgcagtatcgaataataggttcatgttttaataaattatggtatagaataccttgtaaccactagaatgaagatttacaatgtactatatgagaacattctaagatattagagaaaagtaagttacttattatatgtagaataaccccaagtgtat

SEQ ID NO: 50401 - DNA, 957 bp, Homo sapiens
gactgtcagagcatctttcactccatgtagcctctccacatggctatcctgggcttccttacaacatcatagtctcaggttagtcagacttcttatatggcctctggtttcccccagagccagcattttaggagacctaggcagaaatttcaaagcatcttataacctagccttgaattgtttagattttcttgctcaacaacctgtcacaggactggcccagattcaagggcatgattagccagaggtatgacttactgtgaggagccgtctttgaaacttgtcccaggaaaccatgattgtgaaagatgatgctgacgtgttctaaaagtagtagcagtgcaaggaataaaaattgatctgatactggaaatattttgaagataaaatgaacttgcctatgaattagttatgtataggtgggataattagagaagtgaaagattaatttgagaattttgagctgagtggtttgaagagtgggtatctatttactgagatgggaaagactgcaggacaataggtttgaaaagcaaaatcaggattgattaacattttggacatctgtgtaagagaatacatctaaagatgtagctattaagaaggggatctacaatagatctgtaagtcttgaagtagaaatgctatccatggtattatttgcaaggtacaataaagagagtattaattctattaggaagaaataaatattaatatcattaacatagaattaacatatttattaatattgcataaacctacatgttctaacatgtctttctacacctgtgttaagcatttgaattaaactacaggcagagagaattttttgaaggtttttgattagaagaccgatatgatcataattatgttttgggaagatgaatttaacagtgtaaggagtgaaagaagagtggggtagccagggactgaactctatgaaagcataccaagtta

SEQ ID NO: 50402 - DNA, 936 bp, Homo sapiens
accaaaccacagaccttgcccttgacagggttgtgtggtacccaaaagaataaccataatttgtgaatctgccctaagaaagattcagtgtaaaaatactgtccaggagcaagtgacacatctgaggcttgaagcaagcatgggtacaggacagcagcagtcacctggaaaagaaaagctcagtgcttccgggagcctgtttggacagaaggttaacagcaagcactgcacggccctaccctcaggtcgcaactgtggttagagtcgtttcttccactgaagactaacctggcggccgtgaacattgacacagattctcttgcgtaacaccagttgcatgtcagcagggtggctgagctggaccgtcacgcgcacgatcaggaacaaccgctcgtccacgggcgtgcccctgctgagctgagggcagccatgcaccgcggagtcccaggaggcttctgctttcacctggagagaagacagagaggaaacaggtttctctcttctccagaaacatgaaaactctttcaaggaaaccaccttggctcaggctgaaagggcacatgccagtcaccagcaaagttctactatgacagctgccctgaaaagacaatggagtgtgacagtgtggccacaatcaccttagcctgaaaagtatagagcatgatgatcctggctggcttacttttaaaatttgtattaaaaaatgctcaaatgtcaagaaaagttgcaaaaattcagtcgagtgatttgtacccctttcatcccgacgcaccaactgctaccatttggccacttttgcttctctttctcacaactcacacacacacattattacttttgctaaaccactttcaagtaagttgaaagtaatatctaggaaatttaacaggaatacactattatttaatataaaatcccttattcaaatttttcaat

SEQ ID NO: 50403 - DNA, 2602 bp, Homo sapiens
aacccgggaggcagaggttgcaatgagccgagactgtgccatggcactccagcctgggcaacaagaacaaaactccatcccaaaaaaaaaaaaaaaaattagctgggcatggtggtgttcacctttcatgccaactacttgggaggctgaggcaagagaattacttaaacctgagaggcagaggttgcaatgagccaagatcactccactgcactatggtctgggtggtagagcaagactctgtctccaaaaaacaaaacaaacaaaaaaccactttcaatttatgtaccttagaataatcagaagaatcaacttttgtaacttctgctttctatatgtcaaaacaggctcttgaagacaacatgtaaatgcttctctcacttgtttttatgcattttgtggggcaacaggtaggggaaagaggggataggggttgtcatcaacagaataacaacctaccagtcaacacctacatgaatatcaatcttacctcatttccttttctaataaggttacaagactgggtaggtcagtggaatgctgcagatatagtgtgtctgggctttactagggcacttaaccaaatagcctatgacattgttgtggacaagatggagaaacgtgcgatgcatctacttaagtgaaatcacagaggactcaaatatcacatccgaagaatagtgattaatgtcagcttgaaaaaagtctctattgttgtgccataggactctgtatttaatcctatctgatacagtgtttttatcagtgacttataggaaagcagacatttctatcaaattagaatgatgcaaaaccaggaaagtgactacacggatgacataatcaggctccaaagagccctgacagtcctgaacgatgactaacagatgaaactgcacagaaagaaacaaagtcttgcaggaggttaggaaaagaaaacaaaggaaaaaaaaaaaaagattccaaatgctgtatgattccaggaagtagggaagaaagatctagcttaaaaaatgcaaaattcagtcgggcgcggtggctcatgcctgtaatcccaacactttgggaagcctaggcgggtggatcacaaggtcaggaattcgggaccagccgggccaacattgtgaaaccccgtctctagtaaagatacaaaaaattagctgggcatggtggcgtgcacctgtaatcccagctacttggtaggctggggcaggagggaagttgcagtgagccgagatggcgctattgcactccagcctgggcaacagggtgagactctgtcacaaaaaaaaaaacaaaaacaaacaaaaaaatgcaaaacacctagtgttgactaaagctcagaatgagacaactataataggggcaacgagtggggactcactcaggagagaaaatgtccagggaagaggatccagagaaacggatcttcagggagcctggctggggagctccaggtttggaaaaggatctcagtcacgaatgatttcccactcctaacacactttacagcctatgaaacaacactcaatgttccctactctgttttactttaaaacaacaaaaaaatcagtatgaattgtttaatccttaaataacagtatagccagatccaggaatgtgtaattatatactttaatcatgcttatttgagatgagattaacaggtgctaaattacctggtagctgtccatgtcttcctcttcctcctaaaagaaaatatacattacaaagaactgaattattgatttatccaagaatcaggctacgctaaacaatctgactctttacccataatttatattttccaattgaattaatatactatttcatctcccacctacccacaccctcactctgggttttacagttgtcaggaagttggagccgctcacagaagagtgaagcacactcatttgaccttttcgggaaccagtgcaatgctctccctgctgggtttatagtcccactcgccaggggaaatcaaacacctgctggcaaatagtctttacaagccagtagggggtttctccagaggggtggggtgatgttgaggagttaatcactagcaggcactgtggaatctatgaaggctgagacgttttaaccctcagcttgccacctacaccagggcaaaaccagtaatacagtccgatgcagtgattccatgaaaatgcaagacacaaaaaaagacagcaaaggtaaacaaagagattcacggaaagaaatgttcataaaaagtagtttcgtacgggttccaaaaggcactctggtctgattttgtctttcaagaagaacataacaggtatagaaacttacatggaaggtctcatgtgttctgggggctctgagcggtctaactttgacacatccaatgccaacagacagtatacattcttccatcagtggtaaagtcccagattcctgcactgacttcacttcgacttgaactctccgggactgcccctgggtcacagacaatttagagtcttaaaatcagtgtcttgatttccaaaaatttgatttagagagacccctacaggctgatgttgagaaaaatgtttaattcagacactgtcactataccttattgttaagcatt

SEQ ID NO: 50404 - DNA, 1227 bp, Homo sapiens
aaagcacaggaattcaatctcatcaccatttggttcactggcagcatcgcattgtcctctgagaaccactgcacactgtcagcccacgtgaacagcaaatgctctcagctgaaaggggatttgtaacgataactaccaaaggagaaaagcatgtatattgtgctccaatttatgctgagaaaaggaaacctggcaaacaacaaatgcttgatattttaaaagcccttgttcatggagcaacaatacccttatgttaaaaatgacctcatgccatcagcaaaaaggaaatcacaacaaaagaactggcactcattcaaggagaaagtagaaagtgtcttgtttactctttaactgtttaggcaaatcagatgaggtttgtttcaaaggtggcaacagcaaattaaatagtcataggaaagaatttacttttggaagtcagaatttttaaaagctgaaagaactctgtgaagacatataatccaattatttcattttacagatgagaaagtgagacccaggaaaacgacagacttttcaaaggtcacagagctgattcagaacagagctgaaattactcattcactcgactcttcctggagttcaccactagggaggatgctggtaagtaatactatataacaaggactaagatgatagagataaatacaatatggtctaaaacaaacagcagagagccaaatcttgaaaggttaaggaagactctcacagaaagtgacacttgagacccaaagatagagaagcatcacccaggtaaagggagaggggagaggagggaggagagactgaagagatgggaggggaaagcatgttccaagtggaacaagagtaaagtcctagaggcaagacaacactcatcacttagctggaatttgtaacaccaagaagcacaagatgaacaataaaaaaagtaaaaggggtcagctcataaaggaccttgtaagtcacacgccattaaagaatttggactctgtggctgggcgcagcggctcacgcctgtaatcccaacactttgggaggccaaggcaggaggatcacttgagtccagaagttcaacaccagcctggccaacatagtgagaccctgtttatacaaaaaagaaaaaaaaggaacttggactttatcctaagggcctatagacagttactgaaaagactgaaggttaaaagtattaatgtagaaagatgttgcaacctaaccatggagaaa

SEQ ID NO: 50405 - DNA, 1066 bp, Homo sapiens
acatcacggaaagatatgtcacaaggtctttgttgtctgtggtttggagttgaagctgtttcagatagagaatagcacgacagtgtgggaaggcagaaaggcagggccacatgtggaggacgggaaggcacagaagctttttccgcatgtgaaggacagactagtccagccacagttatgagcattttatgcatattaacgcatttagtcctcataacaaccctattatttgcattttacagatggagaaataggcatagagagattaagtaacatcctgagtcaaaactaggtctgtctggctcctctggactcaaaactactcaatgcaagattgcgctgatgcttaggtgggagcgtgactggagataggagatcaggtcaaaggctgttgaaatgatgctggcgaagatacagtggaggtgtgccctgcctgccaagcatcaggaacaggtgaaaaaaactttccagcctggaaatctaaacatttgtttttagactagacagtatccacaaaatagggaataaaagttcagtgtttctaagcagagatttttaccagcagttttaaaccttcctgtgtctggctggatcgattcctgtgttaccagcgtctctctccaactaaagaatgttcgtctgggcaggattttattgtaatcaccagctaatgtttacactaagcaccaccttagtcccctgactagataggaacaccagtaatacagtttccaaatgttcagtacatggtgactaagctcacagttgtcagatgcttgcaccagatagcagcaaaggaaacactgacaatctggcccatttgctagtagtttgcaagaactcaagggtgaagtgagagggaacgtttaaggtcaagagcatgactgcctggcatataagtaactagggtctgtagctcttcacattatagatggaatttcagatgactggagttaaatggaggttttatgaaaacatacctaacctaccttctgcattgaatacatgcaggatctagagacggattgattcatctttgatgtaaaatgtaacacctgagtaattc

SEQ ID NO: 50406 - DNA, 946 bp, Homo sapiens
ataaaatttgtttaagagagttgacaagaataaataaatcaaggcaaaatagcagctaccacctactaagtaggtaccatgtaccagacattttacataaataactcactcatgcccacggtaatcttgcatgatccatatcacagtgttatcacctccacttcatagaaaaggaaacagaggctcagggaggtgatataaacttccagatttacacagctggtaaacagtaggcccagcactcacacccaagtctgagtcatgcttctcttcaaccaactcttgcctttcccatccccagacacagtggtaatcattaaactccctcgcagcacctctgttctgcagctttgctactgcttacggggttgatcaatttaaaaattaacccaatctataaattggcctatcctcttcctaatatttaagttcagttccttactatccataccaagttctggggggcaaagggaccagacaggcccaaaaaggccaggtcaacggacagccagctcaacacacagcaagagaatccctgaggacacagacaagggcatgcgagaggacgtcttagtgtggattcctcagaaagcaaagaccaaggcttctgtgggagtgtatcccaggcaaggagggaagggagtgagcatgaggaagtgtcagattatgagcacgtgaagctggcgtgagcccagactgagctggcaacagccagggttgaaaagtgatcaaaggctccaaggagaggtgaggccaagaagacctgaatcagcacctgcaaggggtctgatatggggcagaatgatgaaagcagaatctgaaaccctaagtaaagcttctggaaatggcaaggcataaagtcttggtccaatgccagagtgtgacctaatattttgttttttgtttttgtttttgagacagggtctcacattgtcactcaggctgc

SEQ ID NO: 50407 - DNA, 1844 bp, Homo sapiens
tagcaggaacaggacaaaacaattcccatagatgagataactccaagcgagaaaccaatttccccgagaaggacaaaccaacaaagcttatgtcaactggttgatctgtatgtctcaatatatacaaaagaaagcaaagaagaggaaaacaacctataatttctacataaaaattaaacaacacttgattttgctaagaagctacaactttgtctctggtacttaaatgattctaattagttcaaagtctcatcaatggcaaagtcatctcctgagacagtaatagtgacccccaatgacaggaccttgtatataaagcgttttcaaacacattatcttatttaaagcaactcacccagtcatgctgctttgactatcaaagccaagacccagcccacctcctcccctgacttttggggttctctccactccccgggtctacagattatttaaatgtactcggtttatctgccttctctacactccctgcagagttaagagaatgtcagaaagatacaattccacaagaatcttggcactttagctatttattgagagatgatgaatgagacttcaggcaaaaccaaaactttctcaactgtccaaaaacaacgaaaagggcatctcctccacctgaccccaatctcaggacgcccaggtggaaggaactcgccgcggggcacccgcctggccccctgcccttcttcccgccgcgggccaaggcggtgcaggcttgggcgacccgggcgagacgcggggtcccggggggtcccgggcggtcccgaggcgggctgcaggggctggcgacccgcgcgcgggggcgacgatgacagctggcggggaaggagcgaggctgaggggccaggacgaggctgggcgcgagggccgagggcgccctcgggaacctccgggggagacgagagggcaaaagggcgcaggggcggggcgggcgcaggcggaaggggcagcggggccggcacgaggggcccgacggcgccagggacggggctggccaggggggaagggaggggagaagagggagccgggcgtctcagcgcgggagcgggtttcagggtccccgggcccctcctcgcgccccgccgctgactataggggcggggccgccggaccccccacggcggccgagggaagggcgcgccaggcacctgccgcctccgccccggcggcccaggagggctcggctctcacctcgccggttcatgggtcgtatccgcaccgccactttcactttggagtcccccatcctgcagccgccgaggaactcgttcggcttccgtctgccgcggccaccggcgactcttcggggttgacccggcgggagggggccgggggcggagccgggggtggggaccgggctgggggcggggccggcgcgagctccgggcgctccccgctgtatggcgggacttgtagttccccagggtcgtcgtgggcggggccgcagcgaaggcgggggcgggaatgctcgggcgcgagtcgtttgctacaacttacctacagcaatgacggcttttgtaaattacacaccattcttgctctcgcagccagtattgagaagtaagccttcaagagctgatacctcttctgaaaaacaattgaatagatggcgtcagggaccccgctacctcttcctgctcatttcctgccaatcttagtgtttgatccctggctcaagttatttcctctgcctggattgacgtccggccttgtttgctgagctcgtccttcacgacaagttgcaaatcacgttttctgggagtgtccataggtccacgggttaacattgtcctgtgagtccccctcctttgagacaggaccttggg

SEQ ID NO: 50408 - DNA, 704 bp, Homo sapiens
ccctgtctcaaaaacaaacaaacaaaaacccaaaaaaccttttgattgagaaagtcttgcctgtctaaccccagacttgtgagaatctgctccatatgtgccttattctcctgtctaccacaccccacccatcaagtatgtgctgtttctgctatttgcctccttaatcaggcaccctgtccttccaactgtcattaaaatgacacagttgtttagccttccttttcagtgactactgggtcatgctggcattggtattgtaatctgaactcttagaaaacctgatcgtaatagtcacagtgttaaagattaaactacactatctcaatacaaacaaagcacaacagttactccacaggcaaaggcagagccagactgtccatgctcacagtaacaaagcatgtgagttgtgcactgaagtcctatcatgcccagcaagaattatagcagcccttgtccctaataataatgtctattactgggaactgcaaatcagtatcagtggccaatgaccatggaaggtggacagtctgtgcactaaccgcttgacaccgaaaccagtgttgctttcaaccccaattttttgattgccatgcaagttttgtacttgacctcagtcttccacattcattgctaaaaactgggacttctcatgtcctgcagaggactcttgtgaaatgtggagctttaactgctaaaaccac

SEQ ID NO: 50409 - DNA, 1095 bp, Homo sapiens
tacgctcctccggcgctcagcgcactgccccagccagagttttctcctcggcttagaggtttattaatgctcctccgcgctcccgggggagggggcgctaggtactaccccgccaggccccgccccgttccattccgggccccgcgccgtcccccgccccccgcgctgtcccccgccccccgcgctgactccccgccccctccgggcccctcctcccaccccctccccggagcttgaatggagcgcggccgctggctcccggtcacgggaactcgacgtcacaaagagcggagtaaacagggcgccgggtgctcgccatcaggcccattcataaaaccgaggccgagaggaagagggaggcggcctccgacccgccgccagcggcgggcagcgcccggactttgtgaatggagcgcgcggcgcctttcgccgtctacccgcgggcccagcctgcgccgcgcctccagcccgacaccggcacctgtgccgccgctgcaccccgccgctaggcgggcggcgccaaaggaaatagccggctgaggaggccagggctcgggtttgagctttcatcccttggcaccttcgcgcttccccgcgtgacagccccgtaggtttttcccggttacccaagtggagaggggaccggagcgctgctgcccacccagcggggcctgacacctcctagccccagactccccgtgcgctttcggcccggccagtcctttctgaatatgcgattcctgagacgttagcgtatgcattagcgtgatcgattttcatctaaagccattaaatcagttttatagcttccccaagaacgtgggcaaccccctgcttggaagatgaaagagaaagtcctcccgcccgaagcccaggatcggagtgaggtgtggggtttgttgctttactacccaaagggaggcattaattgccggaatggtgttccgagggaggagagcaggctgcgctcctgtccacgcttcctaaaagatgtttatttaaccctggtcgggggaaaaacaaggttttcgggtttgggaaacgtcttcaccctatcttgcatagttgtgaattatcctttcaggaaatgacagg

SEQ ID NO: 50410 - DNA, 900 bp, Homo sapiens
actaatgccactcctcattgggaaaaggcttccccatcgtgtttcagattcctcagtactttctgctggctcatagtagcttgaatggaatgggtgaggttcagtgagaaagtcagtggagagaacaccagcttccccctcccccagacaggaaatggcatcaagattaaagatctgctggtgtctgttgctgggtttccctctaggctatgaaaacaaatagaacacataattaatattcttcctgcagcttctgaaaggcctttaggcggaacatcagtgctcattttactatctatattcaggctgcgttttgacaccatgatatttttgggaaagtggggaacatggtgtaatctgggatcatctgtaaacaaatatcagttttccaaacagaaggagagtcagctgggggttgttctgtaggcaggggccccctgctaatctaagagatatgtgagaaaaggaaaaggggcgatttctacgctggagagtaggaaggtgttgttttggcagggatggttaacgtcaggagcagtagcctgcctgctgtcgactctgttcactttcaaatcggttctcaataaatatctttcgagcacctaccggacttgtgtgctagtccggtgcagagataaataacacataatcgctgatcagtttatagtctaaggtatgcagataagagaaagaagatttttaagtgattaatcatagcagaattctgaagctattgcccaatcaccaaactcagagtcgcaaagtgttttctgcttgccaagagcacttctgactgtcaatcagcctgtaggactcgaggtttatgggtgaccagccaaatccaattccttcttatggtgtgtgtttcagatatgcaagggggaaagcacagatttggct

SEQ ID NO: 50411 - DNA, 624 bp, Homo sapiens
tgggggtcagagacaaatcagactaatgcctgctctcaggggctcacaggcttggggttggggtatgctaggttttccttcaggccctgtcactcagtgactctaaacccttttttccttatgctctggataagatctgatagtcttcagacagtactcacagggttactactagtcaggtagaactgagatgttacaaggtggttaatgcaagtagaagtttattcatgtttattcaagtttattcagctcctaagatgaaaaatgtttgctctccttgttcaatagctccatttatttgtttatttcttaattatttgtttagagacagagtcttgctctgtcacctaggctggagtgcagcggcacgatcaaaggtcaccgcaacttcaaactcctgggctcaactgatcctcctgccaccactcctgtctaactttttttctttttttttggagacagggtctcactctgtcacccagactagagtacagtggtgcgatctcggctcactgcaacctccgcctcccaggttcaagtgatactcccaccccagcctcctgagtagctgggattacaggcatgcgccaccacgtgcctgtaattgtatttttttggtagaga

SEQ ID NO: 50412 - DNA, 1646 bp, Homo sapiens
tcttcgtttgatgaagacaaaccacagaccccagcaggaaagctggggaggggatggagaaggaggctagcagagtctctgatcatactctgggtgcccttgggccactgacagacaccctgtccatcaaaactgctcaccccaagaaaatgatcaatgacaagcagcccgtggtcagaccctgcaatagcaaaatgattccaggtgcaaaagggcgatgtctgtgcatgcagggtcagctcatggcactcacaggatgaggcacaggatggacgtgtgaaaggattccccaccaacacacacatacacacacactccctcttctgacgtcatggttaccaaggcaactcgacatgagtcatcatatctcaaggtggattagcagagcaggagaaaggcttttgtttgttcaaagctcttccccttctttcctcttaatagctctctctgatgttgataatagccaagtacctttcataccctcagaaatcctaaaatttgtgtgtttagctggtttaatcttagaaagcaatcaactttttcttgatattaggttggggagggaatccagggcttagttataatgttgcaattggcagagatctgaaatgatttctaaaactatgagggtggtgacttagcaatcatattccctctgcactgaggcccacccctgaaaggtgcctggccttctcagagaagccggccctcctagccccactcccctagcatctgagcaagcaggcacagactaggccctggggagcagtgtgcttgcagactttctattttgagctctgcaagtgcttcacagctcattggctgtgcatgccaaacaggaaggtcctcccggaagggccagggccacgtactggaggatttcacctagagcagaaagaaatcagcagagaaaaagggatgacccgtcatggggacaaagcacaatatcacaaaataaggccattcccctgtcctgagattagattgaacactctcctcggagatgctgcctggatctctcatggaagccttgagaggcatcccataactaattttggggtggacccttttcaactggaaatgccaggcagtgattactgaatctgtcttctatcagaagccttatacctagtaggcatgaccacgggttcaaatcacctcctaataattaattcgtaggcaaaaacaagtgctttgagctcaagaaacaaagaatgatggtttcttgggtgccagtaaaaccaactttaggcctctctcctccttagctcaaggcgcccctggttcttcacctctgttttaataggaagcctgagttaggttttattaaagtggaatttcttgacctggtaaagttcaactgaaggtaactgttattcaatgtttgcacaaaagaagcacaaacaattccatgtcaactcacctgtccccacctacaatgcaaacagcagctgtcaagacttttcatcatcgactgttatgaaaagcctaacatagaccaggaaaagtacttcttgagcaaaatgactcctggtatggaatctgtggtcactagagctgttaaaaaataataataataaaaaataagtgctggggagagaactaggctttgtatgaaagaaaaatttttaggctgggcacggtag

SEQ ID NO: 50413 - DNA, 571 bp, Homo sapiens
cttccttcttgggttttcttaattattgttgctgtttttccaaaagcatatgtgaaatattttaagatattgaatcatcatctaacacctgtttttcatgtggacatctgataaatactgctgcctgccctggtgagagcagagaagaaacccactgcccgaaagggttaatttggggcagttaaggacacctgttccaagtctgccatgggccttcatttccaggcttccaggctcaccagctcaggaagaggattttgctaagcagtggatatatacacaaaggcagggccaatgcaaataagaaattcctggtccacaaataaacatttcttaagcaacccacacaatgaaatggatgatagcgttttctacccgaacttttctctaattacatttttattgacttttcagaggaaatgaaaaaggctaacatataattggctaaaagaaatagaggtaataaaccaagccagaaaaagacttgaggaaatgtgtatctaaggtaaaatacctccaatatgaaaatctgtgccatgatgttgaagttacaaaattgcctacacatgct

SEQ ID NO: 50414 - DNA, 1072 bp, Homo sapiens
ctgtacataatggctggcaaatattcagataatgaacatgcttaggttgtcataatttttatttctctatcattaataaactccatattaattaatggcaaacaagcaaagatatttgagtaagtgaacagcaaagtagcagaatgacgtggatattttgtctgtgcacaaataaaaaggaatgaagagctgagactcaatataatacctcttttgagctatattcctttattacaacattttgcctgaaccaggcctgagcttcagcttggtagggagttggtgattcatagcttgtaacccacaggggcgttggtataagcagcttagaatatgctgagaagtgattagacagttgtttgggggagcagagtggacacttgggagaagaagcctgagaacccaaatgctttcttttaggattcaaaattactaaggctgttagacatagtggggtaactgtcggcaaggtagaaattagggaaaggctgtgtaaagttgcttagatggtgtgctggttggaattttggagattcactcctcactgcctctcgggtgaaatttcgtaagatgcttccccttgccattgctcttgggcttggccatgtgatttgcagtgttgatgcaatgttagcaaaagctggaacgtgttctcccacctgcacttctgcatgagaagactgtgctccaggtggtttgccaactccaaagggatgagagacatgtggagcagacctaaaagcaacctgcacccaggccccgctgagccacacctagatcaatcaaaccacagttggcttgtagacttatgagcaataaataaacatcaggattatatgtcaccaagattttctggttgttgactacacatcaatgtgtttctgaaaaataaataattcaccatatggagaaacagacagtacaataagggccaagcattaagagggaatggtggttccaggatttaaggccccctcagcacctgattctgtccccagtggtgatccatcatggaaacagacttgcaccctaaggaaatggctgagtgagtgaaaggaaagaagaaccacaa

SEQ ID NO: 50415 - DNA, 3392 bp, Homo sapiens
gagaacagggctgcttgcaaattttcccttaaatattatgcccgatttttgaaggaacacatttcttgaaaagtgaaaatacatttttcacaaagaatgtgctactccaaatttgctgaaatgatttgaattttattcatttcctttggcaactaccagtgtgaaaataactttcagtgtcatcaataatatatggactattggacacaacatggtatgcatattgcaaggaataatactcatagaaccaacagaatgtgtgtgtgcatgtgtctatgtgtgtgtatgtatatatatatatatatatacatacacacacacacacgtagagagagagagagagagagagagagggatttaaggaattggctcacatagttatacgggctggcaagtccaaagtctacagagcaaacagccaggctgaagacccaggaaagagttgatgttgcagctcaagtctgaaggcagactggatcagaatttcttcatcctaggggtacctcagtcttttacttcttaaaatcttcaattgactggatgaggcccactcatgtaatgaaaaataatctgctttctcaaagtctgctgattcaaaagttcatcatgtctaaaaagtacctttacagcaatatgtagactagtgtttaaccaaaagcttgaagccatggtctagccaagttggcacataaaattcaccatcacagaagcaaataaattttttaaatagtaaaattgacaaaagctgcaaaattggtgtaaaatataagatatattgtaaccaatacatttcctatacaatgtacatattttgtggctgaaatttttttaaataaaaagcattcagtttttggttgaaataatctgacaaccataaaaaatgttgtgttccctacgaaagtggatgtacatatattttcacatacacaagtttgtttacaacaatcaatccatcaatctcccacactacaaaatcttgacttaaagaagtcaaggcaatgcaaaaataagacatacactttgataatatcaggaaaaacacttcttacaggaacactaaatccttggggaaacaaccaagccttttattggatattcctgggacagaaatggttctaacctgattcaatatacttttaaatttgcagggggtgaaaattattactttatcaaagggtaaaaaatggtacattgattaaagaaggggctattagaaactctggcaggcaaaggacaacttttaatttaggcacaacctaaaatttctccctcacttccaggagttattctgcccaggttctggaatctggccagatgtgatgcagaatcccctccccactactcacctgctctgtgaccttgagcagtgatttagcattttcttcatctcattttcctcttcagcaaaatggagaccataatgcctacttcacagggtttgtgaagaattaaatgatctactttatggaaatgactaacggttccagatacataatgagtatttgataaatgctagctatcattggattcattttgttctcataagatattaatcatttggacacattgacaagcaggagaggaaaatcatgttcatttacccaccactctgatagtgcaaaatcaaataacactgatcctgttcactggagatgagtcatatagccagaatctgttagcaagtggtaatgccttctctggaactttgcctgcatttgggacatgttgggacatgccagcattatgcaagcaacagtaccttgctgatgtctgtgtggctttcctaatcattttggtatggttaagagtagaaaataatcacatgcttttctatcctattatccttttacaaacaaaattgagatatttaaacatgagatcttaaaaatggtgggattaatagtttcaccaaataatacattgaaacaatacaagtagaataaggtttaaagaaatatgcacaggctggacgcagtggctcacgcctgtaatcccagcacttcgggaggtggacggggtggatcacgaggtcaggagtttgagaccagcctgaccaacatggtgaaacctcgtctctactaaaaatacaaaaaaaattgccgggcgtggtggcacacgcctataatcccagctactcaggaggctgaggcaggagaatcgcttgaacccaggaggtggaggttgcagtaagccgagatcgcgccacagcactccagcctggtgacagagcaaaactccatctcagaaagaaagaaagaaagaaaggaagaaagaaagaaagaaagaaagaaagaaagaaagaaagaaagaaagaaagaaagaaaggaaggaaggaaggaaggaagggagaaaagaaaagaaaagagaaaagaaaagaaaagaaaagaaatatgcacacaggaacaattgtatagctttcttattgctatggcttgaatgtttgtcccctctgaaactcatgttgaaatttaatcccaattataatagtattaagaagtagggcctttaagaggtgatttggtcatgaaggctcttccctcatcaatggattaatctattaattgactaatggattagtgggttaattaattaatgggttatcacaggagtgggttagttatcatgagagtgggtctctagtaaaagccagtttggtgtgctcaagctcccccaccatgtgatgccctgcaatgcttcagggttctgcagagtccccaccagcaggaaggccctcaccagatgtggctctttgaccttgaccttggacttcagcctccagaactgtaaaaaataaatttcttttctttagaaattacctagtctatggtagtctgttatacaaacagaaaatgacgaagacacttaacaacccttgcacttagttaaacctctttaaccttaatttttccccagacctaattagaatgccctttctaactcacccgaatacttctggtatccaaggcttccaaggatgactctgggatttcaggccagctgtccccacctcttgaaaatgtggctcatgtacgctttgatggctctatgtcctatcagttgatagagctaattaaaagagagtcttattctgtttaaccttctgggtctgtatccctcttcatcacataatagaagcagagataataaagataaagctatacaacaacataaccctaaatttggtgattatttttcttttactcataaaggaagcattttccaagttctaaaggagtcacgaaacctccccaaacaagaagaatctactcatcgtctcctctgtagtttttcatttcatatattctcaagagtttttctgtagtttgactgagaacttggtccacagggataggtcagccgtggttttatttccacagtctaaagagccaccg

SEQ ID NO: 50416 - DNA, 1780 bp, Homo sapiens
gccaggggagtgggaccaacccacctacagccccatggcagaaaaaggggttgcaggaagtgatgaagagctggtgacccaaagaaacctccaggagaactgccgctggggcccatgagagacagagaacaccacggagacatctccaaggagaaaggagggatgcgtgtgcctgaggctggaatgccaagattttgctgttgggagcaaagcccgacactgatgttgagtttcccctcctttgactcagattccttgcctgctaccccagggcaatggaacttaagaaagcactcgtagaccaaggagaccatgaccagcaagaagcccagactttgggaggatttcaggcgacagagtgttgggcagagcaaatgtttcatctgaacactcccctgttccaggtgactgcccctttaaggaaaagttgaagatgctgaactctgggggccttgagtattgtgtgcaggatcaacatatccacaaaacctgggaaattcctgataggattgtggtgagaaaaataaacacccacgccattgccgggctgggcactaggcttcctgtttgagatttttccttatcccattccttgtcctgtttcttgcacccctatttcctgcttcagcagacagggaagtccatttcttcaactgaaaagaggagagacagttgacgagacgtgaagtctgattactgttactgcagggtcctccggccagccccccaccacccaccccgccgaatgctcacagaggccaatgtcaggtggtgcaaagtgcacgagagcaggcagctgggacagctgtgctctgggcactcagccagccccgtccatctgttcctctgtttgtcttgcgaaatggaagagaggcttctgtgggcctctccacggcgggcagccgcagggcaggtggtcagatacatggggccagccatgtggccccgggaagatgggatccggggcagagagagggagtgggagccagggtctcagcactagaggagaggggctcccagctgaacccagcccacccatatcacagtgggtagagctgcaccctggctcactcctcacatcacccctgggccttcaggagtttcagggggtggagttcagtgactgttgcttgagaggaaggagagtgagtgggcagtcaaaaagccacaaagaaggtcctgcaacatccgtctcttaaattcgttttctgtgatctctgctcactttttatgccaccatctacctatctacacttgatctctaaagttccctccccaaccaaaccgtgcactatctagaaggttgagaaataccttctggtctggcctcatccccatgaaacttcccttggtctcagtgttcaggaagctgccagatggtggtgatgttaactgcaccccctggttttttgttatattgaaactgaagatcccctccctcccccaatgcccacaggtcccactcagctgcctcaccctggtgctaagcccagacatttgctttctcttgagctgtttattttgccagcaggcagggtcacctgtccaattgcccgctaatgaactgtacagtcttaactgccaacccactcccgcccgagaggagagggaaaggaatgtgagtggctcaggctgcactgtcaggattgggttagctgggcaggaggaggggccacggttacagctggaagcatagacaaaaaatttaaaaacctttcttatccatcggtaatgcacaaagctctgtggtggatggtttgggcagattagccccattcaa

SEQ ID NO: 50417 - DNA, 1522 bp, Homo sapiens
gatgtgagccaccatgcccagccagagcattttttgtaataacaaataaaccaggctggatgcagtggctcacacctgtaatcccagtgctttgggaagctgaggcaggaggatcacttgagtccaggtgtttgagatcagcctgggcaacatagtaagaccccatctcaacaaatatttaaaaattagctgggtgcggtggcatgtgtctgtagtctcagctgctagggaggcagggtgggaagatcacttgagctcaggagtcccagggtgcagtgagtcatgatctcaacattgcactctggcctgggcaacaaagcaggaccctgtctcaaaaaaaaaaaaaaggaaagaaagaaacaagaaaacacctaataaactatgatgcagccatataaaataattgtaagcaaatgtttaaaagagtaagtttggtccatatgcaatgatatgggaatgtctccaaaatatacaattaaacaaagaaacagaaaagacaaggtgttgaagggtgaatattgatcctgtgagtattttttcaaaggataaacatttacagtggtgaactatttgaatagtgatgtaatctttgttcttgatatttcctgtttctctgtgacctttctgacactccagctgcagtcagaacattctacatgtactgcctcagagaagcactacgcagagaacaaagatgtcaattcctggctttcgaatttttaaataggctattgattctgcaggcatgatagctttgaaagtttcaaaagctaatgtttttgagttataagaagctggcttttgaaatcacatcatttgtgccacaagccatcatgttggaagaatgcatgctcagctgaacccatttttgctcactctcagactaaacagagattccatggaccaggaaagggaagtgagttaactgcaattgggtccctaagaaagggccctccccaaccacgcaccagggaaggatatggtagaaatcccagacacactgggagatctgagagcagagaagatacagcctcactacagggaggtggcaaacattccagagttcctcatgtgctgcaggacatggcagcagaagagcagagacaactgagtggcgtggccctgagacatcgcacacttcccctgtgcaacacccactcaggaatggggagaatcaagtgtttcctgaggcacccagaagggtcccagaagtaactgagaagccagatctcagaggccttgaagccagaatgagaaagtctgcaacagctctctgcacgaaccactggctggatactgaatggggcaagagccccaaaatgctgggtggcaggcgacaccaaggagctcctgcctcatccactttgcaccttgcaccctatcaccctccatccaccaaccctcagtcacacccctcagtcaccacccctcagtcacaactccaggaaagggcgggggtaaaccctgaaatgcctgtgcttaagttcacatttcccaatggcagcttaaaaatagaagtaat

SEQ ID NO: 50418 - DNA, 1168 bp, Homo sapiens
aaaatccaggcagaggcagtaagattgcttgagcccaggagttcaagatcagcctaggcaacatagagaaactcttgtctctgcaaaaaatgcaaaaattagctgggcatgttagcacacgcctgtagtcccagctacttgggagactgaggcaggaggatcatgtaagcccaggaggttgaggctgcagagaaccatgattgctctactgactccaactgggcaacagagtgagactctgtctcaaaaaaaaaaaaaaaaaaaaaaagaaaattccaatgacaaggtcagaatgattcatcccttcccaactttagactcagacagtctatgacaacatcttgccatctgttgtatctgacagccccagtatctagatgtaaagccatctctcaagaactttggtcaacagtaacagcaccttgtttacttactatcatccatcccagaaaggcatcttgatatccacatgttggaaagcatccaacaggtaagtggcgattaggcctattattggtttagctacaatcatctagatagtccaaatttggacaagtcagcattgctgaatcacacaatctcctggaaaattcaagcaaataaacaaggaatctgcctttcacctctattacaattcacctctattcaaatgaaggtgatattttcatggtggattctcgcaccagcacctatcttaatacctggcacatagacattagacaaatgtttgttaaataaatggatcaacgcatcaatcaatctgggtaattataggcataccattgctatctggtctgcaaactaaattgcaggataaacactcagccagtaaaatcactaccagagctagatggttgtatatataccaggaatttttgtccagatgccaaggggaggtggaggaggaggctgggaactatcccagctggcatggctctatagatcccactgccaaagaaagcacagaggcagaaacggaactttgagccaactcagtgaattcacaggctgggagataccatcccatctcttctcataaataatggaggcatagcatcattctgtgtcttagctttgccattttttaagtatataaatttttaattgacaaataattgttcatattcatggggtacatagtgatgttttgatacatagcattattcta

SEQ ID NO: 50419 - DNA, 472 bp, Homo sapiens
gaggaagtccaaaagagatgtgtgagagatactgcatactcttccagtagccacctgggtttccatgaaaatgtacttctgcttaagcaaactttcatctctgcatattttaaaaagcagccttcatcaagccctttttaaaaggctttgttgtacatttccccaagagcaatagatgtctgcttaccctatctttacttatgaaccacaaagaacaaagaagatccgctttggaatgactcactttatcctcccatgcaggaagatcaaaggccaagtttaaatggcagcttctctgacatccatatcttaattacagtctgggtgccacatttaagcataaatcttattctagaaatatatcttataaatctaaacacatgtacattaaagatctaaactataataaagtctctgactccagtgtttggagcagctacaacataaactcatgtacaaaagatatgttcgg

SEQ ID NO: 50420 - DNA, 1493 bp, Homo sapiens
cagcggttctcataaagacgcggtggctcacgcctgtaatcccagcactttgggaggatgaaggcgggtggatcacgaggtcaggaggtcgagaccagcctggccaacatagtaaaaccccgtctctactaaaaatacaaaaaaatagccaggcatggtggtgggcacccgtaatctcagctaccggtgaggccgaggcaggagaatctcttgaacccaggaggcggaggttgcagtgagccgagatcacgtcattgcagtgcggccggggcgacaatgtgagactccgactcaaaaaaaaaaaaaagagtgcaatctgcgattctgctaacagacctgcgaggtctgcagccctgtccgctaagggtgactcagagactgccagtggcaggcaacggccggcgatagcaacaggcagccatgacaacagcaggccacgatgacatcacacagccataacaacaaagcagatgcgcaggtgagtgtccagctctccagttatactcagagatgagaaagacgacaatgggcaaattccgggagtccggggcagggagaaaggggaccttaaggatctccagccgtcccgccccgcccactcgagcagtccctacccgcctcccaagacgcctgggaagagcagtggaaccagggagagcacgaacagcaaagaggtcagacatggggaatccgggcacccaggctccgggaagacggcgcacggaaacgcaggggagcctgcaccggctgacggcggcggaaaagggcgaacgaagcgcctgagggccctggcagcactcaccagggtcgttccagcccagggcagggcccgcggtcagcagaaacaaatgcaagccgaggagcaagcagtacccggccgctcccggcccgcaggctgcggccatggcgctcgatgaagatggcgccgggctgccagacgcctacgggccgaacctgggtgcggtagcgcgcgcgacgctgcgcagctacaccgctacccctggcggcggcgaaggaacggcccgactgcagagctgcagccgcaacggatccgtgcgccaaccctacgtcactgccgctgcggcccgtggggctcagtgagtggccgccgtgggcccccgcccctggagcacagcgcggcttggggcggggcgaggcggtgtgggcggggccaagggcctggggaggcacggctggaggcgggttggaggcgtggcgccgcggtgtgggcggggccgagggcctgtcgccgccgcgcccgcgggcggggcgagggcagcgcgcagctttgttgtgtctcgtctgagattcgggaagcttctgtgcgtaggcgatgcagtttgagaggctgaaaacgtcacgacgcgaaatctaagaaatgtagtcaaattatgtattattaaaacctcaataattgtaccaagggtagttctgtgctttattcagctctatgtgttcagcacttagcatagcgcttggtacatggttagtgt

SEQ ID NO: 50421 - DNA, 353 bp, Homo sapiens
ccaccaattccggacacaactggtccctagaccagtaaaccaaaaatggtccttagagtgatgagtgtttttgtgctggaaacactgaatctcatgggaaagataaggagcacaatctctcaggattctgtgaccatggaagaaaagaatgtagattcctgtaacctgatgagtaatcccagttgcccatgaatgttgtcaaggacatctgtaatgccaacacatttgtactgaaaagagcaaatcaggctgggggtagtggcttacacctgtgatcccagccctttgggaggccaaagtgggaggatctcttgagtcccagagttcaaaactagcctggacaacatggcaaa

SEQ ID NO: 50422 - DNA, 1950 bp, Homo sapiens
gataaacgcaggggctttgggtaccatcaaccgagcgcgttcccaggagctgctggtacagcttgcctcagtatcttatcagtaagcacattcctggatgtgcttggtgtcagtctgcaccagttatgtccttaagggagggggacaaggtgctgcaagcgaagaaaccaaaatggagtctgtcccgctctctcagctaagagcgagtcaatcaggttaaaacaaggtagggtatcaagctgtaatcccagcgctttgggaggccgaggagggcagatccttgagctcaggagaccagcttgggcaacaagatgagagtctcacaccccgccctgtctctacaaaaaacaaaacaaaacaaaacaaaaaaaagccaggcatggtggctcatgtctgtggtcccagttactgcgaggccgacgtgagagaatcacttgagccctggagatcgaggctgcagtagccgtgatcacactccagcctgggcgaaagagaccctgtctcaaaaaacaaacaaaacaatgtgaaattaagccaaaagccatcacacgtgcatccaaaggacggccgctacccgcgaccccttcccaacgcacgcgggaggttgcgggatcagggacaggggcttcagcagggagcccccagaccggccctgacaggaattcaagacctggcgcctgctcattcccccagtcggggcggcggcggcaagcctcggccggcggcgatctgcacacccgcggagaagagaggcagggggtcgaccccacagcccagcccggcgcgtcccccgcgcccccgcgcgagcccgagtcgccggcggaagtgctgcgtcgcgcacttccgggtgttgtctggccgccgtagcgcgtcttgggtctcccggctgccgctgctgccgccgccgcctcgggtcgtggagccaggagcgacgtcaccgccatggcaggcatcaaaggtgggcctgggttgcaggacgcgggagggctggggccggcgggggaagatgggccgggggtcccacgcggcccccgcacttcccctccgggctcgcgcgcgcgcgtggggtccctgcgccggggaagcgacccccgccccggccctgcgcttggcccggaggtgggcgcggcgccctcgggcaacggacggttgcgaccccggcttcgccccgcagcccccactttctgccgatttcggcagcctctctcccacccatcgccccccggacaaaatatgaagtggttggcggtcagtgaggagtcccgtcgcgacttggacggccacacacgttttgcaggagtttgcatccgagagagaggcaggcagagcgtgggattgagaaggctgaggctgctagagatgccagctatggaaaaccagtcatttcccaccgaaaggcacaagtgcggtctgcgggcgctgcacgggtctgcccgaaacctcgaccccacgtccaccccggccgcccgcgcccgaggctttacaggctcccgaaacgggtgcattttcatctgcggtgtctggaccctagagttgatcctgtaggcgaccccaaagtgctcctggctctcttccctctccgcagttgcaccctgaggctttttcaaatttcaaaatttttctttttttccttttttttttttaagaagataaaatactggtacaacttaatgaaaaactactggcttattcatgtattttcttttaaaaaaaggaatgttgcatttgttccacctgttaggtagttttgttgtcagtgtgatgagaagcaaagttttcagctactgcttaactaattacattgatttcttgacctgccgctctgtagaagggcagtcaggcaggaagcaggtaactttgggagcagtggttttctttgtattttttcttctctaaggaaaacttaatcgagttttttttcagggtcacagtcttactgtttcttgttta

SEQ ID NO: 50423 - DNA, 727 bp, Homo sapiens
ctggcgacagcgcaagactccatttaaaaaaaaaaaaaaaaaaaaaaaaaaccagcaaaaaaacacttcactggttgagctgagatctgaaggaaaagcaggagttaagttggaggaaagtagagaggagtgggaaaggaccatgcctcattcactgttgtatccctagtgcttgtcacatatttagtgctcagtgaatatttcttgaatgaaaaaatgtctgaggcagaagggacaaagtgtgcacaggccacgtgagtgagcaagtctgctgatttccaggaaaggaaagagggccagtataactgaagtgagggttcagggacactgtagtagcctggtgtgacacgtcacaggagaggtgggcagggcccggtcatgagaaccaatttggaactgaagaaaacaaatggtaaattcagtgttttccttacagtttatattgcattcccctgtaaacttgaagtgcctcgtttgctgtaaagtaaaaatgcaattcttttcctgtagctggaaatagaatggtattcaggactaagtgatgtgttcggggttgccatgacctgcatcagcgatctaaccaaaaaccaaatctgccaagccactatgtcatggggtgtccttgattatgactgttttagttgtgcagagtatatcagtagtacttggcaaagtttaacttgtttcctgttcattttggtttctctatgttagcctttgttttggt

SEQ ID NO: 50424 - DNA, 619 bp, Homo sapiens
ggactaagcatattgatcctccctacccctactcctgcaccgaatcttagaaatgataccctttttggccaggtgcagagtggctcacccctgtaatcccagtactttgggaggctgaggctggcggatcacttgaggtcaggagtttgagacagcctggccaatatggtgaaaccccgtctctccaaaaaaaaaaaaaaaaaaattagccgggtgtggtggctcatgactgtaatcccagctactccggaagctgcggcaggagaatcgcttgaacctgggaggcagaggttgcagtaagccgagattgcaccactgcattccagcctgcaaaacagagcaagactgtcacaaaaacaaaacaaacaaagaacagagaaatacatgggcaaagttaaaacaagaaggggaagccttggtggatctgaaactaagaaatttctgagaaaacgaaaacatacgggatcgtattgaagagggaaactgcagcctaaaatgctgctagcaagcgtgggagaatactaccataaaagttgggacccctgccaaagagcctgtcatcgctgcaagtggtggaatccaggagcaggagggggcttactgaggcaacttgcagagg

SEQ ID NO: 50425 - DNA, 983 bp, Homo sapiens
tccctctgtcacccaggctggagtgcagtgatgcgatctcctgtctcagcctcccgagtagctgggattccaggcgtccgccactatgcccagctaatttttgtatttttagcagagacggggttttgccatgttggccaggctggtcttgaactcctggcctcaagtgatctgcctgcctcagcctcccaaagtgttgggattacaggagtgagccactgtgcctggctgaaaatagtctttacaggaaaattaaaaaaaaaaattctaggtatagtcaggaggatggcaaagcaagtgaaccaaccgcaggctagaatcagataggtgaccgcctggagcatcacagcctctgtgctccaagtgaccctgaagccaattgtgatcaccagagagagccaggaacatgagatctccagatcacaaagcaatgtttcctctcatctcagggatcttgctgattcatgacaacacttctctagactgtaattagctcttgatttctgttttctagatggggcgcctacccttcttcagcaagatgggaacagctgagtctgaaggaagagaaacactgacacagcagctgcctctcccagcagccgccatgagaagattgttacctgcaagcagagtgtccactcaacccgtgctgaggctggcagacagtgctgagtcacttctgggcaggcctgctctgtgggctctaggattcctgctttgccctccctctcaggcacaatgacaactactgctcagtgccagacactgcaccatgtaggcaacacgtggcagtgatgattagtcacaaaatcacatttatattcattctaatgaaactgccattgcaaaattataactgagacagtgaaagaagtctgacctaaccaactccatcttgcttctaacctccaagctgtccttgttcattcccgggactcattttgggaggaacttagttaatagcttacagtttaaaacaa

SEQ ID NO: 50426 - DNA, 2839 bp, Homo sapiens
gggattaccggtttgagccacgcgcctggcctcaatttgtcttttaaaggatgattttgactacaagagaactacttggatcagggttgggggtgggagatgaggaggtgtgatttcagaggccaagtacagaatgagtgaacaactgggagagacacatcggctgagattagagagatggtccggtagacaaaagtgtaagcatgagacccgaggtaggacaagcagaacttgcagatctattacagatgtaggggtgaggagtgccagggtgactcttgagtgtctggcttgagcagctaggcaaatggtgtggatcaaaaaagcagcaggttgcagggaggacggcagtgttaatcgaaagtcatgttctgtaagttttaggttcgatacgactctgagcggagatgtcaattagtcaaccgaatgtcaggtgtgaagatcggcacagagggcagaaccagagacattcattagagagcaaacaggtagagggcacttaacctataggaaggatgcactcatatagagcgagaaaagggccagaaggagccctaatgagtagagaaagacaggctgaaaaggacatcggcgaggtcagagaaatacctttagggtgtaattacgcctacgcgagtgggtaaaatgagggcataatgacgcggactggattgcaataaacagcttttattcttttatcagagacacgatctagctttttagcccaggccggagtgcggtggcatcctcacagctcgctgcagcttcactgggctcaggcgatcctctcgagtagctggggtacaggcgcaggccaccgtgacaggctttttttttttttttttttttttttttttgaagagagggtctcactatgttacccaggctagtctcgcagtctggcactcctggcctcaagcgatcctcctgcctcggcctctcggcctcccaaagtgctggcctgtgcccagtcaatggctgttccaaattagggtctacccatctctatgcagggctaaagtccgcgggcggccccgcaccgctaccaaaagtacagtcctgtgcgcccagacgcgacgcaaacaagagtcgcaagcttccgggtccccgccccaccccggctccgcccctcccccaaccctgccaggctctccaatcgcatgtggaattatcgctctacccaggcggtggtgtcgatctacgttccaattggggccgtaccatggcggagaagactcaaaagaggtgggtttgctgcttgagaaaagccttttctcagctttccgtaggggtggaacctgttcctggtcgccaatggtggcgactcagaaggtgtctcatcctgggcattcgggccgaaggtacctgaagcccagacctggcgtccactgagggagggggcgacggagtgggggcggggagggttgagaagggacgcggagtcgctgcctggaaggtttttgttcctgtctggccgtccctccccacatgcgcctgcgcagagggggtctcccggccgggagggcggggggggctgtgaggggagggtgacgtcagctttttcctggggaaggccggctcccttctcccgcataatcggcggtgcttggcgccgctgtaccccacggcttggcgctggattctctgctgcatgttgcgagacccccacgccagtgctggccgcaccccaggcccttcctgtctctggagggtggggtgtgtaaagggatttacggtcgctgtcaaaaggggggccgcgcctggacttgaactgtgacacacacacacacacattatatagatgcaaggagtacttgcgcagatttgttgcatagataaattgcgtaatggtgaagttggcttctagtgtacttaccacccaaatagtgaacattgtatcagatgggtaatttttcagccctcaaacccctcctaccctcgctgcttttagagtccccagtgtctgttatttccctctttatgtttatgtgtactcattttagctcccacttaaaagtgagaacatgtgcatttgattttatttctgagttatcgcgtaaggtaatggcctccagttccatccatgttgttgcaaaagacatgtttcctttctttttgatggctctgtagtattccatcgtatagatacaccacatttcctttatccagtcatccgttgatgaacacttaggttgattccatactttgctattgtgaatagtacagtgatagtcataggagtgcagttgtctttttaatacaatggtttcctttgagtagatcctgggtcgaatggtagttccgtttggattggtagctctatatggattgctgggtccaatggtacttgtgtttagtcctttgagaaatcaccatactattttcaatagatgaactaatttatattcccaccaatagtgtataagcttagaactgtgacattttttgccaggcgtggagtggacaagctcctttgtaaacatgtggggacaggaagtttggcttcttctccggtagtcttcattgctgggggctgttggtggctgttggtggctgggatgagacaagtgcataagtaaagccatttcgaacagcagcagtgttgagctccctctgctgactatttttgacaaagaaaactgacattgtttctggtgccataaattaaaatgtagatttttcttccatttaagtagatactctgtaatcttttttcataagctaaagaggaacagatgtactataaatattatgtgcagtagatagcagtagatagtagcttacagtgaagattaaggtattgttgacttgttacttttacagatctgaggttaagtct

SEQ ID NO: 50427 - DNA, 948 bp, Homo sapiens
gatgcaaatagataatgaagaatcaatcccaggaagaggaaagggtgggagaggcattttacagcttatcaagatcaaaggacagaggccatctctaaacaaaaccaaaccctgaaactcaccatcacagaactatgtcaaaaggtttctgcatccccactacggcacccatcaccatgactagcccagagtatttccaaacgattgctatccatcatattttcctcagcacctcctatttgtaacttaacaatatttaacaactgcttccttgatctcttctctggctgacggattgaggctgcagtatttcaatttgccagcaggtgtcaccccagctaacacgattcagagaagcctaaaaatgtgaggttctttttccgtacacctttgatggcaccaaaatgtgtgtgggcaagtgcaaagtccaaattcctaactaggacatcccaggcccttcatatttggcccaactcatggtttactgccttagttcttgccaattcaggcacacattcaatcagcagaggtttattgaacattcgttatttgtaaggggctatccgggggctggaaatgaaaagatgacagagatttcacctctgttccggagaattgcatggcttactctgcccaggagagggctaagctgctatgttaaaacattggcagccgggagcggtggctcatgcctgtaatctcagcactttgggaggccgaggcaggcagatcacgaggtcaggagttcgagaccagcctggccaagagaccagcctggccaatatggtgaaaccctatctctactaaaaatacaaaaattagccgggagtggtggcggacacctgtaatcccagctacttgggaggctgaggcaggagaattgcttgaacccaggaggcagaggttgcagtgagccgaaggtcacaccattgcactccagcctgggtg

SEQ ID NO: 50428 - DNA, 566 bp, Homo sapiens
aattatttaacatttatatatataaaattatccatatccatagcattggctaagcatctaagctgctaatcttaattataagatacaattatatatatgagagatacataagacactggataagctactcagaggtttaaagaatctgaaattaatttatttctcaagcaaaaggccaggggtgggtggtccagactggtcgggctactcagctccatcgggtcagtcggggccatggcttcctcccatccccttggctcacagttcctaggatgttgtctttggctgcatggtcaaagctgagtcataacctcatccatgcttcaccctggagaagggaaagagaaaaagtggagggcatgcaatttggcttttaagcaagaaacacagaagtcacacctagcacttctattcacattctagggcatggacctagtcctatggccacatctagctgcaaggaaggctgggaaatgtagccttttgctaggcagtgatgagcctagttagaaatgtggggcagcctgggcaacatagcaagactccgtctctgcaaaaataaagaa

SEQ ID NO: 50429 - DNA, 1333 bp, Homo sapiens
ttatatatatatatatatgtcttctgtataccaagtatacaaataataaatatcaataattttatatgttactagtaatagctgtgatttattgagacctagtctatgactttccctggctactttcttctcatgttgtaagtttctgcttgaatttaatctcagagaggttttccctgatcgccttatcaaaagcaactgctattccctgttattctctgcttcagctcataaaccttgtcctttatagtacaccaaaaaaagcacaatcatttgatttttctggtctgtcttccccactagaatgtgagctccatgagagggaggcccttgctggtcttgttcacggctgtctccctaaagcctagcatagtgcttggctcatagtaggtatatgtgagtatttttaaaatattggtgtgtccattatgtattcttgcttaacaagccatcctacaatgtagtggcttgaaacaaaacagtaatttctcatgattttgtggtctggctgtgtggttctggtcttgtctgggctcactgaagaagctgcattcagctggtggattggctggagctagaaggtcccagagggcctcacttggtggggacagctggaagacgggggcccctctctttatgtagggtagcccaaatgtctttacatggcatctgagttccaagagtgtaagcctcaatgtgcacattttttttttttttttttcttgagacagagtctgactctgtcacccaggctggagtgcagtggtgcgatctcggctcactgcaacctccgtctcctgggttcaagcgattctcctgcctcagcctcccaagtagctgggactgcagatgcctggccaccacgcccagctaatttttgcatttttagtagagacggggtttcgccatgttggccaggctgaatgtgcaaatatttatttagcttctgcctgggtcacagttatgtctcattagccaacaagtcatataaccaagtccagagtcagtatgggaggaggctacccaagggcatgaataccaggaatatcagtagggagccatcagtacaacagtctataattttgtatacatcattgctaatactgacagcagcctgccacatagttgctatttcttttttttttttttagacgaagtcttgctctattgcccaggctggagtgcagtgacatgatctcagctcactgcaacctataacctcctgggttcaagcgattctcctgcctcagcctcctgagtagctagaattacaggcatgcaccaccatgcccagctaatttttgtatttttagtagagacggggttttgccat

SEQ ID NO: 50430 - DNA, 2137 bp, Homo sapiens
gggactacaggtgcccgccaccacgcccggctattcttttgcatttttagtagagatggggtttcaccatgttagccaggatggtctcgatctcctgaccttgtaatctgcccgccttagcctcccaaagtgctgggattacaggtgtgaagcatcgcacctggcatctgtcatctcttttaacccagcagtccccagcatatttggcaccagggatccatttcatggaagacaatttttccatggactgggggtggcgaggatggttgcaggatgattcaagcacattacatttattgtgcactttatttataacattattacattggaacatataataattatacaactcaccataatgtagaaacagtgagagccctgagcttgctttcctgtaactagacagtcccatctggggatgatgggagacatcatccagtgacagatcatccagcattagatactcataagaggtgtgtaaactagatcccttccatgtgcagttcacaatagggttcatgttcctatgataattgaatgctaccactgatctgacaggaggtggatggagctcaggcggtaatgtaagtgatggggagcagctataaatacagatgaaacttctcttgcttgccacttacctcttcctgtgtggcccagttcttaacaggccatggaccagcaccagtccacggcccaggggttggggactcctgttttaacagacgaagactctaagatccacagaagtcaagtaacttgtcaaaaggtcatagcaactaagtggcagaaaattctaattttgattccaaattctgtgacctttcactgtatcacaatcttctgggaaaacatgggtagaaaaaagatgacaactcaggagagaacttcaacctatattttcatttgaatgggaaaacacaataggttttattttcctttgcatgtagtggagaagatgagtgagccagatgatatgggctaaagtgattttaaaatacctcagctgtcacgttagccaagctgactcatgctctcactggaagttctacggtttctcagctgtagtcacacaatatttcatacataattctcagtcatagctcttacctatgtactatttgcggttcaccgtttattatgagctcttcctggtctgtatccacattgcttgtatattgtctgaagcacagcaggatctcaacaaatgtttgttaaatgaacgaattagcagaggtcaaggaggccaaagatgaagtctctcactgtttgccagggaccctgaggagaatcaataaataactagggagtaaagcattaaatggaatgaatcatgaattgcgtatttgctgtggtttgaatgtccctgccaaaactcatgttgaaaattaattgccagctggatgcaatggctcactcctgtaatctcagcacattgggaggctgagacaggaggattgcttgagcccaggagttggagacccacgtgggtaatatagcaagacctgtctctattttttttaaataaaattaattgccattgtaacagtatttagaggtgacacctttacatggtgattagatcatgagtggattaatgctgttatcatgggagtgggtaagttatctcaggagtgggcttctgataaaaagataagtttggccccaattctctgtctcacatgctcaattctgccttctgcttttcaccatgggatggccctcaccagatgccagtgccatgcttttggactttccagtctccagaaccgtaagccaaataaatttttattctttgtaaaccacccagtctgcgatattctgttatagcagcagaaaagggactaagtattatttgaagaacaagaagtagttcatggaagcagacattttggttaaacaaataggtcaggccagacatggtggcttatacctgtaatcccagcatttgggaggccaaagcaaaaagatcacttgaggccagaagtttaagtccagcctaggcaacatattgagatcctgtatctacaactacaacaacaacaaaagtcaaaatttgttaacaaaactagcttaaaattgactagtgctgttaatatctttgtcaatttttaatttagaaaatttctatttcaac

SEQ ID NO: 50431 - DNA, 2082 bp, Homo sapiens
ttgttgttttttaatcaacaattttgaaagtccacagggaagattcacaccccatagcctttcttccacttgcttggtctacccctttcatcactgatgtcgagaatttaaattttctctataattggaaggaaatttccttgaagaaactttgttgaaaaccattggagttgacaggttttgtttccagagatattgaactacagaggattctgactctggtgatactgtgcacagtggtggataggaaagaagcaaacattaaatttaaaaattaacttaaaaaatttaacaaaaattcccagcactttgggaggccgaggtgtgcagatcacttgagctcaggaatttgagaccagcctgggcaacatggcaaaaccctgtctttacaaaaaacaatagtaatacaaaacaaacaaaaatttaacagaaatttacacactgaatgtgacatctccagctatttgcaaatggtatatttaggaaatcttgacattttctacgttaaaaaaaatgaacctccatcagaaagggcagatttttttttgactatttctaaaaacacagatttaaagtggtaatttaacatccatataaaatatagaaagaagagaagtgtatttcaaatcatttcttgccttttaaaaaaaaatttgagacagggtcttgttctgttgcccaggctggagtgcagtggtataatctcagctcactgcagcattgacctcccaacctcaggacatcttcccacctcagcctcctaagtaactgggactacaggcacacgctaccatgcctgactaatttttgtatttttcctagagacagggtttcaccatgttgcccaggctggtcttgaactcctgggctcaagcgatccatctactttggcctcccaaagtgctaggatttcaggcatgagctgctgcacccagctaaactatttctcgttaattcagtgttacagaaactacaggcaatactataaagtccatgccacgtgtgctaattcacaagtggacagcatcattcccttagtttccccagctgctgtttaaagtaaagctggtaagggctatctacagtcttccagtcaccagggctgtttgtggctggcaggagactccaggagccagtcctggttccagattttactggccctcttccagatggtctgcagctcacatggactttgttcctgggaaacctgtaggtaggtagacaagccagctaatacaggcaggcctgaatgggagcaaattcagaaaggctgggccagagctccaggaagctagcacagatttcagattagttccagaccatacctgaacccccaagaaatgttctgatgtttcagtttctggcaacagtcagtaggcctgtaggagaagggcagatacttttcatattaatagctgacatgcaacacagtttaaaagagcctctgcctgcttcatctcaactgagcaagtacggcaggtacagttgaccctaagttagggaggagcaaactaggactttatgaaggccacaccagagccagatggctaaaatatggctagaacccaggtctcaaaattaaatattcaagcaggcacacagggctttgctagggcccaatccaccggcctacgcggccagatgatccctggaaccacctgatcagccagacctttcagcctgtcgctggctctgtaaactccatgcctgggtccgccccttacctcactcccagctgcagtgaaaggctcatcactgtataccagcaacacctgatgaggtgaacggtggcagaacccagtataaagatttataatgttaagatcaggcatggtggttcacgcctgtaatcccagcgctttgggaggccgaggtgggcggatcacctgaggtcaggagtttgagaccagcctggccaacatggtaaaaccctatcgctactaaaaacacaaaaattagctgggcatggtggcacacacctgtcatcccagctacttgggaggctgaggcacgagaatcacttgaaggcgaaggctgcagtgagccaagattgtacaactgcacacctgcctgggctagaaa

SEQ ID NO: 50432 - DNA, 610 bp, Homo sapiens
gggcaccttcttggactctgggcacagttctggaacccgtgcctaattgtcttctgtgtgagactacagcctcaccaaacaggactccttgcatccgggcactggagctggggtgctagggcccccagaacactgccacgtgaggttgagaatgagcttagcagggttaccatacacccatgaggcagagaaaaaacaaaagaggtgacaatcttcagattttgaggctttgggaaagatgcccccagtggaaaacaggcttatctcagaaagctgcccttgcttccactttcagctcacagtaggtcctggcattcctttgtcgttttccccattccagaagatggagtaagagagtaagggaagggatttgtttactctggagtctttaatactcaactgtccactgcagtgatggaaaaaggggacacaggccctctacacacaaacaccaaaggtcaaaaggtcaggtgagcccttctgacctcacatgaacacacacaggtatgtgcacacatatgcacaagcatgcacacacatgcgtgtgcacacacacgcacacacacgatttgccaaacaaataaaggatgcaagatgggaggggagatat

SEQ ID NO: 50433 - DNA, 869 bp, Homo sapiens
tgtgctctggggagtggtaggatggggtccaggacatcgggtagagaacaggttgtgaaggagccctagacagctggcagccatcatcacaaagagagatagaaaaacaagtggaagcttcagttgggattgggcgagagagcagttcgacaccagcacagactggaccagcaatgctgcttccattggaacacctgactcttatttcaaaaaattaggaccagaaatccatgatgaaaggaagtttgagtgcttcttaagagatgagccaaggacctgggcagagggggagcccaggttcagagtccactcagaccagacacccaggctgagtgtccagcaggtctgaccgatgggacctctagcctctattctgaaactcagggactttatttctctgtgctttaactttctcatctgccaggctgcagtgtgtataacttcatgtgtcctgagctgctgaaccacagtttgaaagtgagtcatggtaaatgctttgctatgtaaaacttctttagtaactgcttctgggaatcgcttcaattattgccccactctgtttgcctggctgtgggtcaagctttcccctttctttgggaaacctggccttgattggccttgtctctgcttagaatggaaaagggaaaagggactctgatatgatttggctctgtgtccccacccaaatctcaccttgaattgtaatccccatgtgttgagggagggacttagcaggaggtgattggatcatgggggtggtttcccccatgctctctccctaatagtgagagagatctcatgaaatttgatggtttaaaagtgccattttcccttgtgcttgctctctcctgctgccatgttagatgtac

SEQ ID NO: 50434 - DNA, 596 bp, Homo sapiens
taggactacaggcacgtgccaccacacccagataattttttttattttttgtagagacagggtcttgctttgttacccaggctggtctcaaactcttggcttcaaacaactctaccacctcagcctcccaaagtgctagaattacaggcatgagccactgtacccgggcaagttttgatgtctctagcagtcactagcacatccatgaaagtaaatgggaataaaagagtggactcccttaaaaatacacagaagagagagacaaggtcgctagggaagcgacgaaagtccaaatgttaaccagccccattgtgtaaggagcaatgtgacccaacgagaccaattttgttaatgcctttaatgattagtttcctagttaataattgacatgtcataacacagaaagctgaaaactggtaagtcagttatttcaccattttggattctcttgtatgtcgaggtcctgataatagtcaccaggtgatacctggaaacattagcgagggaaggcacatttttaaccttctggaatagttaactaaaattcaaataaacttaaatacaatctccttgcttacctgaagagtaatgaaatt

SEQ ID NO: 50435 - DNA, 831 bp, Homo sapiens
ctgcctataaacagatcctcaaattttaggatttgagctctcaggacagaactcccatagaacagagtcaccccacacgtaactggagagctcgctttaacaggaaaagctctagggatttttgcatcgccatttcctctttaaatacgacagaaaaatccatttagctaggattctggaactctgccagctcttcctgccctatctgactgtaaaattcaacaagggatcataaataatagactctagtccaaaaatacatttggggaatcctgtccaatagaataactgacgtcaatgacttctgcatggcctctgatatttacttcaaacaataagaagagaaatcacaattcccagtgttggttccgctaagcagagctgagtgacggaaatgcagcccagcagaggctctgcacagcctaggtagccctggcgtttagttatcttttgctgcgtaatcgatggcccagaacctagtgggttaaatcaacagcattgtagctcatgactttgtgagtcaggaattccagagttcaatcagaccatttttctgctgtgcatggtatcagctggggtcaggcagtggtgttcaacaagccgactgcctcctctgcagtatccagcatggctccgctcacatctctagagcctcagtgggactagttggaaccaccgaccagagcacgttcccagggcctctgtgccatggcagtctcagggtagtctaggtggcctagactggtggcctagggctcccggaaaaggtgttgtaagagacctgggtagaagctgcaaagcttctttatgtcctctcctcagaggttctag

SEQ ID NO: 50436 - DNA, 5348 bp, Homo sapiens
accgtgccccgcctggaacttatttttgtttcttatcccagagatttttgacttttaacaatggacaaagtcctggcttggcttaaagacaaagaaatcagattctttatttggaattaagccatgcttccctgggtggggataggagaggttctccgggcatcctgatatcacacaacatagttcacctgctcctaagtgaggtctgagtggaactattgactacattgtcatttttgttgggcccatgccgggatccaagaagaccatgcccttctgtggagtatgctccatgacaggcaagaatggccaaagacacagtgctagcatcatgggccaccacggggtcctaagaccaccactcagctattattgctcgggaagacattgccccctcgtggttcctcatgtaattgagggaagctggcagtgcaaagagctgccagttaaggcaatcaatacatccaaacacgtgcaaagtttccacattcactgtagccttatctcttctgaatgtcttgggttgcagtttcaagagttggtttattttcatccaggatacatgtttgttccccttagagagaaatcacattatgacagcaattaaaaaaacatgttttccttatggaaatcttcctgtttcaaaatctccaaacccccaagataaatccaatatgtaaatccaagtatcactactgtttttctcctcataatgcccttaaagcaaatattttccttgctttctataatcggaaagaggattctgagagtatcttggctccataccactttatttttttgtcttttctttttttcccctctgtggagaacagagtctcactatgttgcccaggcaggtcttgaactcctgggctcaagcaatcctctttcctctatctccttaagtgctgagattccaagtgtgagccaccataccactttaaactccctaaagggagggtccttatctgcaactcccacagccacccccgccctatccccagcagcacttaaaccaagtataaagaatgtctggtgggggtggggagaaacagttaagcaaatactgtagttggaaactgttaccggtgcaagacaggagcagcaggctgggatggagaattcctgggaggaagaagtggggcagaacccactgatatatggagttccacatttatacctttgtagcagtcaaatctaagagtttaacacggtggctccacgttgtaatcccatcagtttgggaggccaaaagcaggaggatcacttgaggccaggagctcgagctcagcctgagcaacaaagtgagaccctcatttttctaaaaaaaaaaaaaaccaaaaaaccataagcttaaatgatcgagtattggaaacgctttctaaggccctggaaaaatagaagttttcttaataataatgttagcttccatgtattgtaaacctaaacgaagcaagaataaatgctgggtgctgtatatagctctatcaacctataatcacctcgaaaactcgaggagacacattcagctgctcccatttcacggatgaggaaacaagtacgcaatcctgaagctggtgcaaagcccaggccccctttctttttcaagcgtgcttccagcctctgaagttcctccgtacggacccccagctctgcctgcaataaggaatattcactttgccaacaaatatttattgagtgcctgctatataccccttagcccgtttaaatagccgtgggattaaaaagataaatagggcaggatttttttttttcttccaggaaggagctttctgaagggtgagggagaggccaggtaaacaatcccagaacagtctggtgagagttgggagaggagtcggggggccgcgggacgctcaggaagcgaagcggggaaggctccgggcgcgtcgcaggacccgcgctggagatgggtttgaagccctgtcctgaaaaagccggcccggagtgggctgtccccggtgtccctcgagttctcatgctgtcattcaagcagcagaggaagaaccgggtctggctcgggaagggtgggcttagggccaggggtgcaaatccctcggtaaaagccggcaaactaaaagtcgcacacatcccaggtcccggtccaggccccggcggggcagggtccccgaagtcccggggcgcgcagacgccggggcccccgggggccaagggaacggcgggacccgacctccctgccctcggcctcccgggccctcgccctccgaccagccgctgagtcgggggctggggtcgccgcttccgcccgcggcccgctgcccctccccggcgcgcgccatccggccgccggcccctcctcccgcggggggctccgtcccgcgccccgtccctccgggctgcagccggcagcccacgtccagggagggcggagggaggaggagaggcgcggagaggagggaggggagaggggagggaggaaggcgagagaaagggagctgcttccatcccggacttcccagagcctgcctggagcgcgtactcagcggctctcgggtcccagcgtcccagccgcggcccgcgctcctccgccccgctcctcctcctcctcttcctcctcctcctcctctctaggcacccccgtcccctccttccagcggctgcagcccccagccccaactctccgcgcttactcctgggacgcgcgtcctcgccccatcctttgcttccttccttccttccttcttccttcctcccctggctcccgccctccctctccaggtcgccctcccggggcccgattgtctcggtgccccgctcccggcccgcgccctgccccgtctctcccttgcacttcctgagtcgcccgccgccgccgtcgcagactcgccgcgggagccccagcccaacccgagcccgacagccactgccccggctccagctccagccccacagcccgcggcgcccgcccgagggagccccggcgcccggggaaggctccagtgggctagcgcgccctcgcccagccccgcgccccagccctgcccggcccggcgaggaaggaccgggaagatgaacaacggcggcaaagccgagaaggagaacaccccgagcgaggccaaccttcaggaggaggaggtactgggcggctcggtgtggtggcgggggcgacgcgggacccagtgcgggcggccggcggggcgcgggcccggggcgcggcggtggaagaaggttcaggcatggcccgtgccccggacgcagccccacagtgtggcccggggagggtggatctcgggagcgtgtgtttttgtgtccacgcgcgtctgcgggccccaaattgcgtaactccaaggacttttcggagacttttgtaagtataatgctcagctttgtttgcccgggatttataagtggaaccgagagctgactcctgggtgacctcagataatcgggactcggagggtcaggacttagggccggggctggaaattgtgtatggattcagggtcggggggggagcagtttaaggaagaaactcgggggaaagttctcgttaaaagatacctctattccctgccccctccctttccgtgttaaaagttcttggtgaaatatctttctagccgaggttttttggattaatagataactcatcagccacattcttctctgctgagtcaaagaccccgagcctgggcggtgaacgcttgtgattttaggggccgtgcagctgaggggagcagagtaagagggttaaaaacgcagcaattcaccaaatgctcatcgagggtattttcataggactttgacttctgagcatgcattttaggtggtgcgtccgtaatcatgatgaaagttttgtgactgcggagcgttccttcggtggaaacaaaattgagtagatgtggtcagaaggggagtcggactcaggaacaaacgtttcagaattcagtaggatatttgtggtatcctaccaaatgactctttttgcaggtacgttatctggagtccaagaaattatttctggcgtacttcttaacatcccacacagttgagttcttaaacattctagaggaacttgagagtgtgtgtagatgcaggaaagtgcacgtctaaatatgacccgaaaagattcacacaggtattggatcctgatataggtgaacacagaaggtaaacggattctaaagcgttagaatgttgagatcattgttgagacactatgttgtgtgcaaacttcaattctgatagtgaaaccaaaattgcagaggaattcattaatacatacaacttctctgcacattgtccacttggaaaatggtaactatttagatggagaaggtagaggagcgagactatgccaaacaatgcaaaataaataggagattttactcgtcacccagttgtatggtagtgaaaacctaaatgaattgcagtcagccaaaaattgctttttcacccgaggacattttctattttattataaaagactatttgaagagttgtttacttgcatgttttctaattacaattgtaggaatgctactggcatttcttttttcaaagcgatggagagttgaatggtgtgttctgattttttttcttgaactttactggctgctttgctatttattttccctaccacttaaaaaaatttaaaaataatgacaagtgtgcttttttaggaattaccatatttaactaattcacttaccatatcaagataatcatcgcttcagaaatctttctgtttcagctagatgtgcaatctgtttgcttctcagggttagaatattatatgaaaccatctttctttattcacccagttgagaaaacttttttttttccttttggtaggtagcaaaagaggttcaatgtcctaaaaatcatacccacattaaaattaagtatagaaaagtcacatttttctgcttgacccctcttaacagctgccaggaccaagggattgcctgccctgttcctggacgctcctccgtccttgtgaggttgtgtataataatcgctgtataatcgcgggccattgcagtacagttgctgcctcttacttgtcctgttatctgacagcgttccttttcaggtaggaatggcatgtggctctagaaagtatcggtctttttagcaaaacacttgttatgtaaaaagtaaggggacacgtaggaagatttcagaacccaagttgtccaagagagatgtcgtgtacaaaacagttaagaccgtgaagagaggggggtttataatgtcagaaattgaggaaaagaaactaaggtggcctgaatgatccaggtaattttgccttaatttcctatttttggtttatattttgttcttgaaaaactcttaacctcttt

SEQ ID NO: 50437 - DNA, 693 bp, Homo sapiens
ggatggatcggctggaaaattacttccatccctttgtcattaggaacctccatttgcgagcacaggtgagcctgcctggtccatcaaatagccactgctggaaaattacttccatccctttgtcattaggaacctccatttgcgagcacaggtgagcctgcctggtccatcagatagccactgtcagtgtgggactgcttgtcccaaggtgcatttgggttttcaccattagaatttggtttctgctgtggaattccatttgaccttttggacgagggcttccagaagccttggttaggtggaagagcatggactccctgtgttcccaaacaagcctgctctgtgtgacagccactttggaatgtttgtgttcagtttcatttggcaccttagtgtctgcctgggggtaggggaaagggaatgcaaatgttcctcttgaacagtgcttgctttggtcaaagaaaaaaacttaggaaggaatgaggagaatgaaccttaaaagctggtgcagaagtggctgcatagctcagtgggcttgaggccatctgggaccaggtatttaaaatggatgctatgttggtatgaacaagtcagttccatgcccctggtggggatgagcttatttgtcatatggggataactcctcacactcacatccctaaagtgtaccaggagaatattgtaaacaatttt

SEQ ID NO: 50438 - DNA, 1260 bp, Homo sapiens
atgttgtccaggctggtcttgaactcctgacctcaggtgatccgcccacctcagcctcccaaagtgctgggattacaggtgtgagccaccgtgcccagccagagtgttatttcttaaatctttgttgaccttagaaatatttatttttgtcgtgccccctcctcccccaccccctcctctccttttgatgtcatcagaacaacaggcagtgggtcattgattgctgtctatgctggctcagtggctgtcgccatttttattaatgatacacttcttttcgccagggcagatagcttgtaagtaaacataaatcctatttagaaacaatgaacaaatatttttggtgagccttggacctcctgtatctgtggatgtttataggcaatctcttgtttataggaaatggtgcagagttgaggaactttggcctcagtagtggtgggaagtgggacaaagtaggccaggtctgttgctggttagctcacttgattagaacagtatgctaatgaacccaaggtcactgggccatctgtgtatgggtcagccagctctgctctgctgggatcccagaccttggccaggaggctgggcaatatgtatcactggtcatgaggccggagcagatagaaagatcagtactaatccgtcaccagacccagaaaacaaattcaaaacacatgccctatggatagtacactatctgtggctctttaatttatgagggtatcataacagatttttgtaattttcttaaacagatttttttttctgattaataataaactgcatgttattgaggatcctgggaaaataaagtatgaggaaggaaacaaaattcactatttttcccagcactgacagaggttacattttggatttttccatccttgatgttcccttcccttggcctccatgacaccacacttggttgactttcctcttcctccctgaccccacccctacattctccttttcccctttcctcctgaatttggcttgtaaatgatagtgttccttggcactccgtcctgcctcttcatttctcgtggtcctgcattcccatggatggtgtcctttgtcccagacttctgtcctgaaatccagattcaaagatccaagtgtctacaccacttctagctggatgctaatgtgtccagtaaatgatccccttatccccaccatctaacctgcacccctgtgttcctcctctctaggagtcacagccttcacctaggtgcccagcccttcccctcccctccc

SEQ ID NO: 50439 - DNA, 857 bp, Homo sapiens
gtgaaaccccgtctctaccaaaatgtacaaaaattagctgggcatggtggcgtgcgcctgtagtcccagctacttgggaggctgaggcagagaattgcttgaaaccccggaggtggaggttgcagtgagccgagatcacgccactgtactccagcctggaagacagagcgagactccatctcacacacacaaagaaacaacagaactttcagaacctttggcacaacagaactgcatatctgggatgttggtcgtatctttatttggtcgtactaaaacacagactctctggcactgtgagaactgtttgcctgcacatatctttgcctgtgttctggccaatgctggcctgtcataccaggttccaaagatcactgacaggctgggtcatgtctgctctgaaacatccttcatatgcccccaggttctgacagttttgagagaatcctttctcagttttgagaacagttttggaaactgcccgagatgtttgaaattcacaaaatggaaaatattgagctggtttctgtaaaatatgctattttatttgtgctctttacagatatattacaaatctgtattctcattcacaggttaaactttgtaaattccaaggtcctgaaaggtggtggtcatggtggtagtagtataaataagcatttcagactggaaattcagtattaataatgaaatatttgtgtttaatttgtttagtgatatgcaatttgttcagtggtaatgttctgtttctttaatagcaattgaagcactgttttattatgggtaacttctcaaaatatctgtagctaaatgaaatcctaagttttagaatttgatttacattctttttttttttt

SEQ ID NO: 50440 - DNA, 4479 bp, Homo sapiens
tttttttttttttcaggctaatctagccatggacatctttctcaatatgtatatatagctctgctttgtttctaagcattttttttctaaatgagtcattccattgtccctaaaactcattgtcaaggactgatggactaactttagcgcagaaccatttgtaacaacactgggagcctgaagctaacagaattgaagtactctgtttattgtaccacataaccaagactgtatcaggtatgagggtgctctgaagacctcagtgacaggaatttggagactttttctctagtgagaggctgttacggtgactcagctttggtcaacaccattttctgtgtctctatataggctcaaggttgaaatccttataagagaaaacaggttttgtcactttaggctgcagctgccccttaaataggcagctgtggtcagaggaataagggcacagaacacagacattggcccctgagtacccttcccaaagaagaaggcttagagggcagtagccatctcatcccagcttctcttcccagggctgctctaatggtttcatatctgatctgttctagtcccttcattgagtctgtcttccctaccacccctagagttaccgccaatcactgtgattctcaaatgtggtccctacacaaacagcatcagcattaccctgaacttgttaaaaatgcaaattttcagattccatctcagagctactgaaccagaaactctagcaaatcctccaagttgatgctgctaacatttgagggtcacagacctactacataaagctgatcatattatcccccccatttttaaaacctaatggcttagctgagcacacactccaaagtcctcagtcatggcataagaggtcctttgtgatctctccccagtctgcttgttcagccaccccacccctgacccctcccaccccaacaccctttctgcatcctgttacagagaaatttgctgagccctttcctgaactgcacctggtgaacttctactcttcatcacttcctctggtgccttccctggctccctggcatgaaactgccctggtatacttttaagtatactggacgaacaagaatatgttgtttctcagcagtgtccttttaaagatctcccagaatttgccctgagtagggaattcagcctctgtagattatatggaacctgcatttgtagagactgttggctgtccagtagccagtcagattggggtgcttgtaagtaactgtttatattcaaattaatatactaatattcagaaactgtcctttctggtccatgtaataaataggacaccatttacatttggaagagaaaggttctctgttcattgtgagaagaacggtgaattatgagcaagagaggaaaaggttgcttttgaaagacacaggttcaccctttcacttggcagtaatcttatcctgacagcatttaatgtggagtaattgtagccagagaagaatcttagtaggctttaattaaaaacacaaggaatttttttctcttgtcttcttcctatctgcctctttttcttttttccctcttcgtttctgtgttctcccttttcctgcccctcttttttctcctcttcatcatcccttaacatttaaaatgtttttggcttggctaatccctatggatggaaacttagctgcgcaggatattgattaccaaatatggtattgctgctaaagatgttagaggaatgtggcttgtattctaagcctccggcctctgaataagctgccaaacaaattaggtcattttaacttctgagctttttttttttttttttaaataaggatgctggaactttgatttggaacatgatgttgatgttattttagttcaaattggggggcgggtatgaagaagggggcagggagtaggggagacttagttcagcatgttttaggactcaagccgccagcccaggttgtgtaagaggcaaacacatgatgtggagcttcagttgattctggaacaccagtgaaagagctgaggcatagaattcacatgtgcagcctcattttctgaggctagatgctctagaccacaactaggtcccaggatactcttcacatcatccccagtggcctgggccacaggactcaggttaatgtgaactcaggtttaggaaagttgcttcttcacaggaaggttggtcaagtttagtgccggggaggacgtcctgaagttgatggcaagttgctactatgtgtgtctgatggagtgtggtgcaaatgaggaagtccttttacagcatacctgtacgtaacacccagggactgtgcttgcctcccagcagagaccacagttcttaggtccattcttggaaatattaattctgttgtaatattagctttgttagggtggaagttggtccacctcagtgaggtcctttgtgacctcaccccagcctgcttcagaatgcagctttgctttttgtttttgtttttccttatatactttttcttcaaaataatactgaggtttcccaaatttaaaaaacaaaaatacaacacaatatcagttaaagaaaatgttcttatgtttcacagaacaggcactatctgttcgctttttggtgttgattaggtatgcacaagggtattctccacatcccttttgctactgccctcagttggtttcttctcagaatgagtgagtcatgctcatgaagttccacccactccaagacttctgggtcagggctctgtggcttttgttaggcctccctaaggacctctctttccttccccttccccccttgtttcctgttaatgccattaccatccagccacaggctcttccttgtatacttgaagctgagcctgtgaagttcagagttgttcatcctggtctctagagtaagagagtcttgtttttgtggatatttctttttttgagacagagtctagctctgtcacccaggctggagtgcaatggcgcgatcttggctcactgtaccctctgcctcatgggctcaagcaattctgtctcagcattccaagtaactaactgggattacaggtgcatgccgccacgcccagctaatttttttttttttgtattttagtagagatggggtttcaccatgttgcccaggctggtgttgaactcccgagctcaggcaatccactcgcctcggcctcccaaagtgctaggatgacaggcatgagccacaacgccctgcctgctcttattttttttcaagctcattaggaagaatggtggcgagggggcgggggatgctttggagccctcaggcccatgtgtgtacattcagaacactaaatggcaactgtgttcttaggagactcgttttcaggactccagtccctttccagaccacaccatgaaaacatgggaactgagtgggtcccatgggtgcacatttaaaatacactctcttgggatatctttttgacacgtagggtccagaattcatggtattggatgcttaataatgaagacattcttgaatggtggaaaggttccaaatagacttgtcttgcgctagtgtctttcatagtgtctgtgatttgttttactgaatataatctattttaggtaaactgcaggaatagggtcagaggtaactgaaattactatatattaaagtgtgtaactgtgctaggaatttgctggttcaaattttaaactgaaaagtttttgtctaaaaagaaaaggaatagttgaaaatctgtgtaactacattttttaactaaactaaatcccactgactttcgggacactttgtgttgtcatttttcatgtaacctgtgtaagtagtaagaatgagagtggttgctgaccttttttcctgatagaccagggtttactggtgtgtttattttgtcaccattccggtttgactcaaaggaaatgaaaacatcttccatttgttctctgtttccaaagggcatccgcttcgatcctgaaattccgcaaacactacgactagagtttgctaaggcaaacacgaagatggccaagaacaaactcgtagggactccaaaccccagtactcctctgcccaacactgtacctcagttcattgccagagagccatgtaagtcgatctacttttcattcaaaagtaataataactaagaactgttcatgtgctgcatgtgaggttacaccatgggacatggagctggctgagtcttattttccatttctgtgaagaggttgcctaggcgttcttggtgtcagaattccaaatacagcaatcttgtttgtgattggcttcccaaaagatggttcagcttgaatagaaccataacttcagaatatcatttgatgtactacagatttccttaatgttatattgaccatcatgagtatgcccctagttgccttgggtataaacccttcattcccccctgctcggacacgagagctggttctcagcatttactttaatccatttgttgaaggacatcagctcggtgg

SEQ ID NO: 50441 - DNA, 462 bp, Homo sapiens
tcatattcttctcctttgcccctgcacctttcttccttcctcccttcttccctcctcccttccctctctcagacaaaagcttgctctgttaaattagtactcttagatacctgatcagcacataacattttggtgactaatcagattacttccttgtttacctgccatgtccctggaagttcccatttatccagtaacaacctacgctaactggaagtgagttctgtgtctcatgtctgaagagaccctgtgaaggttcaggagagcctgtaaagtatctcacacattccctcccagagacaacactgagcaaataggaaatctcttaacattcatctctgcgggacaaggtcatccagggcctatctaaagcttcctgtatcccatggtacagagccctggtgcctgcattttttccaaggcagcagtgcatggcatgcacaattagaaagattggcagat

SEQ ID NO: 50442 - DNA, 567 bp, Homo sapiens
gatgtcacattgctttcggagaggtactaaggtgctcaagcagtctctgcaataggatttggttccctgtcttttctatcccttgtctgatcagccctgaaattttactggtacagagactggagaaagaggggtgggtggacaggacatgtaggatgggggaaactcctgcaagtatgtttgccttatgggctccagatggggagccgggacatacctgtgaccatggtgggtcattaggtcttaacatagttctgggaactggtgaaacctgaggtcattagatagtgcatgtttgacctttgggcatctttaggaatgagaaattcaataatgaggatgatagcagctgttactcattcaagacatttctgttaaacacgttatattcattatctcattcaatcttcacaacaccctgttacataaatatagtcattatcctcattttacaaagaaggaattaagctcagagttttttaaatgtgcccatggtcacatttggtaagctgctcatctgaggttttaagccaagtctgtcaggtcacagaccccaaggtgggggtt

SEQ ID NO: 50443 - DNA, 1196 bp, Homo sapiens
ccaaagatctgaagtcatgccagagccaaccagccttctgctgaccctcatgcccagatttccttgattttgcatcattgcaactgaaaaaagatttcagactgacaggcaaccttttagtgttggaaggtaatctgttcatcccagaccagtgatcctcatgagatagaattacttactattccccagaaagaagcagctcagttagtctaaactcttgcagttttcttttggtatttcagtgcttctaactaggttaggataccctgttctcatatatgaactctgcaagaatgagtacaattttcaggaatgagagggcaggaggggggagttatttacattagcatttgccaagttttcactgtttatcttaccggaaagtcaacagtgtgactattaacctcctgcataattaaaatttgggccttgttatggttgttcttaaacttgtggttaaatctttgtgatttttagaaggcaaagagatggagagtaaaaggaagataaaatatggctattcaggggactgaggtacatggacacctggagctgcttgttgtaaattggcaggttcattgcagccggtggaatgaatgataagggaattgtgtaggtcagagtctcccaaggtacttagccagttttgtttaataaagttaagtagatttttttgagcagatcacatttccctggtgaagctggagggctgtgagatttcttttaaagaaagtcttctgctcttaaatgaagagcattgttcttattttaaaaataagtacatgaacaccaatataattaacaaagctctatcttctagtgatcattaatttaatcttagtacaaaagagctgaacaatatgtctgaggcacgaagaatgaggaagaaacagttaaacatgagaagtggctgagggcatacattccaaagcaccactccctgccacctccctctggtaggtaatgaccccagatcatctgatgaatcaagggattgtttttgtactgaggatggatttcctatagcagagacaacattatttatacccccagattgtattccttaccttttttcctatattaatgtcagttactaatgttactgttgtttgacactgtgcagtaactatatgcatgtcaaattcgcattcagtttttataatgaactaggtgttagtttttatttttatctgttg

SEQ ID NO: 50444 - DNA, 598 bp, Homo sapiens
cccatattggagaattcagtctttgttttggaaatcttataatgtctttggagaggctttaaataattttgtttttcttagcaatgttatgctctattttgagacatggattttttttttcttctagtgtttctctcctgaggcaaagcccaacacacctgtcttttgtccacttctccagcaaattagatttgtctctgggaatgtgtttgtaacataccaacctactgcagaccagcagagggagctcccatgttgaatttgtttgttagctattttcccccctttcacaaaaactatttcttgacgacctttgagagatttcaataaaaattttaatcagagcaaaaatgaactcaagtagactgcagcgttttgttttcatggtgatgcaattttggagcaaaggtgttactctctgactgaggttttgggagaattgggcctgtgacaccaagtctattttacatagaaggactcagaacgagcttcctggagaggccaggtcctggagccgaggccacactgctgctgcttgtctctccctgggctcccagaagagccaccaagagctgcatgttggaagcgtctcatccac

SEQ ID NO: 50445 - DNA, 1229 bp, Homo sapiens
gaagggcttcatgtttgctttaaaggtagcccttcccaaggatcttttaaggggcacttgaattttcagtaaggagaaggaagcccaggactaagcctaagctacccacaaggccgtgacagttaagacacaggatggccagcacatgtggatgacactaacaggggctgctagagacctcacggctggagccaaatggaagactggaaagcatgaatgaatgacgggagtaagatgaggcattgcagtgagagcaccacccacagcaccgattgacagcacctgccctgctcctggcagtgtgatcttcacagcttacgccagcactgggagagcttatccaaaagaggggcctccccaaaccaggctggacacggccaccggaacccccttctgacaggaaatacatccggggtggagggggctgggcagctgaatcccagcgacggaatggcccttgccctcacgagttactttacacaaacccgctgtccctgacctttccagctgcagccttatctcactttcctatcggagaaactggagaaagaatcacaggtcacccagcccattcctccctggactttctggcactttcttcccacagtccttctgctagtattctcctcagcctcatttccaggcaatggagttacagcttgtacttggggatattgctctcttcacagttctgccaggaaacccgagaatctgcccccggccaggcagatgctctctccctggtgaccctctccacctcttccgtcatttgcagtgagagagacatcagcattttgtccttcaccctctttagaagcagtcctccaaaaccatccgtccagggtgttagggagacgtgttcttttgtccagaactgctgctgctactgaggcccaggcctctccatgttgggcagttttaggaggaaatgccgttcagaaaccagagtcggtcccctagtgtatggctgtgtggctttggccagggtcactcaccccaaggagacttccgtagaaatcacagtattattcaggattgccagaacatctcaacgtgggcctcctcctgactgggggcaccattactctccattactccattactctccatttggtacactgttttccaggtttctaagtgtgttccatgttgtcctttgcggaaggttaaactccccagatcctacgcgccttctcccctgtccttaatagtagtaagagcccaaccct

SEQ ID NO: 50446 - DNA, 856 bp, Homo sapiens
ttcacaactgggcaagaaaacatcattggtaagaactgctgagtgtgcccttagaaagccctagtagctccagctgtgactatatcaactgtgtgccaagtgtgactttgtacagttttatgtttccactctcctgtatgtgtagccactcgatgcctaacctaccttccacaagccagccccgcatccctgctcccgcagtgtaagtgcagagcctgcctcactggtaagggaaaaccttggcttgggaggccagccctggcccttgaaggggttggctgtgcccagcccacctggctgcagtgggcagctcatgtctgtatctccaaagtgatgtttgtttgcaaaacaccggctgaactgagctggtgttgccaactcttggcagcactgggccaaaccgaccacataccatgagctcccaaatggcgtgtgctcactgtgagacgtcctgccacaccccacaggagacggaggcagtgggcatttggaaccaattctattcagacttcgtcaaagccaaagtcagtctggtgttgtcagttgacacatctccagagttcatgacagctcaacctctccccttgtacagaagccatttttgtaaaaccacactgacctaaattcagctgccaaacacagtctttcctattgatccgctcggcttatgttgaaaatttcaatgtcatgattacctggttggtttgggtttttgttttgttattttccattagaaatataaagatgtcaagaagcttttaaaggtcaacacaaaaaaccaaggccaggagtgaggggctctttcttaccgtaaataaggggaaaaggcagttagctcaaggacttgtgacggatc

SEQ ID NO: 50447 - DNA, 544 bp, Homo sapiens
ctattaattcatcaacaggccttactgaaacttcacaagtttgaagtgaaacttcaacttcaccgatgctcttttcttggcccaggatcctgcctgtcacatctctttggtctcctccattctctaagtgtggccagtctttgtttccccactggtcagttgttttacagaaacttccatttgggtttgtctagtatttcctcattactagattgaggttatgcaattctggcaagaacaacacagtaacgagcttgtgcccttcttggggcacagtagcaagctacatagtgtcaacatggacccggtaaacgctgaccatcaggcaaggtgttatctctcaggtttctctgtcatgaagctatcagtttttcctttgtagttaataattaatggagagatattttcagactatataaataccgtttctcatattatcactaattttataatagcatccattggtagtgcttacctacaaaaatgactacttgtaagtaactactgacaaattatttccatcattccttccatatgtactaat

SEQ ID NO: 50448 - DNA, 737 bp, Homo sapiens
aataataataaaaaataaattaaaaaaagataaaacctacaatctaactcctcagcaccagcctcttccccatcacatttatactacctttaaatgaataagcttctgacttaaggaaagaaatgcctttgaaaaataagttgcctgcctaggtccaactactctgtgttcacttctacactggattaaaaaattactacaccatcaactctctccttgagctaattctcattttaggacaagtgcttctattacagacagaaccctctgtgtgcctgaagtgtgcgcactcagagttcctctctatggctaaggttgccacctagtggaacgaaacgaaaatcttcacacaaagcataaagcattctgaggctagagatgaatgttaaaacgtgtccgttttcaatgggtcttccctggaaacacacattccttatatcattaacaaaaacttgttttgttttgtttttgttactgatttacgtaatactggcactttcaactaaaagactggtggtaccttacccaaggttcctgtaaatggctgttccctctggtgtctctacagcaccgtgtgaacaccaaaatgacaaaatgcaaacagctgaactatgcttcctatgccattctacccgctcagcctggaaggtcaaggacagcaacctcattcactgtgatcttcttccaccaccaagtgtgcggaatgacaggagccaggaaaaggaatctgaaaacag

SEQ ID NO: 50449 - DNA, 806 bp, Homo sapiens
agctactcgggaggctgaggcaggggaatcacttgaacctgggaggcggaggttgcagtgagccaagatcaagccattgcattccagcctggcaacagagcaagactctgttttaaaaataaataaataattttaaaaattaaaaattaaaaaaagtttagtggctgccaagggttgaggggagaggatgaacaagcagagccctgagaatttttagggcagtgaaaatactcaggaggatactagagtggtggacataggtcattatacacttgtccaaacccacagaaagaacaccactaagggtgaactcatgtaaactatggactttgagtggtaatttgtcaacgtaggttcattgactgtcacaaatgtactcttctggtgcaggatgttgatagtggaggaagctgtggggggatgggcagggaatggatgagaattctgtattttccaatcaattttgctgtgaacctaaaactgctctaaaaaaaaaagtgttttttaaagtaaataagaaaaaagtatgtatgttaaaaaacatatgcactatgaacccttgtatatagggaagggtagaaataagtatacatttgaactttgtttctgcataaagaaccactggaaaaaaaatcacaagaaactaataaaagaggttacctgtagaaagcacaagaggggagaaaatgagtaggatgacaggtgagaacaagactccttcattgtaccttattatacaactttactttttgtacaaagagatatgttatttatccaaaacaaaaataactcttcaaaagaaaaaa

SEQ ID NO: 50450 - DNA, 1804 bp, Homo sapiens
ctgaagtgaagctgtctggttaaggtcgcacagatggaagagccagggccaggaaccaaacctcctgactcctaactcaagtgctccttacaccagacctggaacgctggtaaaggcctttaaaacaaaggccacctgtgaggttcgggaacgttcaaaggcatctagagcagaaagcttcgcaatgtctgtctttcaccatcacgtgctccgcctaacttttcctcctttttcaaagactacccaatatgtgtactaagttttagatctctggacccccctatggagtaaacaggctacatcaccatgtccattttacaattaaacaaaaccacaactcaaggagttggctggttcctccgtgggcagacacggaaaacccaaaaattaaactgaaatctgcctccaagcccacgattcttgccaccattcgacctctttcaaccttactacttcccctctctttcacttttacccagcctcgttagtgtccctggcacctcaggacccggctatgaaaagcaggctgcttcgcccttaaatgacggaagtggggaggtgggcgaaaagggggccgcagcgttgtttagactgcagaaatcaactactatcgttaaagtttagggatcatcacaaaccaaatctccaaaaggtagcctagaaagcagtccgcgtatgagcatcattttaaatcacagtcttgagctggctggaccccgcggctgctcaaactccacacacggttcgcttggctaccgcgcccgtgaacttggaggcttggaagaggcacagtcaggcggcagaccgcgaattttccctctttccaacccaaaagtttgctcaatgaacctctggcctaaagacaatgctccggggaacggttcgcgtgctgggtgtttcgcttcgagaacggcggtcccagcttcccgtgaggtggaggtcacgctcagcctcccgggaggcggcggcgcgcctgcgtcccagggaacagcaagccggggctctgcgccccacacccggcggccgcagcccctacctgagtgagaagggcagcctcgcacgactcgccgcccccttcctgcgcctccgcctcggccggccgcccacgccggcactgcaccctcttcctgcttctcgtcagcgcccccgcctgcccgcacgcacgcccagcgctgacccgccaggtcggggtctcaccactggcggtggcggcggcggcggcggcagcggcggtagctgaggcggcgactggacccgggactccgcccgccacttcccgatcgggtgctaggagctcagtcccggcagccaccgcggcgccagggcagccaagcgagcgcatgcgtcattgcgtgccccgcctctggtgccgcgggagcggaactatcccgctctggcgtcctggggcctccatgacaacgagggaagggctggggtggggccgagaaggggactgaagtgggaggcggcgccactgaagatggaaggcagctttctttatagacactttattaaaactgctacagcctgctccggcgtgcgctgggatgtggtgaacccagccgacgacgctatctttcaatggttactttgtgttttttgtctttttcttattagagacgtgatctcactcggtcacccaggctggagggcagtggcgcgatctcggctcactgcaacctccgctcctgggctcaagccattctcccacctcagcctccggagtagctgggatcacaggcgagtgccaccacgacggactatttttggttattattgttgttgttgtttgtattaatagggt

SEQ ID NO: 50451 - DNA, 669 bp, Homo sapiens
aaaagaaaaaaaagaaaaaaaaatatataaatgaacatacataaatgtctaccgcatgtgatcagaaggaataagtaaatatgagactaaaacattacaaaatcagtttactgtgcagtattagcccagtggtatatttaaaaaaaaataaacttgtaccaatcaacacgaaatttaccaccataactggtttaaactacataaaaccaccttataattaatttatataattcatacagtcataattgcatggctccaagtagaacagattacaaaaagtatgactaataggaaaggaaatagttgagggaaaatgtcccagagaagaaaagtcttcctaagacagaaagaaaaacaccttacctataccacggaaaagacttcaaaaagactttttggaattaaactcaggtatgcatcactgatgagattaggagatttgcttatataataccaaaaagatgacaagttaaaatggaatgtcattaataaaggtggtaagcttgagattacaacatatgttgaaagtacattcaaatgagtggtaaaattctttgcaagtataagcaagaggcagctttacaaataagagctgctgttttttcctctttgtcaagggtaaaaaaaatgaattcattcaatgtgacctgcaccacagatattaacaac

SEQ ID NO: 50452 - DNA, 2913 bp, Homo sapiens
aaactagccgggcatggtggcatgcacctgcattcccagctactcgagaggctgagacgggagaactgcttgaacctgggaggcagaggttgcagtgagcccagattgcaccactgtactccagcctgggtgacagagtgagactccctctcaaaaaaaaaaaaaaaaaaagaattcataacaggaaggtaaagtgggtgaacctctgaagcacattataacataagtagagaaagaggaagacagagaaaatgtggagagcagaacagaagtgagaagtgatcaagtactctcatgaggtgtgggaggggggcacttagtggcaccccacaatctgccttctggagagacagatttctaaccttctgtctggactatggtgtcaaagtgcaagttgataattaacagagatttttcctttctcttcatctccatgttcatctccaaggcactgaacaatgaagtcaaccttttcataactgtccatttttagtttcattcattgcacaagtgcttattgagcaagggattttaaggtgataagagacacacaaacacagaagcccatccctgtccttaaagagctcccaatttgacataatttaaatattcatctccaaaggaatttagagaacctatcccaaatcccaggttcctcttggatacagcattttaatcgtcaacacccaaatcttgtgatagaaaagggcgggcacaccaataacttggaaacaacatttatttttagaatgagtgcagtggctcaggcttgtaatcccagcactttgggaggctgaggcgggaagatcggttgagtccaagaggttgaaatcagcaagggcaacatagcgagacccccatctctacaaaaaataataataattaactaggcgtggtgattagccccctgtagttccagctactcaggaggccaaggtgagaggatcccttgagcccgggagttcgaggctgcagtgagctatgatggccactgcactctagcctaggtgacagggcaagaccctgtctcaaaaaacaaacacaaacaaaaacccttattttcaaaaattatgaattttgtaaatctcaggatttacatccctctgtttttagttttgcaatccacataaaaccaagacaaaacaaaagctctgagaactcacctactcaaggtcgccttggctgcaattcagatcacccgaaaatcccaaagcccaggctgcacttcagaccaattaagtcgggaaacatcccaaagcccaagtgcacctcagaccaattaagtcgggaatccaggcaccctcaggtgattcgaatgtgtagccaaggttgacaacaaccgctataaatcattctgcccttgaaacgggagaaccaggatctacatttttcaagaaccaggatctatggcaccgtcaccctcgtccctacacacaggccaccagcaatgttcccagatgcagttttgtgtttcacgcggtcaagaacagaatccaatcctctcccacttggacaagtgaggatggaggaaggttaatctaacccgccccggccctggtcaatatcgcatccgtgcggaagcagacgctggctcggctttgcgggccgcagagaagcccccggacgcctctctctcctccacctgctgggttcctggcttcggaatggggagttgcgggggtggaaaagaggaaagcccagcgccgggggacaggatcgccataggaacgagcacaggctgtcccccgaaagaccgagacaaagaggcgccccccgcccgaacaaaccggcggtactcacgcaagtgccacccagcttgtggctctccaccacggcggccctggcacccagctcggccgccctgcgcgcgctggccagcccgcccgagccgcccccgatcaccaggtagtcataggaggccacggcgccagcagcgggcggcgggccctgcggctgcggctcctgcctgcaggccatggcacgggagagggcgcgcgtgagggccgcgggctcgggcagaagcagcaggaagcctcggaaggcgcgcgccgcccgccgccagctcggtcccgcgccggcgctcagggctcggggcagcagggccatgcacgcggaagtggcgcgccaagtggggcgggcggcccgggggcggtccccggggtaggggggcgcgggccccgggcaagcgcagcctcacggtgactaagcatgcgcccgccgctaggcaagacccaggaggatgcccagaggcggggccgcctcccagttccccgccccggtggcggagcctgaggggtttctccgcctccgttctcaccccggcccctggatcccgagcggcgcctgccgcgtgtagccttctgaagtccggtggatcgaggcgaggaacggtgaacgtcctctcgtttcagctggcttttcccgagctggccccctggggagttgccagtggcacggcttctccaggaagagaaatttgcctctattcgaagggttgtttgtccaggtttgttccagagaccacttttgtttgttcttgctttttctttgagactgggtctcactctcccccaggcaggggtgcagtgatgcgatctctgctcactgcagcctccacctactgtgctcaagcagcgatcctccctcctcagccttcccggtagctgggaactacaggtgcccgccacagcgcccagctaatttatttatttatttatttaatttttttttttattttttttattatttttattttttttttagaaatagggtctcactatgttaccaggactggtagggaactcttggcctcaagcgattctctcacctcggcctcccaaaatgctaggattatggtatgaggtcaccacttctcctgttgtccttctcagtttctccccaacctcccctttt

SEQ ID NO: 50453 - DNA, 2158 bp, Homo sapiens
agtgcagtggtgcaaactcggctcaaagcaacctccgcatgcgggttcaagcaattctcctgcctcagcctcccgaatagctggaattacaggcgaccgccaccacacccggctaatttttgtatttttagtagagacggggtttcaccatatttgccaggctggtctggaactcctgaccttgtgatccgcccgcctcggcctcccaaagtgctgagattacaggcgtgagccaccgcgcctggccaggaaagataatttccaagtacgaaatgttgtagattgggaggacctcagtagcttgggagaagtgcacagtggtgagttataggacggcaatgaggtcatggaactatgaagtcaaggttaacaataacgcgtgcaggcaaaactgaaaaggggcggaacaaggggtagcgggtctccaggacctggcattaggacgtgcgtgttagggggcaggtatttggagccaggccccactttcgagttgtctttccgcaggaaccagagactgcggacggggccaggaaccaggaaccgttagggagataaggaaggtgttatagcccacattcatcctatacggccacaaggccggggggcccaggctgcctcctcacagcatcagctttttcttcggcttcatttccctctggaaagcgctttctcacagacgctgcaaagaccgaaggggcagcccctgccctgctaccctccagggagccaccgctctagagcccaggctcctctggacatcatgtgacttgggggacgacttgcctttcttctgaaacacggctacagactataactttaaaacacggggcttagctccccctcaataacgacacggccgtcagtatttaccacgttattgaccctctcccagccggcccgcggcaagaagagttccacttccttcccggaaaacgcggccggaaggggcgggctttccgcctgcaccaggcgcttccgccaccatggcttcacgtggggttgttggcattttcttcctctctgctgtcccccttgtgtgtctggagctccggcgtgggatcccggatataggtaagtgtgactttttcccttcgacagtcacagctgggtaattttcacaggaatgttgcatagaacgaccgcctcttcggctgcgtggcttcggagcagctttgactacaactcccagactgcatcgcccctgcccccccacttccggagctgacttcacttcgaggaaccttttccctccaggtgtgatggttttacgtgtaagagggtagaggcaaagagcacaggggcaatcatagacagtgctttcgcatcctggcgaacactgaaaaggaaataaacaggttgataagatgaaggtcttgtgagaatttaggctgagaagttttttgttttgtttttagagacagggtctcactatgttgcccaggctggtctcgaactcctgggttcaagagatcctcctgcctcggcctctcaaagtgctgggattacaggcctacgccactgcgcccggccctaggtttaaataaggggccacgcccgtgaaaagccagtgggggcagggaagggatgggggaggggaggaatattttaggcaaaaagattgtgacacgttggaggaaaaggtgaaggccattgtggctgaatcaaggagagttgggaggaggaggaggaggaattggctcaggataatgacgtttattgaacacctattataagccaaacaccaggtgctggttattatctcatttaatctgcactgcaatcagaggagggtaggcactattataatccccattttacagttgagggaactaaaatttagggaggttaagtgacttccctaagttttaaaaaggtcactcgattctgtatggagaatgctttggacagaagctatggtggaagcagtgaggcacatcaggctttggaagttgacaagtggtgatgatggcctggactagaacaataacaggagatgaaatgtagacagaattgggatattgacggagtaggatcaaccaacaggctttgtttatgggttgatgtttggggcaagggaaaggaaggattcaaggacgactgcctcatgggggactgagcaaacctaggtatttggtagtgctactggtaaaggggaaat

SEQ ID NO: 50454 - DNA, 3341 bp, Homo sapiens
ctgggaggtaggagggcaggggacaggaatggtgggtagagtgcatttgctttccttgctacctttctgaggtgcttgcacaaattttctttgagacagggtctcgctctgttgcccaggctggagtgcagtggtgtgaacgtagctcactgcagcctcaaactcctgggctcaagcagtcctcccactcagcctcctaaagtgctgagattgcaggtctgagccaccgtgactggccaatgctcgaaattttaaaaaacaaattctgtattactttttcaaacggaaaaaacctggcttcttaaacttcaaaacaaattccagatggcagtaattataaaatatccacacaatggaattttattcagccataaaaaggaacgaagtccagatacatgctacaatatggaggaatcttggatatattatgctaaaagagagaagccaaacacacaagacataaccctggaaatgaaattcaaatcaaaagtacacggaagaaccgactgtgggaatgctgacaatgctgctgttggagagactccaaatatgcagccaggaacttagcaacacgcagaaacttagtgacataaagaagtgaaaatccaaacttattgcataaatgaggaaaattgttttggaagaagtgatgctagcaaaaatctctttctgtatttgtcaggaaagatcacttttacttcggctcctaaataaatcagacgaacagttcctaggactttataggtatatttaagattatctcttgtatctcactagcttttgtttttttttaagacatggtcttaatcttcttgacaaatacaggtatttcatgacactgaaagcacaaaggaggccgggggcagtggctcacacctgtaatcccagcacttttggaggccgaggcagaaggatcacttgagtccaggagttcaagatcaccttggacaacatgaggagaccctgtctctacaaaaaaatgagtaaaaaaagccaggtgtggttgtgtattcctgtagtctcagctactcaggagactgaggcgtgaagatggcttgagtccaggagtacaaggctgcagtgaactatgatcatgttactgtactccagcctaggcgacagtaagatcctgcctttaaaaaaaaaaaaagcagcttcctggacctgcccaagacatgtcaatcagtctctggaatggagtcaaggaacatgaatttcctatttctttcccaagtgattctcatgtgcgcttaaagtttatggaaaagatggacaatcagactatacaaaaatgctaaaacttgcacagtaaaaattatacacacatatcacaaagtagaaaataagaccttaaacatttttaaatggctaacttttggagaatttatacaaccaagaaaagacaaaatacaatttttttttttttttgagacggagtcctgctctgtcgtccaggctggagtgcagtggcgcgatctccatctcagctcactgcaacctccgcctcctggattcaagtgattctcctgccttagcctcccaagtagctgggattacaggcgcgtgccaccacacccagctaatttctgtatttttagtagagatggggtttcaccacgttggccagactggtctcaaacccctgacctcgtgatccgcccgcctcggcctcctaaagtgctgagattacaggcataagccactgtgcccagttgacaaaatacaaacttaaaacaaaaaaagaatatgccaactcaactggaaaaatccctcacattgcacacactccacaattctgataaatctagccttgttttcttcatgtattttggtattgccatttattattattaaggttctcgtccctcagaatttgctatggaataaaaatctgtatagtgaagaattaacctcacccgaggagaggtctggcctttgcccctggaatttcctgcttggtaaagagatctctgcctgggggctctgacctgcggaccattaacaatgtgactcacgatgcggactttggatgatcccactatcagtttggtctctggaggactggacactacagatgtcagcccctcttgtactctgcccttatgagtcttttcccttggcttactttaaattgtattcattccctgtaataaaccataatcatcagtgtaacagcttaaagtgagttctgtgagtcattcctgtgaatcactgaacctaagagtggttttcggaacccactgaactagtatattggtgccaaaactgaggcagtcctgggcagtgttccctgtaatttatagttcactgaactttattttttgtctgctgttctgaaggtacatcatgactaaacttttgaagatggtgtcagaggtgagaacagtgttagggactgtgccttctaactctcgcaaaatcctttttaattacaaaagtaaaccacattataaagaatttggaaggttttctatgaccaccctattaaaaaaaaaagagtctcttgaattcaagcccatcactgtccccatcttctgctttttcttgccagcaagaatcaatgcctggtgttcattaatcgtgtcccctcttcacagctgaatctctagcactttgaacagtctggtacatagtggttcaactaaaatctgttgaatgtacgggataactacacagtggcagcattctgtcaaccaatcctctcctttcttcttcactgcccacaggaacaagcgcctcttttgctactcaagccaagtcgagaatacactgaaccaattctgagctctcatcatccaggacataaatatcatgcggaactcttttaaacgaagatgaaaattatttccctctctataagatgggattttgagctgggcgcagtggctcacgcctgcaatcccagcactttgggaggctgaggcaggcaggtcacaaggtcaggagatccgagaccatcctggctcacatggtgaaactccatctctattaaaaacacaaaaaattagccgggagtggtggcaggcacctgtagtcccagctactcgggaggctggggcaggtgaatggcatgaacccggtaggcggagcttgcagtgaaccgagatggcaccactgcactccagcctggatgacagagagagagactccatcacaaaaaaacaaaaaaaaagagattttgagcaaaattaaactacagcctacacaccgtatcctgcatattaaaaaaaatccaactatgctaaaaagttaattcaaataagcttttttctaagattgaataggtgagaacacttaaattcaccactgtatcccagtctcaacataaaaacgattgtctt

SEQ ID NO: 50455 - DNA, 1738 bp, Homo sapiens
tttcatttccttttaccaaggaagggcttcattcaccaagtcttttataacattcgtactgaagagaaaagactgtgaagaaaaaatttctgcaagatcttcaaataagaataaaaggcacacacggcaataaaagcaggcaatgaaaagaaattttacattgcaaatatcttcactttatctacttaggtaaatatcttatggcaagggtatattattgttaaagggcagtattaagtattaaatatatttacctagtcatatatatttgacacgtcatatataaagtagagaaatgtaacaaagtccactttcccgccattagcaatagttcatgctagtctagtttggtttaatttctttacctgtccactaagaggctggcttagcaaggaaaacaatgatttgttcagtcactagaattgggtcttgaccctctatttcactgtaatcatgccattcttcattatactaagaaaggagctattttatcactgcattttagattttatcaatggaccaccaaagctggcactaatttttgttcgagggaaattaaaaatggaagtaccagttaggcattttgcctgtcaagaccactatttttattttttaagctgtaatcaatcacagaaagtaatctaaaaaaattttctcaattcacaaaaatcactcatttttaccagaatctaatcttcattaagatggttttgggtattcaggaacaagcatactatttcacattaggaatgaagtcatatcctaaagttatttctgcttatttcaaggctaacgccaggacttagaaacatttccatcagttcaatataaaatttacatatttatacttctacacaagcctcgacatttttctcaatacgtactttataatcatcagaataaagatctgccagcacacacattggctgaatttccctccccacctaaagaatcatcaccaaggttcttcagttataaaatttaacaggtcaaagagcttaaaatttttactctttctgagacaacagttaaatatagttctagtcacagagtgtcctgagcagtgccagcctggctctcttggcacacaatcttctaaaataactgcatactgctgatgcaggaatgaatcacagaagcaatttctctgcacacacaagaggagtcaaattcacaattagcttcaaaagctggattgctaatttaagctagtgttaagagctagtcttctcagaagacatgccttgctattttatgcaaacaatttttcactaggcagaaattaaccttggaagccagacacaccataccattcatactctttattttttgtagtcattcacccactggcactaggatagattttatttttgcaactacctcaaaataggcctttactagtactactctggtcttgatttcagtggactccttcagctttctttttttggagacagagtctcactctgtcgcccaggctggaatgcagtggcgatctcggctcactgcaacttctgcctcctgggttcaagcaattctcctgcctcagcctcccgagtagctgggactacaggcacacaccgccatgcccggctaattttttgtattttagtagagatagggttttaccatgttgcccgtgctggtctcgaactcctgagctcagacaatccgcccacctcgacctcccaaagtgctaggattacaggggtgagccaccatgaccagccgactcctt

SEQ ID NO: 50456 - DNA, 2024 bp, Homo sapiens
tgatcacccgcatgttttattattctttggaaaaaaactttatatatattaaaaacaaaaataactttctgcaaagtgctatcgtgcatgaaaacacacatcccacttatcatttccagcaaacactgttcccaaacttaagatcggctctcgtttctgaaaatcaacactttacttccaagagccactcaacacaaagaccagtcaccatctgtttccaccaaagtcaacctctattttaaaaatcacagttggccatcacgcctacctctccgcaaacaaacgcttggcacattcaagaatcagcgatttttttttttttttttttgctgtcgcccaggctggagtgcagtggcgcgatctcgactcactgcaaccagcctccacctcctgggctcaagcgatcctcccgcctcagcctcccgaatagctgggattacaggcacccgccgtcacaccctgctaattaaaaaaaattttttgtgtgtggagacggggcctcactatgttgcccaggctggtctctaactcctgggctcaagcaatcctcccgcttcagcctcccgagtagctgtggccacaggcgtgagccaccacgcccggcttgagttagtgatttctgaggtgccccgttcacctgacaaaaattctgcatttattaacaagttcattaatacgcacgacattctggttaattttagttgcattttcagaaactggtctgaaaatggtccttttcggacgtcgctctcgctagtccactcgggaaatgctagagtggcaggaactccccagtggagcgcaggcgaccccgaccaacctcctgcttggctcagggggctacgtttccccgcccgtccgcacccgagccccccacgcccgggatctgggcagccggccgggggcgtgaggcggaggtggaaggggcaggcgagggcagcccaacgccccgggccctgaaccgatgggccggccgcctaggtggacgccggagccggacccacagccccgcaggcccccggtgggccgcgccgggccaggggcggacgggaccggggcgggcaggaaagcggcggcccgtcccagccccgcgctcccgcactcgcccccgcggcgccctcaccttctcgcacagcgtccgcacttggttctcgttcagctgcttacactcgttcagctgctcgacccactggtccagctccttggtgaacgccttgtcgtccatggcggcccgatcccgatgcggatcccgagccccagcccggccgccgccctcccccctccccacccgcccccggccccggcccgggcgccgctcccctctccctccgccgccgtcgccaggtcccacagggggaggactgagccgggtagggcggccgcgggccccgcgccccgcccaagcccagcaggcggctccgagcgcgcagcctggaggagacccccgcccgcccttccccgcccggccgcgcgccgcgggagtcggtgaaggacgcggtgaggtgccggggagcgcggcgcgggtcctcggcctagctctcgccggacgaaggccgcccgctgccgcttcaggcccgcctcacgcctaccggcctctcccgacttgtctttccccttctctcgctctttctctcccctccctccgggtttccgtcatcgctcgggcatttccgccgggaaaaggcgagcaggcggcgccgccgggacacggcgccctaggagcagaacagcgccctcgcgtggcttggcggagaaacggtccgaggaggccagggtccctcttttccccaccctgccccagaccaagctctgctggttctccctttaaatatcctgatctctgggaactttgtcctcactttagcttcctgcagtactttgcagcgctctggacagggagttggaaaacttgggcttcccttaacattgtctccccagagtctagcactcaatagcaggcattcaatattgatggagtaaattaattatttccagcctcacctgtagcccctaacatctcgaat

SEQ ID NO: 50457 - DNA, 999 bp, Homo sapiens
ttgattcaagaagaaataaaaacaatgaataatcctgttattattaggaggaaattaaatcagtagaaattcaataaaagtaaaaatgataatacatcataaatcagctgagttcatctcagaaatgcaaatatttgccattgtctagctcacctcccactcccttctcaatctcctttgatttctacctccattactctacctaaatagcaatcttcaaagtcatcaatgattatccacatcagtcatttgcggttcatgactcacgtggcctctctctgtttaactcttgaccactctgttcttcaaataacacagcttgccagacttctatgacttcataatcctgattttcttggtctcttagtaactcacctgtctgtatctagcctttattatttactaatttttgcttaaaagaaaatattctttatatttttattttttaatatttcatcaaacctaacctttgaaaacttggtaaataaaaatagaactgtggttttagtttgcatttaattcattatcagtgacattgagctattttttctgtgaatcacttgttcttatctttttgtccatattttcccacaaagatagtattgtagttaatgatttataaggactccatatacaaataaattagttttgtctgtcatatgtattttaatatttttgtcttttaattttgtttctacatgaggaagattcctcacacagaaaaactaatttctgtatagtctcatttctgaatcattttttttcctttgagaataggtctcactagtgttgcccaggctggtctcaaactcctgagctcaagcgatcaataaatgccttggagaattctggtttgtcctcattgcactgtgtggggtgagtgagggcaccgtcatgggaagatgctggctaactgcacactgatttttgatcctcatgcctcagcctccccaatggctaagtagctaggattacaggcacatgccaaccatgcttggc

SEQ ID NO: 50458 - DNA, 1251 bp, Homo sapiens
cggcacagcctgctgaggggaagagggggtctccgctcttcctcagtgcactctctgactgaagcccggcgcgtggggtgcagcgggagtgcgaggggactggacaggtgggaagatgggaatgaggaccgggcggcgggaatgttctcacttctccggattccaccgggatgcaggactctagctgcccagccgcacctgcgaagagactacacttcccgaggtgctcagcggcagcgagggcctccacgcatgcgcaccgcggcgcgctgggcggggctggatgggctgtggtgggagggttgcagcgccgcgagaaaggcgagccgggccgggggcggggaaaggggtggggcaggaacgggggcggggacggcgctggaggggcgggtcgggtaggtctcccggagctgatgtgtactgtgtgcgccggggaggcgccggcttgtactcggcagcgcgggaataaagtttgctgatttggtgtctagcctggatgcctgggttgcaggccctgcttgtggtggcgctccacagtcatccggctgaagaagacctgttggactggatcttctcggggtaaagtgtcttcctattcccgttttcccagctccgtgccccggggtatctatagtgctaggcttctgagacacgtggaggcgcttaggcccgcggagcaggcccctgggctgtgtttgggagattctggaaaaacagactttctcccttttcctttcccctctggagcagctgggaaaggcgtctctcggagcttccgccattcagaaagtgtttccccgcccctgacggccccagcttgatgtttaccttgcgcgcttagttaggattgctctttctagtacggcctttattatggcagaaattgagccactacaggtctgcacagcaaagtcgagggaaataacctgctgtctatgatttagcaagtgatgatggatatttttgagttcaaatcactcagtctttaatggattttcttttctttttttcctagttgaatctcagttgttctcaggctaggtttgatatgaaaaatactactccctattgaagagggtaatataattcttaggatgctaatacaggagtctgtaagtcggagtacttcaggctttttatggttcggtacatttctttttaggggtgggatattgggataagtaggacagttcagatcttgatgtcattgaatagtggtgtctacctaaaaggaagaggctggggcacaaa

SEQ ID NO: 50459 - DNA, 883 bp, Homo sapiens
ccaaggtgggcggatcccttaggccagaagttggagaccagcctggccaccattgcgaaacactgtctctactagaaatacaaaaaaaaaaaaaattagctggtcgtggtggcacatgcctgtagtcccagctactccgggggctagggaatgagaatagcttgaagccgggaggtggaggttgcagtgagccgagattgcgccactgcattccagcctgggtgacagagtgagactctgtctcaaaaaaaaaaaaaaggaagggcttacattttattttggtgctgactgggaatgaaggcaatgagggatgactgttggagaaggctgtgcttactaaacagtattattaagtagcagcatacatggtgttatactgacttctgattttgcaatagtacagacaggttcagattctcatttccaccttctccttctgcctaggtgaataactgctgggttatagtacagatgactgcagatcatttggaatttactttaaatgtaaacagtaaaaatttgaaagagagggaaagtgattgaggcaatttggggattgaataagaaggtctttttgttggaattcatttaaggaaagaaaatgaaaatttgatccctaatattatttaatgaagtggctaaatgaatatctctgctttgtggtttgaaaattaatattgattttttttccccctagaggaagaaatcctacttagcgacatgaacaaacagttgacttcaatctctgaggaagtgatggatctggctaagcatcttcctcatgctttcagtaaattggaaaacccacggaggttaaatattaccttttttttttttaacttaaatcaattctgtttatttttttatcacattttcctatatg

SEQ ID NO: 50460 - DNA, 955 bp, Homo sapiens
cagagaaagtaaaactaaagtcacgtagcgactattcgcttttggttttgataccatgctacctaattccatagcctgggttcttagctgatacacacagttgcaatgcctttccagaaaatttctagtagtttccaccattcctggacctattcttttctaactttaaaggcaatccatcttctaagtcagtgtggcagagactctagtttcttcacccaaaccatgttctcctgtctttcttgggctcatgtttaaactatatttctcatcttctcttaggtattaccatatgactaaggtctagtaaatgcaatgtgagaagatctgttgtataccacctccaggcttggcctgtaaaaacttcccatggacatgagctcctccatgccctttcccctccagctagatgaattggaaatgacacccaggacaactggaaggccatatgtcaaaatggacaaggcttgctcaccctgaattctagaataattttgtggaggagaactaccctaacaatctgttttcccacctagcaaaaaaaaatgtgaccacaaaaataaacttctgctgtgtttgatccatttgaaagtttttgatctattagttctagcagttagcttcctctaaaaaatacaattgattaccatgatgtcatggataacaagttggcaacctgggtcaaagtcctattcttgtttttttctagtgataagaccttgggcaatttattaaatctctccaagtctcagttttctcagctttaaaataatcttcaatcatagtgttgttctaagaagtaaattagtttatcttaaaaatcctattccctgttaattattccattctagcaatcaatttgtgcttattctagttgtcccactgtttaaaacacacatgccttagtattatgaaaacatttcaaaagaaatatgtcttagatttctacatttat

SEQ ID NO: 50461 - DNA, 408 bp, Homo sapiens
tcttattaatcccacgttttccctgcctgtaaactcccttcttagtgaccgattttgctattttgtgtgagcacttgagtaaaattcaactgactcagagtagggaatcctggctggattaatgggattgtgtaacaccttcatcacttgaggcccagataggagtgactgtgcgatgtaaaaaaggcttgccaacaccactgatgtttgacgtgaaggtgaaaagttcagtggcccagagaagtgctttaagggttcttcttaaatctaacacctgaggaacaccttcagattatccagcagttgtgatcccctatgcagtgtctatttgtctagacttcttccccaacacacattccctagtacatttaaatggaaagaaaggtctgggaggttatttgcaggggt

SEQ ID NO: 50462 - DNA, 646 bp, Homo sapiens
ttacatcttttattttaactcatttatatcacttacaagactgtttttttctttaggacttggaatatgaccttttcatctttttcactgcagtctttttagtgtccagcatggagaaagtgctcaaaaatatttgttgagtgaatgacagtagagaaaataaaaatgtcctggattggaatcatgaaaactgtctacttatctctaatattaaaaagctcagtgtaatcttagaaaaaataatctgagagctctgacactttccagaggccacttccacgggaaaggaggagcaaagtctctgatcagaagttgagtaaatatcctctgaggtccctgattatccagacattgacaaaagaaaggctctccaaggtttgccattattactataaggaagtcccagctcagatgattcatagttaaatatttgcatctcctctggctaagaaaaataaaagccacgacattccagagcctttaggcatgtaagatcttggtactttcccagttattgctccttagaaaccggtaactgaaaaggccctgtttcagaaaagcaagatatgtcaaatgggaaggaagtagaatagctatctggttggaattcagaaagtatatcaaggccaacaatataattgttgaa

SEQ ID NO: 50463 - DNA, 603 bp, Homo sapiens
cacaccctacacacacacaatgccttccttctaaccttgtctatactgtctctgcaacacacaaagcatatgcccaggataagcttctctttcaaccacctatcaggctttcaacatgtggtttgaaaagatagtgacattgctatgctctgacatacaccgtaatgtcagtacagcagaagcaagtggaagattctacttttccgataaagatcagttgctgtttcctgtcttgaagacgaaagttgagcaaaagcaaaggtcatctgtgtttatattaacaatgtaagagttatactacattttcgcaacaacatcaggtcattatttatccacttgtcctttttttttttatcattcctttgaactgcctgcatttgcttatcgtgatatttctcagtctgtaaacagcccgagtagctgttctatttctctaaatagagtcttaggtcattttattatccagaattgtaagtcatcagaatgcacccatctgttgtccttccacatctgggctaactttaactctttaagcccatagaaaaagtagaaaagccattgtgatatgagtttgatacttttttcctaccatactgctttcca

SEQ ID NO: 50464 - DNA, 758 bp, Homo sapiens
ccaggttcaagcgattcttgtttctcaggctccagagtagctgggactacaggtgtgcacttgtattttttagtagagacagggtttccaccatgttgcccaggctggtctcgaactccttttactcaagcaatcctcctgcctcccaaagggctgggattacaggtgtgagccaccgcacccagccaatcacactgtatttaatatcacaacgaagtgcagtctgcccttctcaggatgatcttagatctatttttcagcaagtcgcattcgggtggagcaaaagcttttaaatggtggtcaattacacaatgattaaatttagtttaccattataggtcaaagggaagtgggaagagtttgatgactgtgtatttgtcatgtttctagttatagtgtacaactctgcctgtttatctgagtgagtgccaagaggtgaggtcagggcaggggctcttgcacatggcacatactatctgccccacagctattttgacttggacagtcattgtgctgggtggtaaaaattccagtgggctgggtaggacatactggggccctgtttcctctcatctgtgtttgagaactaggcagcattgcatcaaatggaaggaacaagtgatgagacatcaggaaaatatcagaatgaaagagaaatgcaaggctctaaaggaagttccaactcacttcgacaccctccagttagcaaagaggtgacagaatcccaaaagggcaggggagagattatggatagcagg

SEQ ID NO: 50465 - DNA, 3666 bp, Homo sapiens
ctaaaaatgaccagtaagctgttttgttgaagcaaaacatccagaccctaaacaaaagtagcagaattacaacatttccatagaaatggattttgagcttcttttttttaattggggaaaatcttattttttaaaaaagaatcccagaatacatctttgctttcagtccttcaattctaacataatgccatgttagagaatatgtggtagtgtatactaagcccttatgctgtctcacatccttgggacaaaatatctgttttgaaaggacttctctgaattttgctatttcctgcttactgagcagtggccccctcctgggaaaacagagttatttcagccagtgttcagactccatcttgcatacgtctctgtggaatattaatagtgctactgagatatattcatcatcttttctctgcttttgctgtctttatagcccagtgaaatttatatttggtgtttgtaggaaggctatcagaagctacttggacatcaaacttttaaactataaataatgatggcaagactgctaggatatctttccacagttaaacccattcaacagagtttcgttcttatgacagtgcaaattaaactagaataaaattagtgtgattttaggacagttttaaagtgaacatatttccctccctcccttcccatctacatatcaaggagacactccagactgcacttttatttaaattgcggccatcagaaaataccgtgagaaggtagtgtgtaggtaatggttcagttagcattgaccccagaaaatggaaaaccaagagcaagtcacttttaaagtgaagcaatagattttgaatatggattgttccaactcaccacttcccgaccacaacacaagagtatttcactgtaaattaagagtctaagttaaccacagctgtggtataactctgagaatgttttctctacatgtagacaattctggatccttccgtggtgcccgttaccctggtctttaacttttgtcctttgcaggggaggggtcaatgccttcttatttccttgctctttagaattctccaccagagggaggacaagggaaggagtaggtttcacgcgcagttctgagtaaagtttgaatctgagaaaccccacattcacgaattaaggatctccagttctgtgtctttattctacccctccctgcctgcttttccactcggcagaactgagtgactttcagcggctgcagtaattttaattattctgagtcgtgctccgaactatgttttttatcagttcctctgaaaattaagttgtagtaagagacgtagtttaagggcacccccttagaagaggccaggttattttttaaggaaaagctgaagatttctaacaggcacttactaaacacacacacacacacacacacacacacacacacacgcacacggcgcagacccagcaggagagcgcaacctagcatctttaaggttcgcttagcccttcctgtgcacctggaaggaagccttatcttaaactcccttccacctagagtttattttcgcctgcgtgcgacagggcttttgtacttaagtgagttaaggaatgaaccccgaactcttctgggaaagccaccaacgttccccccgcacccctcccagggttcctgaccacggagactctgcttggggcacaggtgtgggagtcgcaaacttttctctgcgccgtccttttccgcgtggaatgggacggagcagccctcccaggcgctgcctggctgcggaggggagcgggcagcgagagcctcgggtctccgcctgggttcccgggtctccggggcgctggcctcggtctccgcgcagcgtccagcgacccctgtcgggggttcccggcagccgcgccgccaccccccgcccggccagcgcgggaggaaaaggggctgcgcccgggagcgccgagcccaggctcctcccggtggcgtgtccgcgcctcggggtgggggtgtggtggggaagagggagggggcgaggccaggggagggtgcgaaggaggcgcctgcctccaacctgcgggcgggaggtgggtggctgcggggcaattgaaaaagagccggcgaggagttccccgaaacttgttggaactccgggctcgcgcggaggccaggagctgagcggcggcggctgccggacgatgggagcgtgagcaggacggtgataacctctccccgatcgggttgcgagggcgccgggcagaggccaggacgcgagccgccagcggtgggacccatcgacgacttcccggggcgacaggagcagccccgagagccagggcgagcgcccgttccaggtggccggaccgcccgccgcgtccgcgccgcgctccctgcaggcaacgggagacgcccccgcgcagcgcgagcgcctcagcgcggccgctcgctctccccctcgagggacaaacttttcccaaacccgatccgagcccttggaccaaactcgcctgcgccgagagccgtccgcgtagagcgctccgtctccggcgagatgtccgagcgcaaagaaggcagaggcaaagggaagggcaagaagaaggagcgaggctccggcaagaagccggagtccgcggcgggcagccagagcccaggtgggtgcgcagcgcggcccgggccccacgatcctcctcctgctcctcctactcctcctcctcctcggatgccgtggcctctccctccccctctccctcgcccgtcctcttcgccctgcgctctgagcgcccgttgagtcgcgcggtgcttcccctcctgggggccgccgctcacctgggcgccgagtcctaccgggcgcctacgcccagagctcagggcaagggacagcagtcccggccgcaccctcccagagtcccgggagcgcttcgctccctggcacggcccctccccagcgccttagcggctgagcccagcccgggagtgggacctgggctataggagtcgaggctgcgtgcgcgcgtgccccgcgccataagcgctttgcacgggggccgtgtgccctctagcgggaaacgctggaatgggccgcctggagggagagccggtcccctcggtgtgcctggcagcgcagaagtgggtggtcgagcaagaggccgcgtgggaagttagcttcggcgttttggggcacagggcaagcgatgtagagtgcgcgccggttcatcttgattcagtcctgtgctacggagactcaagagcagcggcagggattcctaaaggtcagcgaagcagatgaaatctagtccagtgtcaggaatcagctctgccccaaacaagttctacaaacttttggcttaacagttctatttttcaagacctctgtgataaatatggataatttactttcccaagagatgtaagaaaacaaccgtttatctgaatttttgaacccaattgtttgctggttatctatataataaaatggcaattgaagctttctagaaacaaatcttgtatttcatcatcagaacacgagcatgaacaaaagctttaccttagatgtccctaggaagcgctgatgctttggacattaccttggacaaaagaggcatgtcgaataaatacttgtttatgagtgattggtaggtagctgataaaagaggggaggaaggagatgggggagaatttattttttgcctctgcaattc

SEQ ID NO: 50466 - DNA, 833 bp, Homo sapiens
tttttttttttttttttttaatttttggccaattggtatttgactctaagcttcctttgtgattctctgtcgatatgttgttcttactctgcacctctgcacggaattctgtcttttttctttttcctcttaaataacctgggaaaaattcactatcatgcctagccagattctagaactatcctgtctcccttcactcctggtaggaggggcatttgtgagtctgggtgatggaaacattgagaaacctagtatcccaaataggtagaagcaggctgtgtgtttccccaatgacatcacccacctgtttccctcactaagtggctctgcaggctgaagtgcttgtaaacattcttgcgtataaagtaccctgaccctaacggggcagcctgtgtttacagaacaagaggaatgtccagtgatctgtttcaacctggttacttgtaaccacctagcctatgtaattattaaaaacattaaagattattcacagaatgaaataggacttattttgcagaattaaaatagcaggaagagcggaagaaagttgtatattcagacatgaatacttctcatacccatgaaatggtcagataacactaatgaaaaagaggagaaaaaatatatatagagaaccaaaaaatattagacaaacatgaacactgaatacctactacatgccaggcactgtgctggacacttttatgtttattaatgagggacctgctatttattgaattcttaccatgttccaggcagtaaaacagatgtatattgtgtattttgtcatccgtcctttcgaaaataagaaaattccttgctattaggcagca

SEQ ID NO: 50467 - DNA, 1818 bp, Homo sapiens
tggataagagtgtcaaattccataactgcatatatacattatgaaaacagtactgaactcaatctaaatattgaaagtagagtgaggtgcaacataattttatctctggcagaaaaatgttgaggtttcaagctatgagaagattttgaaacatgactcttttttctggcaacacttaagagttgatgcttaaacctcactttattgtatagaatacataatcttctcttttgggactcgtataaattgcagcaattgaaaaacaaaagtgtgcaccaacctgcccctcactatctttttatcaagcataacagtatattgccagcaatgttcatagaattgagtgcaggtgtttctaaatataaacaaaataaggaatatattaaattcacatttctagttttttatttcctcctcagccttcctagaatggctataggtagtgtttaaagttctggaagtgtgatagattcttaccaaatcaatgttctgttagcattctccaagtaacaagttaaattggatttgaacagtactgatagtttatcatgttctgttaggatagatgaaaacaaaccaaatgccagtattttgggtgagtcactttatttgctcaaagacgcaaatgaatgaacttctggtagtttagttaaccctggagctccccctcttgacaaatagaaaaaacaaaaaaataaatcagatagtattagcttgaaaacggatttcttttacccagataaaaaatatgccactaaggtacatacaatgaagttttcttgaaggaactaatgatattttggatttctcctaattttgtgcatgtctgcacttgtgtgtgtccttgtgtatgttttaatgggttaaaaaaaaaagcgagctaccaaaataccaatagatgtcagtgtttgtcgctttagaaaaagtgaggtgttagaaaaaaagaagaaatggacagctttatttatttttggttttactaaacataaagctggctacttttcaacaattgactaataattcactgtatataaccctgtttacaaaagtacattttattaaggaaaatattccatgttctcatctttcttctaaatttttttaaaaaagcctctgcagtaaattcccaaaagaattcagaatgtaggcagaaaatatgttaattttttaaaattaggaaacaaaattatttgagaatgtcgttaacacattagatttcttttgcatttttaaactagaaattagatatgcactttcttatgttgccctgattatgactgataaagtgcatttttcagtccaagtcaagtgagatctgtggagttctgcctctacataagagcagagatgatcagaattctcttcattcttcctatgccccatgtcacctttttctggcctccagagggtgctccaggagcatcacactgctattccccaaagactgcttttttcttctctctctctctctttttttttttaagttactgcagtattctgggcaatctactggaagaacagagtcccgattccatacatgttagctgcctcaactggagtttgttttccagctggaccacatagccctaattcattaagtattctaaattagaatattttaaaacattattctgatgatgttgatgcagtggttagcttgcaaggggacatctgtcagattaattccctctaggaatttcccccaagagaatcaagcatctttaaataccttccaatcacgccttacaacagctccctcccactgaagtgcacatggtacccacaaagagatttagtgctatttaagagtttcactct

SEQ ID NO: 50468 - DNA, 413 bp, Homo sapiens
agacagggcctcaccatgttgcccaggctggttgaactcctgtgctcttgccatccacccgcctcagcctctgaaagtgctgggattacacgtgtgaacaactacacccaactggattgctgaatttttataacatgtctctggtaactaagatcctttgaactatgaccattgaattcctaggacttgtgtgatctcagtagagcaatgactcacttccctcaggttttcagacttagaggaaaatccaaggatcagtctgtagtataatgctaggcatgaaaggcatgaggaaatgatgggagcctccagacagaaaaggtctcccactggtgactgatttctattcagagacaatgccatccctgtgattgaagctccaacacactgaaaaggtgtgaaaccaagaaaag

SEQ ID NO: 50469 - DNA, 637 bp, Homo sapiens
ctatgaaatatcccattactagtttcaggtaatgatctaagaattttttaaatgactatgtcagagctaggggcttcaggatagcattacaaggataatcatttcagagagttatatttttaaggccttttaaaaagagggttgtttctagtttttaacatatttgttaatcttattttgatgatctcataaaatcagagtctaaggaagagatgtgtctatgtgttgcttatgtcactgcttttttttattgtttacattttataaggagtgtctacatttgggggggagttggaatgttggttttgttgtttttagcaaaagccttggcatttgtcctgagagagctcatgcagtgtttgctgttcaggttgcatgaagggcaatctttagcaacctgtcagagatgcaaaggccactagggtctgcttgaggttcagagttcctctgcaggactgcgtggtgacagcacaccacaggtggcccattcagcactgtcatctgggacagcaaggataccctgctccatttgtcatcctatggaattctgtcagcagttgaaagcctttcagcacaaaacctttaacattcgaggcaaacttcctaatttttttttttttttttttttttttttttg

SEQ ID NO: 50470 - DNA, 877 bp, Homo sapiens
ctttttcatttcaagaaaacttcctgcaagctgccctctctcaaaagagaaaaaggtgtagttaaaggtgtagttgtgccactgcagatataatatggaaatatgctttgaggttcccttgttgatgtccagaatagtcagctctgtttgtacagtattccccagttcttgaccaatttattgatcataatggcaagtgaacagcttacactgcttatttcataccagttgagttctctttctgagtgaacttgtgaagatcttccaataaatgtaattagactcactggaagctcaggtccttagggatcagagtccctattaaatcagcaaatcttgttaagaacctgacctaccttagtataatcaacttatcccccaaagaaactaactcgcaaatagaaaaacttctatgaattagagactgatcgcattttgggtgcagtagtatctttggttcaaagttctaagtgtcacatttccttagtataatctacattagctcatttgccaagttggccaacgtaggaatgtgcactctattccaaatcacacatcatttgtactggtgacttctttggacaaataaaacttgttcctaagtacaattggtggagtagttagaattgtcttccaaaggacaagtcaccatttgggcccataactgtcctacccatcacataggattttctttgatacagtgccctgctacctcatattgtattgcttcttgtgttcacattttactgttaaatcacagagagcctgactcaatttactagttaactacaagccaagttcatgtttgcaaatgtctttgaatttaatatatttaagttagaaatgactctttgtaaagaccactggatataaagtg

SEQ ID NO: 50471 - DNA, 1328 bp, Homo sapiens
tgaatagccaggaaagtagaggttagctattcctatgatctgaagttctccaatctaattgtgaatcttgttgtgccaccttgaatgagtcacccaatcctctgtggctcagaggattgggtatcctctgaaaaagggggatacgatttgtaccagcttcatggtgttgctgcgaggatgaggtgagttaatacatttaattagaccagtgactggaaaatagaaggcacgatataagtatcttcttttaatgttattactgctactatcactactataatttatcagtattagtagaagtgctaaggtgcagtgacacaagccctcttagaaagctcatatgagcacaggaaggaaagaagagagaaagtaagaaggcaactttaacaaagaccaaagcactccttttccctccacactgaactacaggttaatgatgaggttatcatgacccggttggatcgcaagggctgttccagcagctgacatctgttctagaacctatccttttttctccttgtttgcctctgcttgtatggtcacctcaccccgcaccacattgctagctgtctctctttactctgactcagccagcaggcatctcaaaactcaacacagggaaatccacagccaagcatcacaactttatctcttgtcttttcttctcactctttgtggtacaacgttccttccaatgcagttgtgggtctctattaacacttctgtggctttctccccaccccatcaactctgtaaccaatcactacatatgcactgtaatttaggctggaatctgagctttgacttttaccaagaaattatgtatttctaaatattggcctttggttctactacttgggtctaaaggacatgttcacatatttcctgtctattcagatgactggtaacttgggtgattaaatgtttttcagattgttttattttacttaaactctaacctccttctctaatgcttgaattatttttttttcaagggattggccaatttgtgtttggttgtctagggaaaaaagtgtctgagagcgattagatgaagccaacttgctttcagaaaatgtaattttcttaagatactagagcatgatgacttcctttctttgacacaaatatgccttatctagacctactaatgagattaacctagaaaatggacgtgcaaaatggggagtttgttttaaactttgacatacaccagttgaaaaaaattctgagaaatttttaactaaaaaaaattcaagccaggtacagtggtgcatgcctgtaatcccagctactcagggggctgagaagtgatgatcacttgagac

SEQ ID NO: 50472 - DNA, 2575 bp, Homo sapiens
cctactctttgtattaccgatgtctatctttgctcagtccctgcttccccagctagtttccacaataaatattgccaaatattaatcttcctaatataaactggtgtcatattacttccctggttacaaaccttctgtgtttcctcatggtttatagaatgaactaaaaacttcctagtctttcaaggtctaccacaatttagccacagacttgctctcatcttatttcttactattctcatttatgtatattacctctaagatatcaagaaatgttaattagagctgaaataaatatgtatcctaaagaggcctcgaatctttcaaattcctccttactttgtccatgccattgcctctgtttgatgtgtttataccagtattttatgggtccaaactctactgttactcaaaattcagctcagttactaacccgtatatatcttccccatttcccccattttaaagcttttcttctgactatgggacaactttagcaatttatctgtttgtattgagttgcaacttatcacttattaccttgtattattgttatttgcatacacatatattcttacatgtcttgataatggattatttccctgaaggcaggattcatgttcattattctgtcctttacatccccttgcatggtaccttgttggtccttgataaatattaagaggatgaatacttctctgagttctgtgatgcagtcttctaacactatcactttcattgcaagtaaatatgttggttaccagaataatcatatacatttagtattttttccttccgtttactttttaatattcacatatattcacgtttattatggtaatatcgaactctgacattgtcctcagtacaattttgtgttttataaggggcctgatttgaaaaaaagaaggaagagaaaccaaagatctgaaacccacaggctcttttcttaatcatgaatcttggcagtgagagttgcaatatgttgccacctattaattaaatctgtactctggtgaattggccaagagagagaacattaaaaaaaaaaagaaagaaaataactaagaaggatgaggagcataataagtctaggaaaccacttgagtaatcagaaactttcatgtagaaataccccggccatacctttttcctaggggctgtgagaaaactgcagggaagtctgaaggccaagaaagaacctaaaattttggctggtgagtcaccactaaaatattacatagcctcaaaacatgttaataaataacactgaaccaaaagtaagagccaattatgagcttaatcagaaacagagagtaagatatggatgaaattttagagaccatctagatttcagaacattgctaatcattactgaaaaacagatctcttggaacatctgttgacagctatgaaccctgcctttaggaaaatgcacataaaaacaaaattagtcttaggttgagatcttttgattcagagcacatttcatcattaaaggcatgaaaaacacatttcgggaagagctggcaatcagctcaagatcacataggaagttagtgacagggaggtagtgtctgaaaagtgcctacagaactcaagctcctgtcttgggattcatccaacacattttctctcatgtgtagtagcattccatgcataaagtaatcgattttatttgagtaaaacttgcttagttttttgctttctagaagggaaaccaaaataaaaatgtaatgtcttttgtgctaggcactatactgggtccttccacatgtaccattttactactcccacagccatagataatattcttatttcacaacgaggaaatgaatattaagagagattaaggtgactttcccaaatcaatacagatactataaaatagggtttagatatgaagccatagctctacctcagttttggtgatttcttttttctatgcctccttacctttcactctgctatgctgattctctgggaaggctttttttgatctggcaaatgaaataaggcttactgatactactacaacaaaaatgattgcacacatttaaagacataagaactttatatagaaaagccaccaacagaactgtttgggaatgtctgtataccttctctggcacaatttttccagttattatttgagctaagtgtacccatttctttcctccctgtttaaaatattatccagcactgaccacacagctggtagaactgttttggagaaccacccattaatatgtaccaaaagccttaaaattttgcctgcattctgtcctgggaattctacttctattaatttatcctaaggaaatcattgaccaacaaatagccaacaaatgtatgaacatgaatgtctaaaatagtttattatgacttaaaaattataatatgaaacaaactagggatctagaaatagaaaagtatggcatattcatacaacgttaaatatgcagccattagaagtgatgttgtagatatatgtttattgaaatgtaaatattctcatggtgtaatttcatagctaagggttgtattgtacctgaattattgtttttaaactcta

SEQ ID NO: 50473 - DNA, 749 bp, Homo sapiens
tagcaacacaaaaatggcccaacacaggcctcatctgagcaatgacttgaatgcaaatgggaagatttgtctcatagaaatcctgatcccaagaaaaagtggtcaggtgaaggacagttaatcaaagtcctaagatagacgtacatgtttcagaaaattccaggtggaaaggacagcttgagcaaaggctccagggtaggatcatattgggcatgcttgagaaaaacaaggaggacaaacagctggagcagtgaagcagaaggtcaggatggtgaaatggtttggctgtgtcctcacctaaatctcatcttgaattgtaatatccataatccccacatgtcgagggagggacccaatgggaggtgattggatcatggaggcagttccccccttgctgttctcataatagcgagtgaattctcacaagatctgatggtttcataatcatctggcatttcccctgtttgcacttctccccactgccaccacgtgcagatggtccttgcttcacctttgctttctggcatgattgtaagtttcctgaggcctccccagtcatgtggaactgtgagtcaattaaacgtctttcttttataaattacccagtctcaggtagtatctttatagcagtgtgagaacagagtaatacagatggtcacagggactagacattataaggcccacagtaagcacactggttttcactttgagtaaaatggggagccattgcagggttttgaactgaaaaa

SEQ ID NO: 50474 - DNA, 1035 bp, Homo sapiens
aatgtctagggtagaaaatctcatgctcttcctaatgtgtcacatgtgcaatgtagggtatttaaaaggcaccatcctttgaggaagaacatacagaaacattgctttttccagaaaccatattggtgaaagtgttttgatggaaaccagccttgggaaatgttttcttctggctttgtcagcctaatgggaatggtaaagttgtttccccaaaaaaaaaaaaaatctttatagaaatatgttgcctcctggtaagtttaaagttgtctttttaggcacaggtcaggaagttatctcagattcatagtggtgtgtggcgtgttctttctacccaacttttatcaaagaacaaagttcagagggcatcagagttacaattcaaacagtctcagaggaagacaaaacaaggctatctttaataaataaaaacaatggaaaaggaatcccaatggctaatgtttatcttgcttctaagattccttatgaaatagtggaagaattcttaggactcattttttcttctcttctcccaggcaattatcaagacttcattttgtatcagcccaggatctcttccctctcttattgacacatcatctgttagtatttcacaattttttctagattcatacagaataggtttggtcttgagccctattttgctcttgctatcatttgtctcattctggggcctctactatttaaagccttatattatatgctgataacttgtgatcatttgaataacaatatagccagagtccctaaatttcattcatcatgtcttgagagaaaactgttactcctatctctacttccagagcagggattatccccaaatcatgtgacttcctaataaccactaaaattgaagattttaatcacttagttgctaaatattcttagtcactagacttgtcctctaataaacttagactgatacatgaagaatcttcccctgacataatttgatggtcagatgcaaaggccctagtcagtatctatgctttccgcttccccagactctaagcactg

SEQ ID NO: 50475 - DNA, 1831 bp, Homo sapiens
atgtgtcaactaaaaataattaaggctcacaactccaggaagttccacaggagttccgctagaaagcagagcttccacactactgtggatattctttgaaagcctcagaactctccaggaattgagaggttttcttagatatggtcctagataagattttcagggataccccagtaagaaacaaagccttcaaatgatgctgtttgtgatgcggtggcaggcctgggtatatccaaagacatttctctaaaattttgagagattttctcccctgacatacatctcttgttagcaaaagacattgcattgaattcttacttgaggacatagatggccttggggaccatctgttcaaagttttctggatttcatgccaacttgtgtgaaatccaaaacaagcactgtgtctaccaaaggtaaatcattaagcctggaacagccagcaggagacctgaattcttttcttggctactttcaaaaatagttgactataccacaggcaattttttttcagcaccctgcaattcagaacctcatgtcaaaaagcacattacttttggcaattaactgatttcacattataatgcaattcaaaatttattatagtcaagtattctggttatgtcagtggtggtaactgataagctatgttatctattctttttaaagatggggttgtgctatgttgctcaaactggagtgcagtggctgttcataggcatgatcaaagcacactatagcctcaaactcctaggctcaaaggatcctcctaccctagcctcctgagttactggggctacagacatgtgtcaccatgcctggctaagccatgttatctcaaatggacattttcacattactacaccagtaatccactaattgtgccatttgtcagtcatggagaagctgctgtgtgtgtgtggacttagaccacccactgtttgaggcacagggcagcttttattttctttttgcagacaaatttctctagccagactggactttggccaaggaggcactgtctagtgtcttccctgcataaaattcttgtatttttgatgtgaagtagtctttgtgctgctatcatcactgtgatactgatggaggtcagaggggatggacagcttgtggactgagagccacagaaggctgtcctttaacacaagctccttcattctgccaagcagacctccgtagggagttgctaggccatccaaggttcagctgtactgacatggaactggaaactggacaagaaatggaaatatactgtgacttcctctctcttcttcttctatgtttgccaaatagcagtttagctttgatatcaggaacacaaatgaggctgagggaaagaggaggtgtttgtgggtctttgtcctcatttttccattcctactcaccttcagccactgccatagttccatggaacatctgtttccaggtaacctgacagaacatgggaatagcacctttggagttcatctgtttggggcccctctgaaatgtttccacagagtcacatctttttttccaacaaaatgtttttccttcctaatttacttctcccttcagtttgctattggaaccagggacaatgataatttcgttgaaattgaatcaattggaaagcactggaaagaagtgtggtttaaaatctcaggttgggtttcttggaattctgagccaagtccctttcccagttgctcacaggaagtttcgactgatgtcattggagagagtgtgtgtgtctctgtgtgtgtgtgtatgtttacatcacagtacagccttaaggatgcagaaaaaatcctttctttcagttcatgtctaa

SEQ ID NO: 50476 - DNA, 3618 bp, Homo sapiens
atcactcactgaccctcctccaatacctatgctcaccctattcactatgttcatgtagggtagatagatattccttgctgggggaggggaaaataataagaaagactgcagttgccggaaagatatagaacttgaaataaaccttggtatggaaatgtggtttctgaagaagaaaaaatatactagtttacaaagaggactcctaaagggaagctagccagaacgacagaaggcacctgggctaatgacaagggcctcctggattgatgttccaataggaaagcgattttgcaccatgactgaccaaagtagaagactctccagatctagccactgagagccagcagtgtatgtgaggaacagtggctgagtgtgggaatatgagccagagttgtggtcttggcaccaaacatagctcactgctattaactgggcagggacctggaccagcaagaatatcccagatgcagtggacaattacccatccaactggcataacctgtgttcaattacaaaggcaactggcagcaagaaataacagcaagtgaactgatcagaatcagatcccttctgcatgtgcaccacagactggggaagtggcctattatatcagctttcaggagccttctgctcagataggaagacaagactcacatagagaacaacacgagaaagtgtacaaaattgcttttatgtgccaaaggatttcagggactggagagattgttatggatggtcacaggaggctcatggaggctgcgactgagcccaaaagaacgaagactgcttaggaaggcagaggagagtgttaggagaaagccacattccatgcaaaggtttcctaggtgcaaatgcataaagcatgctgggaagctgagagtaactcatctggctagagaagactgcactgaacacatctgagggagagaggtgatgaaaacactgtttaaagaaaatcattccttgtggatgccagatggagtacattgggaaacaactggaggtaaggagacgagctagaaaactgttggctgggcaatagtgtgggcatgaagggataagggctcagactggtggggatagaagacaggctgactcaggagacactgactgataagcaatgattaacaggccttgatgactaattgaaagttgaggggtaagccaggcacggtggctcacacctgtaatcccagcactttgggaggcccaggttggcagatcacaaggtcaggagatcaagaccatcctggctaacaaagtgaaaccctgtctctactaaaaatacaaaaaaataattagctgggcatggtggtgggcgcctgtagtcccagctacttgggaggctgaggcaggataatggcatggcgcgaacctgggaggcagagcttatagtaagccaagatcgcaccactgcactccagcctgggcaacagagcgaggctccatctcaaaaaaaaaaaaaaaaaaaaaaaagaagaaaaaaaaaagaaagaaaaaagaaagtggaggggtgggaggcattgagaagaggaggaaccaataatgaacataaggtttgcagccttactgacacagaaaaggacggtattataaagagatatgacaagttagttgggtgggggacctaataatttagtgaaataaatatgaatttaatgctttagtaaattgtctgggaagatagtcactggagatattcttctacagataaatccttcacctgggctcaagagagctcattaaatgacactactgcccaccgttttctcaaacccaaaacctaagaatcatccttatcaactctttctccattactctcaaaattaaatcagtgtccaaaacctattaattttacttttattttctcttaaatccacccacttgccccagtcccatactctctaccttacagtagaccaccctcatttttcacctcaaatcagccatgatctccccttcaatcactttccacaagaaaaccaccaagttctttctgaattaaacatctgaccctgccatctgctgattttatacctctggtggctccctcaggataaagccttaacagaacataacagtcttctcatagttgatgcctatttcattctctgccctcatccctcatcgttctatggttcacattctgtgtccagccatatcgagctatttacatttccttagatgtgtcaacctctctcacttccagtcttgcacaactgcccctctgtttggagtgtctttgacactgcatcattcttcacatttaatgtcaaaatagcccttcttccgggagcctttgctgaccctccaatgccagattaggtaactcttctttgtgcttctttaacactttattcactcctctagcataattggtatcattatgtacagtgaattgcttatttatctgactcctactctaaacatatgtgctgagccatttaaaaaacctatttgtttaattagtaaataaatagcacaaatagaaacatggttttgtgaatatttaaatcaattagacaagcaaacattgagtacctgctatttgccatgccctatgctgggagtggggaataaactggcaaatacactcctgcaaacaagtgtgcaatctcatatcatagagtcagtggtaagtcagcagatatcatgaaggtgctcagtaatactgaagaatcagaagggcacaatcaaaagggcctttacttaaaactcagactgagattcaagttctttctcaaattcatttttatagagtctttaacaagatgcttaacctctttaacccagtccttttatttatgttgaggatataagtctgattttgtatcttattttgattaaataacaactctggatgtcatgcagtacctgctcaataaatgctatttcctttcctttatgtgtgttcttatatttatgcttttacttgtttggaacttaaaatatcttcagacttatcttgttaaaatataactaaggtcaagggataggtacagggtagaatttaattgagaacttttgttggagggaagaaggaaatggactctgggaagtgagactaatactgttagagaagagagaatgtcccagaaattgagacttggagactaagactgcttctccggccagcgatgcatgtgcaggggagggagaagagggatccaactggcatgtttgccaatggctgacattagcctactaacttggaaatcacgaagagtttcaaagtctgtaagtgttttccagccacagtgaatccaattccttcacatccctaatgcattttctccttccttccgaccagctccagaggacttcagtgtgacagacacatgagcaacagcaagagcagagcaaggctgaagtctagccctgcttctagctaactgtatacctttcacagcatcttcattttctttattcaatcagttgttttcctgcccctcaatgataagcagtttgggatctctgctaaatttcttagggaattatgtgctcctgtgcatctgctgtgtttgtgtcctcttctcactgtcatttccaaaacaaggtttcaatatagtgctgggatatcccctgtgagcaacagtgagcaatatcccctgcctgcaa

SEQ ID NO: 50477 - DNA, 2553 bp, Homo sapiens
cttgtctgagtcagcctgccactaatgctaagtatgggcagggcctgctctagggttacctggtctgcaactctaagcaatgctagggttttggaataagcataaataatgccccgtccccctacctcgagtttggaagcaaatcagatatagacaagaaaagggtcaagacaaacaacaccgggagtggcacataattgttctccgagctagagaattatcaacagaacttttcctttggctcaggttagatttcagaaggtattcctgtaagtgaaagttaatattagagttctgagagtgatctaaatctttttaaatcctaaaatctgaagctgtctctttcgggtaaccattgaaatttatgttctaggctgcaatcttcgacttaaactattttaaaagaccaacatcacactttttcatactccctgtaattattagttctattcaaaactacttttctcactcttttttgtagacacttttttaagtgagcagaattttcgagggccttgggcctcactgatagcttatataataaataagtgggtgagacagtatgaagttgacctggcattcatgagtcacactaaagaatgaatgctttataatttgttcccacctttttttcttgaagtttggtatctaacttttttgttgtgacacttcctatcctatatgtcaatttacaattctatttcattcctatatcagtatctgatacataaaaggtattcagtaaaggattgaataaatacattttctacattgagcagcaaattaaacatttactatgtctacgttactaggaaccagaagaatttccgtaagacaatctttgggcagtattgttttctttttactggactaatatacctttagattcttccttccatctttttccagcaataatgagaatctattgcatgattttctttagagtattctcaaggcttcccccaaagtcccacccactcctcagatgaccactacacacacctatgcatgtatcagagcctttttgaggagctaacacacagctcaagatttagaaactatgctattttgggccaggcacggtggtggctcatatctgtagtcccagcactttgagaggccgaggagggtggatcacttcaggtcaggaatttgagatcagcctagccagcatggtgaaatcctgtctctactacaaatacaaaaattatctggatgtggtggtgcatgcctgtaatcttaggtacttggaaggctgaggcatgagaatcccttgaacccaggaggcggagtttgcagtgagccaatatcacaacactgcactccagcctgggcaacagagtgagactgtctcaaaaataaataaataaaactatgctattttgtgctacaactcaaatttactaccttaagaaggttcaaagctacttgttccttcagcacaaaaatccatgttcttcccactcctttaccctcagaaaaagagggagcagtgtagaaatagaggatctgtaacaattaggatgctggatggatacagctggaggccagtatcctaagcaaactaacgagaaacaggaaagcaaacaccacatgttctgacttgtaagtgggagctaaacattgggtgcatgtggacataaagatgagaacaatagacactggagaatacaagagcaggagggtgggaaccaagggacagaaaactacctgttgggtactacgctcactaccccaggcgattcatacgtgaaacctcagcatcacacaatgtatcttggaaacaaatctgcacatgtaccctctgaatctaaactaaactttgaggaaaaaaaattgggccattggatcagatatggcttaactactgagtacccaaggttttgttttttactgttctatcctatcactcaaagaaggaagagaactttgaccactcttcctgagagtaattaatgattgatttgctatgcttggaatgtgtaatggagtgaactccagagaatgtacctatccttgtcagtaggcaaaagaaaatgtgcagatcattcaagaaaataatctgattgggtatctcaccaatgaccgtgagtgctgttttgggggtaaagcctgctctgaaattcaaccctaagcagaaattgttttaaaagacaggcaaagatacagccaaagaaaaaccttccttatcaagtgtgtatttgtaaaaattccacatatcttcctttgcagacgtattctttggcaatgactctcattctgtctctgatgttcattagattatatgaccttgggtgaatcaatagcctataaaataactcaaaacgttgttttcaagattacgtaaatccaaagatgtcagacatttagcatcacttctggcgtaccaaagctttttattaaatactagttttattttctcttttctccatatgtggcattttaaatgtattttgtataccacttggaattttatataagctttgggaaaatacacttgaatatttgtgttttacaagtatgtggaagaatccacttccgcggcccacccca

SEQ ID NO: 50478 - DNA, 3593 bp, Homo sapiens
catattcctagagcattagactctactgtagaaaattgcatgaaatttcagaatcaagataaattcacatgatctttggagttccttatgatggaacgtgacccaaaaatctcaactctttagctctaggcttcctccagcagcacatccaattttgatgtactgagtcctttaaaggccatcaaggtgactgtaagttgctgcatttgtcacggaatactttcactgggagagaagcacatattaccatatcacacgtaacaactctacatctcaagctacccttaccacaggcagagtcaatcttagaaaaatctaaagaagctcctatttgaaaatggaaaaacaaaaaaggatcaagcagtgtagcttctacctttccaattattcagctaagtgattctctccatctcctccaagcttcctacattgcagctgtttccaaaactcaaatcttttctcaaaatgaagtggcatcattgtctggggtaagtacccagggttcattgtctggcaccaagaagattaaggacacagacacatgtgggtgggttaaggagtagaaagtttaataggcagaagaaaggagagagaagagcagagagatatgtccaaaagggaaaagccagcctgcggcaaactgcaacagattttataggcaggcttgaggaggcagtgtctgatttatgtagggcccagatttgttcaaccaggtgtgacttttacagagcttgcaggaaaggccggttgccccaccctaatcctattatacaaatgggctttccacttggccagcccatcttgtctgctccttactgtacacgtggctggcaaggagaaagggaagatggagctgccattttgatcatgcctaatcccaggtagcctttttctactggcacaactgccggcattcacccatgcaagcttctagcttacttgtcaatgtctgtggctccactctacaggctgctctttgaaaaagaagaaaatgattttggggctgattttcagtaaaagaaaaaccttgccaaggccttccttaccctcactatctgcctaaataatttctttttaactcctatatcaaaaagacaagaattatcaagattcatcaagaagtgttctgaaaagagttatggagtatgtgccattctgttatgcttgttgatgtttttaaagtgaatcacatcacattatagtctcactttgtgtccatgacagtattattccacgataagtagttctgtatttgaaaagttaacagtacacccttcagacatctacctacttgatggtagattttgtcttacctgcctgggcatgttgtactgaattaaggtcacagttacataaataacattccaaacatttttctccaactgaattaaaaggggcagttatagcttctccctttcctattggttagcaactctgaccagggcccgggagagctctccagtcctagaatagagcagttgctattcacatgatctctgtgaaggcatgactccctcccctctacctctctgcacccctgccccttagtcagcatgactcaacacttgtaaactaggcaatatgactgagaactttctacttgaactttgatttcaggagagtggcatgtcttaaaatgttgaccatttactcattaactggcaagatagaattccccaaactgtgaggtaaagtttgaagctaaaattttaacacaggaagattgtgttaattctcttaggtgtcctgaggtctatgagattttgactctaggtaatgagattatgatacattatgtctttggggtactttttcttctttcccaagactccctagctattggaaagtaatctcttccttattaggcatgtccacttataaaaatcataaaataattgctgatgaagtatctactatttcaccactgtaaagagagccatttgaaacctattaagcaagtgtctcaagcctgtaataagaatattcaaagtatgaggacaggacatgagctgtgctgacagctgaaggtgccagtatatgtactgaagaaggcatttccacccatgactccaagtggcacccatagattactttactctgaaaagtatgagcttctgatttgggtgtgctctttcttcctcaagggattaaagagaggtaaaagaggtaaagtgtctcattctttttttttttttctttgagatagaatctctctctgtcacccaggctggagtgcagtggtgtgatctcggctcactgcaacctctgcctcctggattcaagtgattctccttcctcagcctcctgagtagctgggattactggtgtgtgccaccattcctgcctaattttttatatttttagcaaagaccaggttttgccatgttggccagactggtctcaaatgattcgcctgcctcagcctcccaaagcgttgagattacaggtgtgagccactgcgcccggccaagtgtctccttctgtaatataaaagtgagtaaagtgaacaggaagaggtgggaatgtgcagagggatgaatgaagtgttagaataaaacagaaaagccagtttttttgggggtggataaatgcttagcacccctgtcaaaagtcctggttctaagttcagttagttcctgtcataaaaattaataagaataatccttatattatttgttattatgatctaaattccattcatttaagtgttctgttgccaatagcaatcccaaagaggtgacagaataagtaaccctctgagttaaacctaaaattatttcatcattgtcattctacccagcttttttcaaagccatgtttaatgctgtcgttgacatacttatctaagctttttttggaatgcacttatctcaaagaagttaggtaattcaattgagtacaaaaatatgtttagttttcttgataaagtatctttgactttttgttcttctgagagtcctgtccatttgctgtagtttaattctttccttaaagaggcaattgcttttgagtgagggctaaagtaaatctgtccctagatggctttatgtagttgctacctttagcttatattcaaacaaataggaaaagacaactttttcaaagatagtgctatgtcactaacttccatttactaatatctttaattagtatttaactggtgaagaaatggctagttaaaacaattccaacaggcttgtaatgccatctagtggacagtcttcaaaatatcccacgggccatcttctttctaagtgatcatcaaataagtctttattcttcaggatgtagccaagctactagctaataattattggttgggatcactgaactcactgaaaaatctctaatagtatttctaacattgatgcaatcttggggaaaattaaggtaccacctgtgtgccttgggctcttcatccattcaattgatggagctaagcctttggaataaagtacagctgcccaaagtggtgattcaatgcactcagttcatcctcattgataccatatcatgtatctcttgcctgctatgtgagggatttaagtataattgctcagttctcttgagtaataagtttaagtaataaatga

SEQ ID NO: 50479 - DNA, 992 bp, Homo sapiens
gccactgatgggctttgcatgggatttattgtgaatgaggcagcagtagaagataaatggatcagaagtgaacagacccatttaaaggggaactttatccaggcatgcaggattaagggtttgaatcatgtgattttctattaactgaaaaatagagaaaaaggtcaattttcttcagaaaacaatgagatctgtataaactctacacacccaggacccttgtgtcagtgtctgcttgtgggtggggttgttttgggagggcttccgatggctttcttctgtgtcattgtctctcaagacagggaactgtctactgttgactgacgtcaccatttcatgtcctgccaatattggacacgtgctgaagccttactgacttagtgaattaggtgaaacccaaggcaatagtgggactttgacctgttgaaatgaggtctaacctaaataaatctttttatcctggttctcattccttttgagtctctgtgttctatgcaggtttagaaaatatccaggttcccaggaccttgttttcttttgctatcagaattgacaacctcgctattggttctgtctaaagcatagctgaaagactgaacaattacctatactaaagagtgttgcaacaagcctcacacaaatggcagggctcataattaaaattatatccataaaaaggaatgtttgaatataattatctgttctttgagaagaacaataaggaatcacataaactcacttacatgccgagaacccctgtgtctgggaaacataaaccaagccaagataatactatgcaattgatttagtatttcctttaatattaatttagcacattgataatgcttattttcagaaagtacaactgagttgaattttcagaaaatacaactgagaaaaagcagaagccataaaatgactaacataatattaatttagacattaatgtttattttcagaaaatacaactgagttgaattttcagaaaatac

SEQ ID NO: 50480 - DNA, 2751 bp, Homo sapiens
tctaacctgctaggcattacccatccaactgtgtgacccatggctgggcacatgcacatccacttggtgtcctttgtgggaaaaaacaggacatgtgatagtgggaactctgttgaggagagcaggggcttcaggaagagcgggagatgcggctctggtacaagcccacaaggctctgagtgacaggttcactagtggagagctgagccactggactaacagtggttgaatgagcgggttatcttctggtgcaggtcttcctacatttgtcctctaaagtaaaaagttgctattcccgttctctacataatgtggattagtcctagcccttcaacactctccctagctcactcctttagccaatgggacacattttcaaagcagagggcatcaagtaaggaattttatctgatgtcgtgcaataattaacatcatgatataaccaggctaaccagcctccctctgctaacctaaaatcgcaaggaaagaacatatgagacattcataagcccattcaatggtttcataaacttacctgctgtctcctccaaaaaggaagcacagagtttgaatcctggctctgccacttactagttagttatggctttgggtgagctgaacttctttgatcctcaatctccttgtctaacaaataaaaaaataatgttagtgcctacctcataggatgtcacaacgattaaatgagataatacatgcaaagcaccaataatagttcctgccatttagtaaccactcagcaaatagaagatattatttattgacttggaattttctataaatggcatttctttccagaagactttttctaaatcattaccagtgacctacaggaaggaagagtttgtgggtgactcagtaaatgtctgacattgatgtataacaatattaagcaactcactgctaaatcaagagatgcaaagtggaaaatttatgctgcctaattttaatcacttaaatacaaatggaagtatctgtgcctcttctgatttctagaaaactggaaacccccagtgaccagacacaataaaaggtagaagtgactcatctggaagtctgggaattctctcagtatgagatcttctgggaagacctagatattcccagccttgcctacacaggggctttcctcacccctgacctgtttgtagaaattaaactgcagttttgccttttcagctgctaccattgtatcccttcaaaatttctactcgaggtctgatagcaaccatttaccaaacttgtaagtgacactatgatatcatctccaggtatacccaaacaccatcacaatcatcttgattgcaggaagtaattgattttgactatgtgtacaaataaacattcccctttcaagcaatactatgggtaataatcttttttctcgtttaatattatcactaagttctagttacctggttccgctttggcccaatctgagggcctttatttacatatgaataagtgtaaactatcttgttagagcagtcttgctacatgcctctcagaagacagtaagctgtctactagtaaactacagggcctgcaaattattggaaggttacgttgggtaagaacaatagcagcctgtctcctcctgcaagatttctggtgaattgacatcatctgaattttctcagccaggtatctgtggacaacccatagaacttaaggcattattgtattaattatctgggactgagcctatttgaaataatcttagcattgccacttttgtccgtatttttctgttgatatgagcctcttaggtttcatcttttatctttgcactttatacacgttggagtgtgtggctttagaggaattagttatattgtaaaggagccaccattatagattttgctcattttgatagtacaaagccacgccccttaaatcattttcctatcaggtacctaatttcttgtactaatcactgactcatgaacaatactgccaccctctgggagtcctgggaaatgcctttcaatgtcaaaaattgttagcattggtatgagactggggtacccacaaaaataaatgacaatatttgtttgagttgcaagctggggaagaaaggactatgttgttgagatgtcccaacaattgtgagaagggaattttagttgttttaacaaaagctaaatgaaagcaggcattttatgagagttcttgggggtttccacgagagtgggatcaatgcaccctctccaaatacttgagaagcgactcacagatgaaatgtcagccggccacagtttattcattgtgtgctaccctcgcctgagatacatgcttcactgcggaagtcccttttgtcaccatgctcattctgagatccctccctccccagttttcttttgtggttgaatgtcatcagtgttctgatggccccatgttggtgtgtgatgaaaagacattttgaacccactcagttgggttgcaaattaatattgcagttcagagaagcctagaagaaaaaccctatcatgattgttcagagaacaatcatgatattcaaaatctggaggaagggctcttctctttgatctctgagaagctcaaggctccaacacccaaagctaatagcgggcactctttctgctcagctttctgctggatgagatgacatccactaagcaaggtggaccagtttctatgttgtgagaggagcaagcacagcagaagtgctagtgacctgtcctggacagcaggtccctagcaattgccctt

SEQ ID NO: 50481 - DNA, 2122 bp, Homo sapiens
agtcagttaaattgctaagaaatatttatggctcccaactctaaccccaggctctttccactctgcagagtctcctccctcttgatttcattagctttaggaaaaatttaatgagttagggcagtagctgtggcagtcaggacacacagcacgtaatgacctctaggtatcctttgtgctccctataactctgcctactttatgctagagatttgattaacaccatcccaatctgcaaagctttaaagtgctgagttatcatcggcctattttttccctgctaatgtttaaaaagaaatcaattgatggcagctcatgtttctgtccttttcgtctcttgccagaggtgaatcccactgtttccgagagagaacaggctgtgtgcctgccctgcagcctctccaactgagggtgaaaagaaaatccacattctcttctcactgccttgtgacaattcaaccacgtgggatggaggttaaacctctctaatatccactcccaaggtgttcttttgtattatttgcctttcaaagtcaacagggacaaaacatcaaaaaggcactaacagacagtgtactacagctgttacgagagtttaaatccaccagttattagctgtgaaatcatgagcaagttaaccactctgactctgtttcccctctgttaaatggagtcaaaaatagtagctactttccaagcacaccataagcattaaatgagctcacatgtgtaaagcactggatcagtaactagcacatagcaaataccatgtacgtgttagcttccatttggggttagaattaaatacataaatttgtggtttacttccagttacattggaggcagattacttgctctctgtttttcgtaggaaaaacggtgatatagcaggttctgaagtcagacagatgaataatatctgagctcagttgcatgaccttggaaacattatttaccttaggtaagcctcaacctcctcatctgccaaacagtggtaataacaccgcctttacagagctgttgtaagaattaggtgagttcagtgttcatagggctcctattgaaaatgcacattgagtgtatggctttggatgcacaaattgtaatgttcatccttgatgggagaagatgattgcacaacaattatgcttcagtagaaccaaaacttctttcttgtttcatgagaacgtttgcttatcagactgcacatttacttttcaaagctagctaggtgcctggcaaagaatgtttatagagcatacctctgtgtgtaaaaccaagggcaacgtgattcagacagctaacacagaagtgagccttgcccaataaatgctttcactatactgccatccctgaatcactcaaaatgaatttgtgtccttgctcatctaattttcctagtaaatatcatcagtcaccttgaagtaggtcattccttgctgataaacagcccttaacaaggctataagcagtcagtgtttactacttgatcattaatccctaaaaatgccctatacccaaattcttaattgcttagacaaatgatttctatgggtgattaaacatcagagggaatctgcagcaactgctaatagcaaggtagttctttgtgacattatggctactctcttccctcaatcccaggaaaaactgagtgagaagttgagagaactgtgacggtcgtgaagagggggtcagaaagtgggggccgtgtcctgccttgtcttcaggagacatggagacaaccaatctgaagaaagggaaaaatgagagagaaaccgatgggaacaaatgcaaaatgaagacagagatagttgggataagttttattgcttgttccagctgttcctggaggacatctgcagtcatgctctgagattctatgagactccctagcatttgaataataagacctctttttttcattaagctagttagaaacctgtcactgaaaaaacagaaattctagaaaatatattttcttcttccctttgatactgccttcatgacggatcatttaaatccaagcacatctcctatttttcctttaaaataatgtatgtttcctccatgtttatgttatagttagagatgagtgcctaggatttatgcaatcttggca

SEQ ID NO: 50482 - DNA, 1118 bp, Homo sapiens
taactactaataggctactgctgactgggagccttaccaataacataaacagccaattcacacatattttgtatgttacatgtattatatcctgtattcttatagaaaagtcagctagaaaaagaaaattaagaaaatcatcaaaaagagaaaatatatttactatttattaagtggaagtgaatcatcataaaggtcttcatcctcatgatcttcatgctgaacaggctgaagaggaggaggaataagaggggttggtcttgctatatgggggtggtagaagcagaagagatggaggaggaggcaggagaggcaggcacaccggtgtaactttttttttaatccacgtataagtggactcgggcagttcaaacgcatgttgttcaaaggtcaactgtcgtgttgaatactgaaagactatttcttcaatttctgtgttattcacaatgtagttacagacacgacacaattttaaatttaacccacattattaacgtttctctatcattttttaaagtctagatagtcaacaaaatgataaatcctgccctgctttgtagcattttttaacttcctagttacaaatactcccatcatgactggcttcaagctacgagtgtgaaatcactgaaagtggagttgggcaggggcaccccaccctaaggcatttccaccatatatatgaaacagagagaaataacctccagaggataggtactggaaaattataatacatcactgggaagtggtgaattttgagtatttttaacctttgtttttaatattatttatttgattgtaagtttatgtaatttaattttttaatagtggctgtttttaacaaccagctcgcacatcttttaaaagtttaacaactgggtctcataagctagtaggagccagttccaggaaaccactgggtctgttggattgaggggaggtttggagataacataaaaaggtattcagaaagcctgggaggacatgctggggatttcaccctgaaaaaggtttatgccagctcttggccaggtcagcaaaaaatggcagatgaagtcatggaattgcagtggaatatagagcacaattcctgatatggagaactgttcctgatagtg

SEQ ID NO: 50483 - DNA, 2458 bp, Homo sapiens
aaaccaccttatgaggaagaagaggtgttcctggctgtcactacgtgagattttggagttagaaacaaaatgtgcaccactcagccggagaatgaaggggccacttttctgttacacaaataccttaaacggggctttatttccccgtgcaatgatgcatttcttcacattgcacaggcactttctgacaaatcagataaatgaatatgtccacaggctagtgaaaattaagaaagtgtggagaagttatttaacaatgtatcaagccaagtatcccatttttatttttgattctttttttttaaatgaacccacataagtgtattttcacttataatgagaaagacaaaaagttgacttcatccgtgaatatctaacagatggaaccagagacatctaggggagaggaaatagagacaaatatggttgtcatggtttctttgagaggcagtaaacaaagggacacgaatggacaatgaaagcccccattgggaaaagccacatgtctctcttttctttgttagataattgccaagctcactttgaatgtcgggacttggcaggacatgagagaatagagatactgtcattcacccatggctatcctcatatcagattaccctgggaccaccctatcctcctctacaacagacatcaaacaattaatgaccacctcagattaatcaattatcccagtgggcagtgccctgaggacatatgggacacatgtaaacatgagagaagctgtgcacagcctgagaccaagttttctgtttaattgggaagcagcatgcccataagaggagagcaacatttcgaaagctttgtaaatcctgttgaacacattcaggtttgtagtccccagtgtcactttccagccatctccaaattgatctaaactcaactccaccatattctggttaatacatgaatggtgcaatacttgataaatcttcattgttgaatgtttccctgtaatttgcttgcaggggtgttagacaaagagggaatggaagcagacagggatcccttcccaacatcttttatgagagtaaaattaaagcccagtgcaatgaagactgtgcctacatgatgtcaaacaggcaaatgttggaaacagtcagtttggctgaactcacgcatgttttgtctggagattctgatcaagttgacacagactaaaagtcttttccaaggtcatcctagaggctgccagcactgagatcactgcagaaaccccggagttctacagccatccccctccttgctattgccaaaacagattctttctcgtctgcacaagattagaagttgttttctccttgtttttcgtgcccttcatgaatgaccccttaagtttgctaaaggattgtgcaacttcaacagagcccctgtgaggacatggggaatgtggttgtgttgagcaatcactagttttggggtgcttggcggtgagatctggcacctgagccagctgcagtcagagggagaaagtgtggcttcaccttggctcggtgacatgccctcagaagccaagaaatcactgagcaatttttaggttgttagaatttatctctctcctgattctgtcccaaaagcccaaagcttgcaacatcttatttcctgtttggggatttcctgaaatcaaaactaagactttggcctcggtaaagaaaccaatagaaagcctctttttctggaattatgctgtgtgcatcagctccactgtacaattctgcttcaccaacttaacactatttttatatctcctcagaaagtgcattttttactctctttcttcattatccatacagctctgttacttgttattgtcatccccctcacctcccgccgactttttgaaaatttgaaagcctcttattatagtaaaatttgtttggtgtgttgttggtgtttcaaaagataggcagaatatgaattttggagaaccacatcatatttgtcagggttcttcagagaaacagaaccgataggagattacatatagataagaagatttattatgggaattggctcattcagttatgaaggtcaagaagtcctaccatctgttccacaatctggagaacgaggagggttggtggtgtaattccctgtaagtccaaaggcccaagaaccagaggagctgatgatgtaagccccggtttgagtctgagggcagtaggaggataattcccaatctgagactgaaggcccaagaacctggaataacaatgcatgaaggcagaagatggatgttccagctcaagaatagagagataattcgctcttcttggcctttttgttctatctaacccctctggattaaataatgcctgttttcattggcgatcttttttactcagtctactgagtcaaatgctgatctattctggaaacactctcacagacacacccagaaataatattttaccagcaacctgagcatcccttagcc

SEQ ID NO: 50484 - DNA, 510 bp, Homo sapiens
aaaggaattcaaggttgcagtgagctatgatcacaccaacgcactccagagagactctgtctcttaaaaaaaaaaaaaaaagtttctaccctggtgtctaatgttctttatggtacttcctagaggaggacaggtaaccaatctgtctcaatttgcctgggacctgtcaagtttaccactgaaaaatctcatatcaaggaaattccctgaatcctaggcaactcaggacagttagtcatttcctgggcacactcctatcaaagaagaaaaatgttcaggaccttcaattgcctcagcatgggcacaagaagcatgcaatgatgctcagcctggtcttattccatgtcatataagtgtgcaacaaaggctggaaatctcttgattttagtctcctgattggaaaatagaggaacctcagaaacatgctgtgaaaaagatgccagacaaaaaagagaacatagtgtgcaattcaatttatatgacttctctaaactggcaaaactaacctgc

SEQ ID NO: 50485 - DNA, 2499 bp, Homo sapiens
agagacggggtttcaccatattggccaggctggtctagaactcctgatctcgtgatccgcccgcctcggtctctcaaagttctgggattacaggcatgagccaccgcgcccggccggcctacattccaaagtttaaagcatttaaatatgggttggaaatatctgcctactgaacaacatttgtacatatataaataacattgtttttccaaactatattctttttacttcctgaatttaaccatagtttgaaatttttcaaaaatattgtttgtaagataaaacttgaaaacttacttttttttcttattgtagaagacaagcaataacaacacagtaaaagttgagatcgtgtttttaattcactgttacacactgccatctagcaggaagcgagcaagagttattacagcaatttcgaaattggaagacctgaatgatcacctgaggctacccaatcgcctctggcttctccttactcagaagaaagttttaaaacggagactacggtgctgctagattggaggcagtgaaacttcagcgttcaaagagctgagctgcttattcaatgcgagaaaggcctccatttgagactacggtagaccagggagaaaccctgccctagttgtagtgtgacgttactaacaagcccaagattggtcgtgagtttcctgggtgtctcattggaaagaaaggtgtacgaagggaataaagtcctgaaagccaacttgccttattcaaaactgtggccagccagagctggatgcattccacaaactaaattaacaatccaagtcatttcatgcacaaaacactctaaccaactattattgcagggagctgcagcagggagcagggggcaggctgttggggccgtggtgttagaaaaagtcattctgtgtgacatttgctttattttaaagaatcattaaaagattcccagaaaatgtcataaaatcacagaaaaattacttctatagtttacaaaaaatgagctctgttctgagggtactaatcgggtgcaaaatacctaacacatggcttgcaaatgggataacccaggcctgcggttgccggtgctttcctggggcattttctccattaaatacgccgtattctctgcaactagaaagtcacagttgctacgacttcaacacaacattcctgcaacaagtgattctctgggaagacctgggggagaacaaggcaattcgcgccccgcaaaggcagattaggttctggaatggacggccgcggacctggggaggaggccgatcggggcaggcggggaggcgccgggaccccgcgctccttctccgggctccagcagaggctccggcccggcacccgcctcccgcctggtggatcaggcttcaatctcaggcagtggctctgcctttgcgccactaagtctccaaaacagacttggattattttgcacacaccattccgtctcttacacgcaccccctgctcggtacagagagggagtttccttaggctgtgactcccggaggtagtgtcccagcttccgtgggaccagaaaagcgtctttccgtgtctcagcatcaagcccctacccccaccaagagaccacagaggccagatgtgatgcggcgctcgcactcacctcgcgcggagcagggttcgtcccgcagaatgcagcgcagcttcctttctccctatgagcccaagcctgggcgccgggaagacccgaagagccgatcaggagcggaagaggcggccgcgcgggcgagctcggggcgcgttccggcggagccagcctggatccgggttttcactcgtgccctgttcacaagctcttgggacccgggttctaagaacaccgggccgccccctgctgatgatcttggttcgcagtccgcctgaggccacggccctatggaaagttctcgggaaggctgcgggggccctcttctttaagacaggggaaactctccgcttctccaactggactaggactggagcgcatgcagtcacctattcaggccaggcgtggcagcggctcacacctgtaatcccagcactttgggaggccaaggcgggcagatcgcttgagcccaggagttcgataccagcctgagcaacatagcgggaccctgtctctacaaaaaatgcaaaaattagcagagtgtggtggcccatgcctgtagtcccacctactgggaggctgaggtgggaggatctcttgagtccaggaggtaaaggctgcagttaaccgagatcaagccactgcactccagcctgggcaacagagcaagactgtctacaaaaataaataaaataaatttaaaaaaaaaggtcaaagtcatttattcaagaaaagattgtactggttgctatggtgtgaatgtttgtaccctgccccaaattcatatgtgaatttcgtgcctttatagtctatataaatttacaaatgtactgtgtctttatgaaagagaccagagcaagcttctgccatgtgaggacacatagaggg

SEQ ID NO: 50486 - DNA, 2166 bp, Homo sapiens
aatgcctcttgacagtctttctttccttttcttttttctttttctttttttttttttgagaggtagttttggttgtcacccaggctggagggccacagcatgatctcggctcactgcaacctccgcctcccgggttcaagcgattctcctgcctcagcctcccaagtagctgggattacaggcacctgctaccacgcccgactaatttttgtatttttagtagagacgggatttcactatgttggccaggctggtctggaactcgcccgcctaggccgcccaaagtgctgaggtacaggcgagagccaccgcgcccggcccggccgacagtctttcttctataatacgatacaaactagtaaagattttctttttcccctggcggaaaagagctgttaggcttccagatttgtttttgtgggttattagacctctacttttcttcttggtattttccctcccttatcaactttgtttgttgtctcaaataggcaatgaggaagacacaggtgtttattattattggaatgctctttccatttggtcagtggtttctcaaagcaggaggaattcaagttctgagtttctaaagtcaggacccggtgccgcacccaacgtgggcgtggggagtggctaagtcagggtctgaggggcagggccggggcctggctgcgagctggggccgggggactcggaggagcggggacccagccccgccgcgccgcctgcagctttccccagcctcctcccagcagaggggaggcccgacagggaggggtcccatcctcatgaacggtcacaaacagggcgctagggaagcacgcccgacccccgcggtccccgcgctccaggattcggcagactgcgcgcgtcctgcctcccgcggatcgcactgggtcccaacagggttcccagctccaggctgcgcccatgaacaagcccagcattgcggacgggcgcgcgcagacgccagcgtggtgaagacgcgggggcgcgcgcgcggcgacgagactgccaggggacgcttcgcaacaccgagagtctcagcgtttctcgagataggtgaggctgcgcgttccggaactggtttcccggaaggagcatgtctgcgcccgcgatccgaccggaagttgcacgctgagccgcggacaccatgcagtcggatgatgtgagtctcctccggttgttcttacacccggggtttgcgcagggaattttgcccattttcggacacttagaaaacgcgtacgcagcgggtctgttgcctcgtgccgctctggatgtgaggcttccggaaccccgattttccaacataggttctcacgcgtgtctagcaggggtttactgcccgctgccccggccgggttgtgagcacaggactccgtcacctcagcccatggggtcgatgtgtcccgtccttcgtgcctaccaatgcaggacgtcgcgtcatgctgtcagctgtcagctgtcagctccggacttggggtggggggcggcccgggatttggcgaagctgactccaagtttaagcgtccttctcatccatgtgcgcgttactcttccatctgcgtttcctgtgtaggcttttctttacatttgctctacttctgcctaagtcataatttcggaagtatcctagattcattcattgagttttttgttggagaaataacagtgtgcttacagtgtgccaggcattgtggtaattattgaggatttggttaaccagaaaaaatgtcccacctctcctggaacactgatgggggagacacagtaaacaagtgaacaaataagttaacaattacactatataatcatactatgaaagaaagaccagagatgatgaaggacacttcagatagggttactcagggaaggtttctctgaacagaagatgtttgagttgagatctaaaagataagaataagccagtcactgaggagctgaggaaaaagcaatccaggcagtaggaacagtaaagtacaaagagttgaagatatgagagaatgaatataagggtcatcaaagtgacaatgtaagacaggtaatgaaattagatatgcttgccagggcgaggtcatgcagaatcttgtaggaagtgttttttaggccttttaatgatctatgtttgtgaaaagttgtctagttgctgtgtgaaggactttt

SEQ ID NO: 50487 - DNA, 3098 bp, Homo sapiens
gaaactctgtctcgaaaataaataaataataaaaaataaaaataaaaaactgtgaggctcaagtcggtggcaaagggcaggagtactcacttatacaagtcgggtttgagaagccctagtatcaccgaaagtctccctttctcatcttcattttctccatgtaggaatcctgccacagaaccgcattcagtaacttgaagcagtgaggtgagcacctccctagcaacttcccgagatctcggagtggtccatggttgctccaagctgtgtgtgatggcaaaaatataaacgggtcctgccaagtgatgcaggcccgtctgccatgcagggccgaccagggaattcttagcagtctcaactttccctaacagtttaagaaacagtaacccaacttgggctgctttctcggccgcttcggagtgcccatcacctccaccttcctcctccttggagggggctgcatacttctccagggcttttgctacctgccccagtgtctccggcattccgcggagccgtgcaccagtcccctcaaataacctatcaaattctgtggcttctattagatcaccgaggtctttaagaactgcatcttttacattgcctcgtcgtgcctccgggcgggcaagacagtgtaaaatcttggagaaggcctgtccaaaggcggagtgagacaactcctcggacaaattagagtcttcctgcgatggggcttccagagcgctgtcaagctccattcctgactgcagcaccagaaggctggtctctcccacagaacgaggatggaggcggggagggatccgttgaagagggaaggagcgatcacccaaagagaactaaaatcaaataaaataaaacagagagatgtcttggaggagggggcgagtctgaccgggataagaataaagagaaagggtgaacccgggaggcggagtttgcagtgagccgagatcgcgccactgcactccagcctgggcgacagagtgagactccgtctcagtaaaaaaaaaaaaaaaaaaaagaataaagaggaaaggacgcaagaaagggaaaggggactctcagggagtaaaagagtcttacacttttaacagtgacgttaaaagactactgttgcctttctgaagactaaaaagaaaaaaaacttaaaaatttaaagaaataaacttctgagccatgtcaccaacttaaccacccccaggtacctgcaacggctcgcgcccgccggtgtctaacaggatccggacctagctcatattgctgccgcaaaacgcaaggctagcttccgccagtactgccgcaacaccttcttatttcacgacgtatggtcgtaaagcaataaagatccaggctcgggaaaatgacggagaggtggaactatagagaataaatttgcatatataataatccgctcgctaattgtgtttctgttttcctttgctaaggtagaaacaaaagaataatcacagaatctcagtgggactttgaaaatatccaggattttatacgtgaagaatggatgtatcgcattacggtagtcaccctatgtgtaaattagtggcacatacttggcactccttaatgtcaactataagatgatccttttgtagttcatgagcgtgatgattgggtgttcatacgcttgtgtgagatgtgccacccttgaaccttgttacgacgtgggcacattacccgtctgacctgaacttcaaggatcgatttaacacttgtatttgtgggcttgttacttatgataacaggtggcctagtttcatggctttgtgtttaccgttttcgggtgcccttttttctggctgtatgctacacgcacgggtgcttttccgttgtccaactgtgtaatgtgtttttgtgtttgttcttttgtgagtcggagtctcgcgttgtcgccaggctggagttgcagtgttgcgatctcggctcactgcaacccccacctccggttttcgagagattgtcctacctcagcctcccgagtagctgggactataggcgcgcgccaccacgcccagctaatttttgtataaatattggcaaggatggtctcgatctcttgacctcgtgatgcgcccgcctcggcctcccaaagggctgggattacaggcgtgagccaccgcgcctggccaatgcagagctttttaatggctttaattttttaggtttgggagatacctgcgcaggtttgttacctggatatgttgtgggatgctgggatttggagtgcagcttagcccgttttcattgccccctctagtagaccacagtgtctgttgttgccacttttatgtccacgtgttcctaatgtttagctcccacttatgaatgagagcatgcggtatttggttttctgttcaatgcaatactttagctggtttctggagctagcgttttaaagcctgtagccacaagcgtttgaaaattcaaattctagcgtcaaggtagaagcccccagctggcgtctggggcagccctgagggaggtgggtcgtcgggttggcggatccggcttgggcccgccccgccagtgtcggcgccgggtgcgcagggacagcagagcgctgtcttgggcatgggtcgcaggcggcgcccggaacgggccaggggagctggaggctgcagactcgggctcggcgggtgtaggaaccagtggtgtttgcttgggttttgagaaggcgcgagaagggtcgcgcctgtgcgaccgccctgtgttgggtcccccacgccgcgtcggcattgcttgttccctcttcctgcgctttcctggagggtagaattgcgtccgattggccttcagttcccgaggagctgcttccatttaggaccttgtgactctcatagcttccacggtttcgcaggagcccgaggaggcaaacttcatttgtgccactgcacaggcgggagcttcggaccctgggaggggtggcgcgagagagacgtgtcgccagctgctcggagagggactcttattcagcctctaaggcgtcaattgcgcctccagggttccaggagtccagagaaagcccttcggggtcttctgacctggggtagggtgaggggcgtgtgtgcgcgcaggggcgaggg

SEQ ID NO: 50488 - DNA, 1253 bp, Homo sapiens
gcccgcctcggcctcccaaagtgctgggattacaggcgtgagccaccgcgcctggccgaaagcgactctttaatccagtcttccgcaagcacccaagccacgccagcagcccgtgggaaaccaacaaagccagaggaagctacccccgcgcccagtcccgcacgctgcacggtatacatatttacaatagcctgcaaagtttcaggccgggaacttgagctccctctaggagatcccagcccgagtgcggatttaattctcctccaacaaccacaacaaagaacagagtttgagcgcacaaaggcaggggaagggggtagaagagccgggccgccacacaaaggccgggaacccctcggctcccacgcccccggcccgccgccagtccggaggccccttccaggctctggagtgaaacctggatagtttcaaattccgcgctgtgcagagcagagtggggcgccaagacgccttctcgactgtcccatttcaggagaaacttggttcccgagggaggaccagcgcgctgctgtccgacctcgcaccccgcgccgcggctcccaccagccccacgtaggctcggccctcgccccggggactcaccgttacaccactggaatgggtgcatcaatgaagtcgcggttggcttcctcgggcgaacggacgcaggcggggtgccaggagggcggggtgggagcactagcggcgtgaggggccgcaggcggggtcggggcagcgcgctgcagccgccctgctggagaagccgaactccctccggagtggggggctttgacgaggctggtgttcagcccaacaaagagggacgaggaggaaacaaacaaagtcccgcggagcacagccgcacggagcgcacgcgccaagggccccgggctgggggaatgtggggcgccgcggggcgggggtgcccgggctgcagaagccctcggccgggggaggagggaaaaacctttgccggaggctcggatcgggttcagcggcgcagaggtgagctggctggggttccgaaactgacacccggcggtgcacaccccctcccttttacttcccccaccagtccccaggaaaactccgccccttgttcgtcaccctccctccgaccaatcggagcctttctcctgcccccggctattatttgcaggcccagcctcccttccctggaagccgggaggatcttcgcacggtgggcgcctcccacttagtcttcccaggcctggggaaacttcggtctgcag

SEQ ID NO: 50489 - DNA, 612 bp, Homo sapiens
cacatttgttaattttgatttatagctaatgtttggttctccactcatgactttcacttaacacacttaatgagcatcagttctcacagtgccccatatgtggtctgagaatgttatttacagcctcttgatgagggaaatgtcacaacaagagcttagatctcagcaggcagcaggataagctggacttgggatgagctgggttccgggaacttaatatatgcaatcccgatgagtcatatgctcagatatgaaccttgctcttagcaatatgtacctacccagccagttaggattaatacattataatgacaacaattcaaaaatccaaatgtcacaagcaatcaaagtactatgtgatggtctcatagactgagaaatcaaaagggcgtttaaatttaacaagtaggtcataggtgattaagacaggcatattttcaatagattgcagaggaagaagcctgatttcagtaggttgattttaaaatgaaagtgaaaaattgtgggcagatgttgtaactcctcttgcagtcattgtagtgataaaggaaataagagataagactatagattgattgtgagataaggaaacaatggggaagcagattttaa

SEQ ID NO: 50490 - DNA, 2101 bp, Homo sapiens
catgtatttgagtaaaaaggttaccattttttttttctgtttatgggctcgtgatattttttttcttagtgaactgtctgctcatattctttttcaaggcagagttaaaggtctagataaccacaggtggccaagagatttattttactttattttatttatttatttatgtatttatgtatttatttatttatagtgacagagtcttgctcactctatcacccaggcttgagtgcagtggcaggatcataactcaataaagcctccaactcctggagtcaagtgatcctcctgcctcagcctcccagagtgttagacacaggagagtatttcagatgctgaattttgggattcaaagtgctcaacctgtaagtgtgattaaatgcaaccaccaaccttaatcagtggcagcagccacacagctgaatgaacatagaaggaagcacacatccatgtcaactggtttcacttcaaattcacagactctttgttctgcccagccattccactatatttctaatccaacaattcacccctttcctaggaccaattataacttccctctttctataagcatttaaaacatactcatcagttcagctcattaagaggtggagcatatttccccacattttgactttggatttgccactgtgacttgctttgccaatagaatggaacaaaagtgacaatatcagttccaagtttaggtctcaagtgaggctgggcatggtgggtcatgtctcagcactttgggagaccaaggtgggaggatcgcttcagcccaggagtttaagaccagcttgggcaacatggtaaaatcccatctctacaaaaatacaaaaaaaattagccaggcatagtggtgtgcacctgtggtcccagttactcaagaggctgaggtgggaggattgcttaagcttaagaggtagaggtttctgtgagccgtgattgcacaactgtactccagcctgcgtgacagagtgagactgtctcgaaaataaaaaatgaaacagaaaggtcccaagtggctttaagttccttcactggccttcatgtgttttagccattccacaagcctgggcctcagaataggagacatgtggattagacctgagcctaatccctggagacaagctgacccagctgctgggcttgaaaaagagctgcacagcttctctaacccagcttagatgtgctgacccctattgcacctgcagggttacacaatggtcacggctatgcgtcactaaaatggactggtatttgctgtcagccttgttgcatccatagcttcctgctgccttatgattaagctgtgttacctaaggtcagcccctctattgtacacattagattccaattcaaaaccacttaatcttcctaacaactgttgcccctctctctattgaaatatcaagttttccttctcttctgaatcaattctatcataaaaaaataatgaaatatctaacttcttttaaaatccttcctgactcaatacttctagtaacaaaccaatttatctctttctttttaaagcaaatttctacattttctcctattctcttccaaatttctcttgaaccaactctaattaggcttttatttctaccattccaccaaaacagccttgccaaggctaacaaaaacctccatgacgtgaaaaaaataaaggtcaattttcaatcatcagcttatgtaaatgactaggagcttttgggacagccgttcactctttgttctttgaaaccatttattgacttggctctcaggacatgaacagtaggagaataggccaccccaaaatatgccactttggactataggttattttgagctgaagataattattaagcagaagacaaaaaactctttacccaccctatctttaccaggaatgatgggaagatgtttttttcttttcttttttagagagagtttcgctcttgttgcctaggctggagtgcaatggcgcgatcttggctcgttgcaacttctgcctcccgggttcctgggttcaagtgagtctcctgcctcagcctccagagaagctgggattacaggcattcaccaccacacccggctaattttgtatttt

SEQ ID NO: 50491 - DNA, 2515 bp, Homo sapiens
tactaaaaatacaaaattagccaggtgtggtggcaggcacctgtaatcccagctactcgggaggctgaggcaggagaatcgcttaaacccgggaggcagaggttgcagtgagctgagatcatgccactgcactccagcctgggtgacagagagagactccatctcaaaaacaaaaacaaaaacaaaaacaaaaacaaaaaaagagacagagaaacatgcaaaaataataataaataattaaaggaggaatcttcagaagtagattgcaaaccaatctcttttaaatacattaatgcagcttctgtctttaaggcagtcctgtcttaaatcccttaaagagcaaggatagccttgtgtctgttttgtatgtgggattctgcccattgaattccctgaagcaaggaaataataaataaataccaattatgaacccactatgaagattttaaataatccaagctattcctttcccttctagctttctttctttcatccttttgcccttgttctctataccttctccataaaaggagattaagtctgatcccttggggccatgattttttctgaagacaaaagaaaaagacagcagcatccagcctctttcccaccctgtttcccacctcctttctgttcatatcccatgagggacctaattgtctaacatgggtcagatatgaatatactaaaggaagatttatgggaggttgcctctttccacttaaaattcttcagctacacacatcttctggcagagtcttgcgaaatagaaaagcttcaattgatttaattagaatccctctcttttcttcctgtaaaaaagagaaaaaacgtcactgaattcaagtgacattttgctaatagtgatcatgtcattcagtgaatacttaaacgtttgtaggctgctgaaagtttttttttagttttaaacactgattcactgagtagtatgtttacacattttatatacattaaaagttttaatacattttgaagcatccaaataatataaaggaaaattaacatttacagtaataacaagggttcacatttatttaaagaatactacacatcagacacttctgagtttacctaactcatttaatactgcacactacaatcctgtaagatgagtcatcttatccccatttaacacaggaagaagctgagacaggttgacttactcacacaaggatccatgagctggaagtggcaaaatcaacatttgaactctggcaagctgtctctgaaatctgtgttcttaatgaaatgaggaaaggaagaaatgaagacatctttgaaagagaaaagaagaaatgtatgcagcaggtggggcagtcgttgaaagattaagagatacacaaatgcccactggagaagagatggcaggagataaacatcatctgggacacaggtgtgtccctcaaatctcttccagagatggagaagggagtaaagtgggtagtttcctgtggtgaagatgagcttaggaagacaacagctgattcagattgagagtcgatccacagacagcctagcagagcaatccaagagtaaatccaaggctatggatttagaagattctagagagaaaaagaatgtgatgccagaggatgttcaaaatgcaccaataagtgagagaaagggccttttccacagggtaccttaacaggagaggttggggaaaggtgttgttaagtggaaaagcccatttcagctgtgttcacaactgaccatggtaaagatgcagccttaactagtcccagagcactcacaataggaagcttcactaccatctattctcgacagcagccagagtcatctttgtaaaatgtaaatcaggacatgtatatctctgttccaactcctgaaggaacaaaactcaaactttctccagagcccacatgcccttccactctggccctcattcactgtgctccaaccacactggcctccctggtgctctgccagtctactaagtgaaaccatctgcctcagggccttctcaccttctcaccttgaattccacttgcctggaattcaatttcctgaaatatcagcaacactcactctctttcttctttatggtctttgttccagtagccccttatattgaggcctctttcacaaggcactttctgcctgtactgcctgctctatggtgttccgaacccatatcaccacctggaatattatctttttatgtaacttcaacttttattttagattcagggggtatatgtgcaggtttgttacatgggtatatcacttgatattgaggcttggggtatgattgatcctgtcaccacaaggcagtgagcatagtacccaatagttttcaactctggaccctcctctctcgctcctccttctggtagttcccagtgtctattgttcccatctttatgcggaagaatacccgatgtttagctcccactaataagtgaaaacaagcagtatttggttttttggtttctgcactaatttgcttaggataatggcctccagttgcatc

SEQ ID NO: 50492 - DNA, 1989 bp, Homo sapiens
acaaatcttgaaagaagcatcaatgtaaagccgaaattacctttttcagttccaaggtccctttgaaatttctctatattttataagaatttgaaccagctgagaaaatggccctatctcctataagcttccaaccctaccaaataaaacttgcatgcactttgattaagtggttgatgccaggactagactgacacataagcagataattgctttcaagatgtgacttaatatcacagaagggtaaagctggaagtaatttcccatcacccatttggcacacattcagagagcatgccagttgtgtgcagatgtgatgctgggctctgggacctgatagcacaagcccaatagttccactgcatacaagggaggacagaggtccaaatgggtaagttgattctccccagtcaccaagctagtgattgacagaggaaagactagaagctgggtctgaaagctttctcattcattctacttttctcagtgagaagtgcctggcgaagttctctaaaaggaaatgcctactctttccagagagccctcgggactgaaattcagccattcactccttgagttaagctcttctctctcaaattctcctatgagaagtaagaaactaaaattaaaacttgtaattccttcgaataaattaattcttaagtgtggaaaaatagtgcaacatagagatactgagcatacaatgagaaatagataattaaaagtcagaataaagtgcaggaaggaaagaaaatctagacgaagcactgaggcacagatgccaactgtttcatggctttgcctcaggtcaacccgacctttttcaaaatatagtaattagcttgctagagtctgagcccctggtttctctgtgggaagatttctctatggtttattaaacttcattctcctgtctatgagtaggtggatttagtgagaaataacctatgacataaagtttgctgatgattaacagagttacttcaggagtgtagactctggaacccaaagaacaaaatgttacaagtattgattgcaatgttttcccttgttttgtgtcagaaacatccacaggaagaaacgacatttaagaaagtcatctttttaaaataaccaagaccagaagaaattatagcaaaagcacaagctttctgataagagacagctaaaaagtggattagacttgtgcctggatttttttttttttttttttttttttttacctattaattgattaggaaaaataggtagaccctgagtgaaagtagaaaagaaccattctggtaaaaattctgaaagtagaaaagaacctttagctttaaaggtatgtcttaatagagcagtgctaagacaggtggttaggtatgtgaatgcatgccacttagaaaagaatatgaaggagaagggaccaagaaggcagatacattgcccctgataaagaagtcatttttctctcacctttacataaatatcagccactaaaaatctaggagcacaaataatgaaagcgaaccctgttcgctctgtttgtggaaggtctcatgagtactgcagtgtgccctggttgctgcctatggccttctgcttgaagcattcagcattggaatgtagtgtcagaaaaggcaacttctgtgcaagaactatgacaaattaatcctctgtgggccttatctgccacattcacttggagtccccatttcagtgctggacaaaagcctcctcagagtccagatatatttggaagctcagttttgaaggggacaacaagaaaggtggattgaatactgtcttagtctattttctgtttctacaactgaatatctaagacagggtaatgtataaggaaaagaaatttatttatcacagttctggagtctgggaagtccaaggtagtggtgggagcatcttgtaaggaacttcttgccggtggggacaatctgcagagtcccagagtggcacagggcatcacataatgaagaggctgagtgt

SEQ ID NO: 50493 - DNA, 1134 bp, Homo sapiens
ccctaattaactgtcaatcaaaagactcatattttagcctaagttctattattgactagctttcttctctttattctttatcgcttcgcttattttcttctattattattattatttttttttttttaggtataagtcacacaagaaggcagagagcttgaatctccctgtgtctcttggtagtagggttggcagtagggtgggtggtaaggtaaacttaagctgggactgtgtgctagtaatattgcattagactcatttcttttctcaagtagaatcacggggtgaacctttgaatttgaattcaggatactcacatttccactggcaattttaatcaaaatgttattttattaaaattgcaaacagctatggagttttccttgtagcctgttttttttttcatgcatttctcaaattctgtccctatggaattgtctataaaacattaacagactttgctgctgacaaaatatttgaacttgataaaatcagtccctgtttgtgggtcataagtcatttgtatgtgaaatgaggatatcatgctacacttattcctcaagtcatgaaagaagatatgagtttgctatgaaattcatctttcctagtctctccttttcccacaaaacttcaaagtgtcaggatttccccaacctctatgggttcagaagtctatttagttctgaaatgtgtggcagatgaaatcgagattgcaatttataccaaataaaagttactcattctcacaaagtccactgtaagcctgaatgaatctcagcgtaccctcttccacgtgaaacttcagcattacaggctgctctgatctcatggtgtgtccacatcagcagactctgtcaagatctttaggtggaccagagtcaagcactgaaaataaaatgcttcacacacacacacaaaatgacatgcagtactactgctcatgttatgtaggctaaacaagtcctatagccctgcagaatttcaggggatgagataagtggaacccttctatgtccactgatgcaaaaacttgttaataataaatagatgaaatactgcagatggaaacgtggcatataaattccattttttcccactttaagtggaaaatcgttactggctattaatagccag

SEQ ID NO: 50494 - DNA, 1404 bp, Homo sapiens
agtgtcacacatttctattttcatcctaaggaaaagttatttggagtggctactccgtatattagtatttttgaaatagaagaagccttttcttctaatgcatcctctgaaccattaaggaaacccaggctaggagatgagaactggctttcccagggtcatacaactaactgcatgtgagatgggattctcagttttaaggctcccaggacagggctcaggctagacagtgacagaatcccaggccatactatccaaccccccaggtcactaaggcataactaagatttgctagataatttttactgagctcaaagcctaagtaattttagtctggttactctacttacgaggaaaaaatcctcagtctttggaacctaaccatggctgctgatcttgtaatgagtcacagcattcctgatgaatgcctcatgaaattgagatgatattgcatgacggttagttctttgtgtcaatatggctggtactcagggcccagctatttggtctgacattattctaggtgtttctgtgaaggtgtggttttgggtgagattaacatttaaatcagtggactctgagtacagattacccctcataatatgaaaggacctcatccaatcagttggaacaaaaactcacctcctttgagcaagcaggaattctgccagctgacttcctctggactcagagtgaagctcttccctggatccccagcctgcctatcttccttgcgattttagacatatctagcccttcacaagtacatgagccaattccttaaaatcaatctctctgtctctctctctctctgtacacacacacacacacacacacacacaccccacagactgttagttttagttctctggagaatcctgctcatacagattttagtactaacaagtgcaatgctgctataacaaatacctaaaaatgcggagtggctttggaactgagtgagggatataggtagaaagagttttaagacatgctagataaaacctgcattgccttgaagagactgttgctagaaacgtggacataaaaggagcttctgatgacaacttagatggaaatgaggaacatcatagtggacgtgggaggacaggtgatccttgttgttaaacggcaaaggacttgattgacttgttttctagtggtttgtggaaggtacaatttatgagtgatataaacttagatatttgtttgaaaagatgtccaagaaaagtatttaaagtgtggtctggtttctccttactgcttacaagtaaaatatgaaaggagagagataaatgaggaattgataagcaaaaatcagaacatgaagatttggaaaattctcagcctatctatattgcaaaaaattgagaaaatgtgtactggagagcataccaaaggtgg

SEQ ID NO: 50495 - DNA, 536 bp, Homo sapiens
caaaatagaaaccacttttgaaaaccactgaagaggttatctgagctattttccagctctgatatttagtgacataggattgttttctgtgattaaaagtccacttgtgtagggtcagtgctcaccgacagattttcccaaaactctccttacctcctgcaggagattgtcatcattgaaggaaaatagcagagccaagcccctcagttgcccggacccatgtaactgacagtggctgactcattcaacaaatatttactgagaactgcagcatgacagcagtgtgccagctgttgacttcgtgagaattgagaatcggctccatggaaactccccacagcccggggcttaacagcactttaggtcaggttgacctggtctccagcctgggctcattgtctgtgcaaccactgaaggttgctcactcattctgagcctcagtctccttgtcggtaagaataatgttgtgaagatccatgacagtcttactgagtagcgtagtgagtgtgaaaacacatagcacatactaaatgctc

SEQ ID NO: 50496 - DNA, 652 bp, Homo sapiens
tctgataatggtccaacaacatttgctcctttcaagaaagattttgttttgagtttcatttagtctcacctgccccatccagttatcatctgatgtttctggaatactctcagccacagctttcacattcctgctgagtagtcacttatttctcaatgactctaggagggcggttggtattactacctctgcttggcttatttgggaaatgagagtcgcatgtgtagatgacaaaaatacaacataagcaagaatgatgtcaactcctcatccaatctgataaaaatatcctcgtcaggcagaagggcacttttatttatttaaccctgccatgtgacagataacacgccagatgctttacgtaatttgtgctttctaaatgaacagggtaacgctgtaaaaaaaaaaaaaaaccccaaaatgtatgacagctctagcacaatagaaatgcatttgtcactcatgcttattctaaaacggcatctgtaggagtggggtagctctgctccaggtagtaactaagggccccagcagccttgaaccttgtggctctaccatctccaacatgtggcttccaagcttgttgtgctcttgctgtgtgccaggtctgaaggggaaagaacatggaggtttgtcgaggaaagggctttgt

SEQ ID NO: 50497 - DNA, 1033 bp, Homo sapiens
accttaggcaagtcacttctctctggctctcatttctccaagtggcagatgggggaagtggggcgaagagagttgcaagcttccagctctggaattctatcactgcaagctgctcccgaacagtgtttccctccaatacaaacactgccgtaggttatcagagggctgggaggtgacagagagagaaacatgggagacagagaaacaagggcacagccggatggacagagacagatcgaaataggggaggctacctcgccagggaaagggagaacagcctggtggcgtggagagaaaattggagcccctgatgtaagcagactcttgccagaattgctggaaacaaatagtgacagattgctaacacgttacagtgaaaattaccaacacgatgggacttttgcaccataactggcacctcttgttatcccattaacaaagctgatgagaccaaattgctaataggagaaaacgttcatgttggattatatcactcttgtcctgcataaataacacgaccaaagcacagaccagaggcacacagaaacctcccaagagccaatttattttaggcacaattggggaaagccctggtatgccccagcctcttccatgacatccagaaacaaccgcacccaccaccggcaccatgcaaggtgtctgttcacattgctgagctgggcgagatcgtctgtcagtcattacataaaacaggagccagtgacctttgcgaagtacacaaggtacgctggcagggccagtggcaggaagggagggacaagtggacagtggtgtgtctgaattgtagagtgttagattccaggtcattcccatctgctcctagaacaaacaaacacatcagaactcaccactatttacatttttaccacccccatctggccacttcccactatagccaggccagagagagccccgactcacaattccatcagccgcagagttcaagctgtcatctaagcccagggaggtgtaaggaacaggccacatctggttcttggaagtatatgcccag

SEQ ID NO: 50498 - DNA, 639 bp, Homo sapiens
tgtcagctctctctcctctctccttctcgctgcctgcagccagaaacctcagaccacaaccttcttactgcagcctcccgcctgggacagcgccttgtccccatgccccgtgaggccagcttgctgcagcaagcctcaccatggttagctctcctttgccccttccccttcagctctgccccgccaaggccaggcctactctgggatcattatgaagcaggtgacctccgctcatgactaattgtgcaagtagggcagaggtaacaacaatcccaggaaagggggtggaggcagggagagagagaaaaataagagagagacagacagacagacagaaaaagtactgctttaataagagggtaattgccctgtttaggattacaatctgccagcatttcactaaactttatgacacatgatgacaagttaataagccagatgcctcactatgtgccttaagcagatgctccatgggttacctcccatgcctcctcgtgcagggaggtaacccctgcagccagaaaaacacacagggccagccaaaataaaaaaaaatccccaggaaggtgtgggagaagagagccgaaaaggtggggaaactggttatttctgttgtcaaaatggccccagcaataaatc

SEQ ID NO: 50499 - DNA, 600 bp, Homo sapiens
tggacctggatttgacactccaggctcacctcctaccagcttgggccttgggcaagttacttaacctttctgtgcctgtgaaatggaagtaaccataggacccatctcctaaggtttctgcaaggattaaatgagagaatgcacgcaaagtgcttagaacagcgtttggcactcaacgttggctactgtggtgatggtgaaccgctctgttaggcaataagtacacaaagaggatgaggaaaacaagaagcattcacagtccagtgggagatcagacaaggaagcaaatagtggcagatgccatgtgataggtgtaataatagaacataataccaactgtgagaatgtagaagagggagcctcttgagtcatcggtggggcgggcttcctgcagggctggctgtcctggtcttagcctgcttgctcccactgttccctggtgcccctctcgtgccccaggctgtgtctgaagccgggggatggggcagacagaggaagcgccttcaagtgccctgagtgcagtgtgctaaatcagggctcccggccaaagcagtaattgccagccgctgaaagatattaagcgccagggaggaaaaccaa

SEQ ID NO: 50500 - DNA, 2223 bp, Homo sapiens
agaagtgggctccccagagttcggcacccaaaggaccaacttcgcctccggaaaagcggcggatccggaacttggatgtcaggactatgactacgtaaaatctctgcccagggcgaagctagcaatgcacactgtatcagaaaggcgcagggagtcgggaagggtattgttatttttaattaaaagtttttatcccgaaatttgcctggggaaagcaagtgctttttcccccggagtgagaaggatgggggggcggaggggttgtgttgccgagcagcgcttagagagagatccccctccagggacacccgcctcgcccgtgatctcggtctctcctcgtagcagctgggcgcggtacagtgaggaacttcacgcccctcagcaggacacggtaagaagcctgtaacacaccagacaccgagcctctaacgcagggcgcaggcacagcgcgcacagcctggggtcccgcgcttggtcgccgaccatgtcactccagaagggagacaaacttgcaggcttcagacaagacgggctcaaagtagttggagctgcctacgccgcgtcccgagaacagtgggtgcctccgaggctcgggcgcttccaagtgaacacaccaaggggaggccaagtaggggaaggagagcggggccgaggagagccggagcagctctggagaaggacccgggctcccgaggcgaggcctgcccccaggcggcctctgggagaggcttgaactccagcgtcccagagcccgcgccgtgcgatccctcccaccccaccccaccccaccccaccccacctcggacacacacggcgggcggggttacagcccccgccagcatcaccccccacccacccagtggtgagaagggagagaggagagagagcggccggaaaggaggacggggcgcagagctcagggtcccggagaagtcccgtcccaggcgggggaccccagggcgaggaaggcccagtcggggggaggggaggaatcccgggagcggccgagaccgaggcagcggcggcgcgcggcgcggcccctttaaggctctccccgcccaccgatggagccggcctcagcccgccgctctccccgccccggggtcccggcgagagctgcgattgggcgggcgcggcgatccctttgaagtgtggctgccgatcgcggctatttgacgtgcggctcgaggaaggcgaaggtttttgtgttgctagccggggccagcggcggtggcggcggcggcggaggcgtcggtggaggaggggaggcggcgaggaggcgcagctcccgctgcaccgcgatcgacgctgcggagcgagcccacccgccccgggagctcgcctccccggtgctcccccgccctccccgcccccccagcggcgctgcctcctccaaatgagcgattcgcccgctggatctaacccaaggacacccgaaagcagcggcagcggcagcggcggcggcgggaagaggccggcggtgccggcagcggtgtccctcttgccaccggcggaccccctgcgccaggcgaaccggctcccgatcagggtcctgaagatgctgagcgctcacaccggtcacctcctgcacccggagtacctgcagccgctgtcctccactcccgtcagccccattgaggtcagtccccggccgctgcccccgggcgccggccccattcctcccaccgcgaccgggaccctgacccagctcccagcgccccggggctcggtgcgacacccaagtctggtcacgctggcgggctgagtgaggaggggaagaaaaccgagggatcagagcccaccagggcttccccaggcttccccgtggaagggtctccttccacgctcgcccttcggagctccgtgttttctctcggattggatttgctcctggagtcccctctgggtcctttacttttcctctgatccccagtttccagccaggagttggtctctgctgggtcttccccgccccccacgccgggctgttttctttgaagccctggctgcccgggtcccacttcgcctctgtcccatccggtgagggcgcacggcgccctggcgctcccgatcccggatctttcttcctgcctcttccctgggtgccctccccgggagggaggggctacggagagagcgccaactgcagcccctcctttagaatccgcgctcccctctcctaccccgcggcgccatcgccagaaacccgtcccaagcgaagtt

SEQ ID NO: 50501 - DNA, 2025 bp, Homo sapiens
gccagagtttgagaccagaaataccaagaccctgtctttactaaaaataaaattgtcaagtgtcgtggcgtgcgcctgtggtcccagctactcagcagggtgaggtgggaggatcgcttaagcccaggagttcgaggctgtagtgagctatgatcgtgccactgcactccagcctgggcaaaagagcgagaccttgtctctaaaaaaaccaaaacgaaccaggttcggcctaatgcagaaggaaatccggagcaatccccaaagtcaacgccttggaaaggttcgccctgggtctcagtactccggggcatgcgcgtcctgccgctcgctctcggggagctcccaccaacaccgccctcatccccagccccaggacggatacccaagaccgaggtccaggaccgcaccgaccaagtcgcgggcgatccctggcggccagctacggccattgaccgctgggagcgcgaggggcggggcgcagagcgagcgcggggcgggggtgtggtcttctcgcgtgaattgatggcgtcatcgaagcgacggcccggaaggaagtcgcgtgctgaggggtgtgacggttttcttgctcgtgggctcggacgagtacggagcgcctgcagggacagcctggtacgcggcccccgccccttcgtgcgcgcgctgggcctagctgccgctcagggtcggggctgacccgtcactttcgggaacctcagtcccagcagcttctctccctcagccggcccgctcctggagagagacagaaacccttttctgtcgcgtcctctccttgcgagccgcagggggaccgagcggaggctattggagccgcagccccagaccagggcgcttgaccctctctcggaacggggcggggaaggggcgcgagtgacctcggggagggaagggcactggcaggaaaggacgcaactgcagatcggtagccggaggccgccacggtaaaataagcgcctcgcagatgtccgcgccccggttacgttagacctgggaggcagaatccacgccctgcgctcacgggcccacgcacgcacagctgaactttgcagtcagtcaccatagttccagatcattcagcgttcaggatcccactcctccgcgtcctggtgcctgaacgcggttggacctaggagcctagaggctcgcagtttgggacattgcctttctctctgaccacgggcttggggatctgtcaggtgcaaagtgccaaagtatatgggggggagtgtggcttcaggcttgttcagagccctgtcctgtttagggccaaaggaataactgggaaggtggatgcgaggccaacgaatcctaccttgaaactctgctcgcctgctggctctgccactccagcatctgaaaggagtaaataatggtttcctttgaaactgcaggcaattaggagtgggagactctgaccagaattacatagccacaactgcctgtcatttggcatcctctgtaatttgggccaaagtactgcagctgcctctcttccctactactggtaggaaaggttcagtgacagcacattcgtgttcacaggaagacaaggctgtgttctgaaccctacccagctggcacgggttctcccttgagcaacggctgtatccggagccagtgcttcctcagtgcggtgggggctctaattttacagttaaagaaaggggaacgttgactgagaacgaggaggaagcgagttgtagatctagccttgtgttcacacgacaccaggctggatatgagtcactcgcagggagctcagcttggtgaggtcctctcgctgttgtggccttttctcctgcacgttggaccacacacattttcccgtgtcttttccctaggataaaggctcactgatggctcagttgggagcagttgtggctgtggcttccagtttcttttgtgcatctctcttctcagctgtgcacaagatagaagagggacatattggggtatattacaggtaaggcagagacagggagaagccggcaacttcctgttaaatag

SEQ ID NO: 50502 - DNA, 1769 bp, Homo sapiens
tgctgcctgtgtcccctgatgagacagcactggccgcaggtggccgctaacctctcgaaatagggatggcccgaattgagacatatgcaagtcaacactacaccgggtttcagaaacacatacgattttcaaaagaattaaaatatcgcatttagtttttctattgattgcatgttgaaatcttactttggatatattggattaaataaagtatatcattaaaatttttaagcttatgtgcctatgagaaacttccaaattacacagttggatggcgttatatttctcttggacagcagtggtctgaaagatgacaaaaatcacgatacgtttgaatcacgccatgtctttagggaaaagaagaaagaagagtttcctttcgtatcgcttaggggttcctcgcaagaaccatctgacagagaaaagccctggctcccgccccagtggcttctaattctggtccccgcgcccagaaagccgggaacgggcaagcctggaaaggcgttttgaaaggaaacaggatcccccgagtataggatgcgtttctgcctcacaaaagtcccttgggggtggggggacggcagcggctgaggcgcaggaaagaggagagcacacggggagtggcccttggaaccaggcgcgcaaaacctcagcccctaggctccatttccaggttcgcgggtgacctccccaagatggccgccgcctgggggcgggcctccacgctgcacgggtgttgattgggtgagacgactcaatgatgagcaatgattggttcacacggcgcaagctgggcggaaccggaagatggtgtgagccacgggctgccgggggcctggggctcggcgtcggtccccgggggatgtggagagctggcagcatgtcggccgagctgggagtcgggtgcgcattgcgggcggtgaacgagcgcgtgcagcaggctgtggcgcggcggccgcgggtgaggaaggaggctgcgtggggacggtgggcggccgccttgagaagagggacacctgcgtgggaatgggtcgtcacggtgacgcagaggggtctcccagagaggcgggactggtcggccgcctagggccaccgaaaggctagcgaagggtttccccagcctccttaccttgagtctgttaggttttctggagattggcttcgttggagcagagggtaccgctacctcgggaaaatgacttagtgcctaggtgtcgtggccacttgcgcaccgcgtcgtttcggggtcgatagccttggcggatgcgaggggggccaggcctgtgcccacggatggtaaggggagacgggggtacaagagcaccccgcggaggccagagacgcccgagatcgcgtgtgtggcagcgtctcacctgctaagtgcccaagaaatgccagtgccgcccggaggccgaggtgagggtggactggccggacttcgctggcatcagagcggcacttgtttatggggcaggagggagaagtccaatcccaagccggttaaggggagctttcgtcttttgtgtatatatatattacatcctcttggactttgattagaccaagaatcaaaatctgcccacctcagtgcaagtttaagctgaatggtgtggaatgagacggaccttaacagagaggtcacaggtttctctgatcgagcatttatgctggctgaagacaagacctgtattatagtctttctttgactattccttagacgttaccttgaacaagtcaggtaactattccggccctcagctctgaaagct

SEQ ID NO: 50503 - DNA, 2301 bp, Homo sapiens
tgtgagtttgtctttcgttacgcatgatgggtggcaggttgggtttcttccagattttcatgaaagccagttcctggagtttggacggcttgctctcctggattgggcccacctgtgcagcctcacagtctctgaaggcgctgggcccttgtctgccctgaagccagcctcagaaggcttgagacgccacaaaacctcccaatagtccatcaagactttgatctcttggggagctcctcacagattctatcacagttcttaaagcaacctcttaatactcaaatggtaccccccaccttttgtttaacattgatggcatatgcagcactattctctatattctctcatttcaccatcacaacagctggtagacttgtgtaggctgataggcaatgtccctttgtggacggggcactggggcccagagaaggttccgtgttctccttgtctgaggtcagagtgagttgtggcaggacgagaaataaactcaggacttgactttctggcccagaacatggtcactactccacactggtatcttctatctctacctttaataattgataagtggcatattcttagatgtgcagctttcatttaaacgagccttattaccataaaataagtgtgtgtgtttctattccagtggaacagctgagaattgacgcatcttaatgcagaacaaactttgaaaccacaggcagtgggggtgagaaggaaggagagcattaaacccagccatgagtgggattggcctcccctctcgtcatcccatctccctcccaagctcattcctcatgattcaagctaatctcacaggctgcagggcccagagtgtgcaaccctgtgccttccccctgaagctggaccagcagtgaattctgttccccaaggctagacacacaggaatgaggtcagacaggacattcttaaaatccaggacatcttcatccttcagaaaagaagtggtcgtgtgcatcccaccaaagctttgaaggaggaagtactcgcttaccaattcctgaagggctgcagtaggagtggaatgtcaccagtggtgcaaggggaaaggatttctctgggaactgtgactgtctttaccatgaaattagttgaatgctattacatcagcctcatgactaaggacaaaagaatccagactgtctaccaaaatgttttactaatctgtcctcccctcaaggaacacataggtaaagaaaagggcttccttttccacccagtttgcaccaacgtgtgtaaactatggctctgtgtggttaagcagctacttgcaaggtaagggtccttaaacttaagttcctcttctataatcacgttgaagcctcaagggaccgcagagctaacacttttttttttcctttaaagtgcagcacagagcagctgaaacggcacacagtggggacagcaggaggggcttttggcacttttcttgtatttagaataaattttacaagcccacactcctgagccttgagatcacagggagcagaggccactctgagtgccggagtgccttctcgaatggtcccatctgcaccagctgcctggagacaccgcctgctacctccatgctattccaggctagcgtctccagcacccgccctcctagcagccttaccgctctccagcctcagagctaagcctgacccggctgccaatctccaaaataaaatcaatgtgtgaccttattcaccagatgtacggaagaaacaagcacaaacgaaggccaactttgaagccaaaaagggaagatgagaagtgggagagagagagaaagaggaggggaaaagaaacttggctagacatgaaaggtgtcttgtctgtctgttccctattaggcgcaattctcttgcaatctgcagcctccacataattctcttgaccagaaactctctggagagatagtgtcagaggaaaaacaaacagaatagcatcttctgacagcaaagtcacttaaaaacctatttgggagggaagaagagagatgtgagcacctcaggggagggcactccttcatagcaggccacatgtggagttacatttgccctgggattggacaaggacaggcaggggcccaggaaagggttgatgtgcgagggcaaggcagtcccaggaagcaaaagcccaaggcctctaccctcccagcccctctgatgcccaagatctacctctctgtggacggcacactaaatcccacagtgtggggctttctacagccccatggcacactcagaggaattcagaagaactgccttagagaaaagtggttccttggccaga

SEQ ID NO: 50504 - DNA, 1417 bp, Homo sapiens
caacttccaggctcaagcaatcctcctacctcagattcctgggtagctgggattacaggtgtatgccaccatacctggctaattaaaaaaaaatttttttaggcacttgtctcgttacgttaccaaggctggtctcgagatcctgggctcaagcaatcctctcggctctgcctcccaaagcactgggattacaggcgtaagccaccccacccagacaatggctgcagattttgagggctgcactggtcagaaacttggaaagcaaagaaaagtgatgttttgccagtttgtgcttaaaactatttcagggtaataatacctgctataatcgtatcggcaatccttccacaatgaccagacatggcaagatgagtggaacttttgtttctgtctcacttattcaatatttattacacgcaccatctatgcccgatactaagtgctgggaaaacacagatgaatggcagcccccatctccttcagctccctcgctcactttaggtcattttctctcaaattaagtgtgtgcgttacagttaggagtatggggggagcggggaggcaaaaggaatctgatgttaatccctccaccgccccaggctgtccccagggccacaagtacctcggagattgccctcgtcgctgaaggtagtggtaaggaccccctcggtgaccacgcagccgcagtcggagcacaccagctggctctgcgaatagtgcgagtcttccaccagctccgtggagccgcagtccgggcagcggcctctgcctggcatctcacaaccggccccaaagccgcggaagccttcagagactcctgggtctgcaacagcaaccgtgaggcagcaagaagtaggaggggacacttcaaagggttgcacccccgtcttccggccagcgcgacggaggcataggcggttccctccgctgggaggctgcgcgccacttccggtctgtgcctccgcgggctcgggtagaaacgtgagctaggagaggaggttcctgggctgaactgtagctgtctggtttccctgcactctgtagttagtttttgggacctagactggggttgaatttgggaaagtttttgcctacatggacacgtataacagacagaagattgttgtcacccctgaacaaccctccttttaaagtcctaagggaatcgcaggttggtaatgaatgtttaattggccatagaagaaagtatattttttaaagggagagtagtggagagagagcgggagcaggaaactgtgttctgctttccagagctgcttcctaaagcagattccttcctctctttacctcctgtttttctcaactgtaaaatgaggaagttgaaaaaaaaatccagagatgcaaacccaaacgcttttggaggccaggcaggaatgtctaaaggagtttggagtga

SEQ ID NO: 50505 - DNA, 1244 bp, Homo sapiens
gtggtggtgcgcgcctgtaatcccagctactcgggaggctgaggcaggagaatcacgtgaacctgcgaggcgaagtttgcagtgagctgagatcgtgccattgccattgcactccagcccgggcgacagagactctgtctaaaaaaaaaaaaaaaaaaagcgccccagatacggccccttcttccaagaagacccaaagctggcagagctgggcgggacagccgcagaaggggaagccaggtgagaacaccagcaccggccgagggctccgtcccgaaaggccttccccgctgctgcccggcttactctcgaagggtccagcgcccagaccgccctgccggaggggtccgcgcccccaggccgggccctcccctccccgcccgcactcactgcgtcttcctgcggccctggtcgcggtgcagatcccgcaggtccacctcggcgcggcccaggaacttgtcgaggccgagcagcgcgcggtgcagcacggtgagctgcagggtggcggcggccgcgggtccggaggacagcagcgatggcagctcgaaggtggcctcctcgcgccacacgggcgcgcccaggctgcgctccgacacggaggtggcgtacttctccttgcccacctggatcaccgcgtacgcgtcgctcgtgcccccggggcccttggcccgcaggccccgcgcctgcagcaccgtcacctgcacgtgggttggggaccacacggcccccaggccccggccagccgagaccattagggacatggtgacgataacactccagaagcgaggagaagatcgccgcgactggcggcctccacggcccgccccggcgaccaggccactttaaggcttccggccacacccccgccaggccacgcccctcatggccaaggccacgcccctgcccgagccgcctgctccacctgctgcgccgcgccccgccccgccccgccccgccccgccggcctcagcagcgcgggcagctccgggcacccgggcgccggaggcggggctggcgcggccaggcaggcaggggatcacgtgcgcaggggcgggcgcatcgagaatctaatctgagaggtggtaggtgacggatggggtccccagctgccaaaggtcgcacggcgggaaggagctggccgaagcactgacttggaagtcagacctcatttccagggtcacatcgccagtcgtggccttgcgcggattacctaacatcaagtctcaatttcttcacctgacaat

SEQ ID NO: 50506 - DNA, 2043 bp, Homo sapiens
gatcacttgagcccaggagttcaagaccagcctgggcaacatactgagattctgtctctataaaacaaacttcaaaaattagctgagtgtggtggcgtccacctgtagtcccagctactagggaggctgaggtgggaggattgctggagcccaggagttcgaggctgcagtgagctatgattgcaccactgcactccagcctcagcaacagagtgggaccctgtctttaaaaacaaacaaacaaacaaacaactcagcctgggaggaagtttttcagctctagttccccctcctctccaacactcacatttttagtgctgctcccccaataaagaaaacaaggcataaaacctagctggacagcctccccagctgagtatgaaacaaagcatatcttccacccatggaaaggattagaggacaaagagggtggggaagtacctgtgacctcatgtgtttgagtttctgtgagacacaaatagactttggtgaaagcagatgtggtagtttggaggcaggcacagctgcctcaccacccaggagaaatccagaccactctcatcagacactgaccactggcaggggttagctcaaaggagtgggggcttcccaaggcaggaactggaaatttttcagagaaggaagaggccggagccccagcaccaggtgtgccttgctgcctccagctgtttggtggctgttttttcccctccaccagcccagagcacgttgttcccatgactctgcccaggagtcaccctctgtcttctcccaattttccagacccagaatccaggctgggggatgcacagggacaacaacaagggcagtgacaaggcaggcaccctgcaggcccctggctccccactggccctgggaagactccaccgtggccgctcctccccactcccaaaggccaggctatgctggccggctgaacccgcgcagggtcactgagttccaggagtgtttgtaaatacctcccgcagccagggtgcggcagaacaggaaggctgctccttcctcccatcctgccctgcctccagcttggactgaaagaggaagagtttcaatcaaccctgagcacatggacaagcctggcaggttagactggacaggtgagacacctgtcctccttcaaaagcagcagagcagagagtgccaggactcccagccacctagatggccctgggcagccgagctgtgcagttagagctgatgagaaggcagggctgtgtctagaccagcgggaagcacctcttccataagagagtccctggggccacgctggggaagaggagaaaaggggttccagggagagaatcctcctgacagtcactcccccagagcccttcagtgtccctgatgcccctgctgcagggacactagctcagaaaccatctctggggactccaggtgggctcttgtgctagcccatggaggagcagaaaggggctggaaatggctccttgaccttctgctctgcttcagactctgggatgtggtgacaaatgtccacacagggtgattcactcacctggctctaaacagccctcgggcttccccgtgtccagctgcctcagcctcctgcccacttggttggccgtgggcacctttcagttgtaggtttgaggagcaagggcttcctgccttggggggtcagtgagaagaagggaggtcagagtgcctgacatcgggttctctttcccttgccccagtagctgtggcaatgtggaggttgaaaccatggcccaggcaccttggtagctgttttctcccctttaccaaggcaaaacacattgtactgagactcactgcagtccccgcagtgctgcagtcacagctcaccgcagcctcaaactcctgggttcaagcaattctcctgcctcagcctcccaagtagctggaactacaggcacacaccaccatgcctggctaattttttaaattttatcgtagagacaggggtcttgttatgttgcccaggctggtcttgaattcctgagctcaagcaatcctcttgcctcggcatcccaaagcagt

SEQ ID NO: 50507 - DNA, 778 bp, Homo sapiens
cacgctctaacccacacagaaagcaccacagttctggaacctgtgtagttcactggataaaaatatgaaatttaaaaatgcatgtaaggagaggtttttcaagtgttttgtctgttttgctgtggagccccagaaatctgagagcaattccagcttcctaaggaaaggaggtaatcctagggtcaggaggagctcataaagctgttgaagctaccctgagctgaggagtgggtgagtcagcccagcccatggaggggtgtgtgaggatgccttcgaacttcctcacccctctcagaaaggctgcacctgagccgcattccagagacgtttgggataccaacacacgtgggaaacacacatgaaaacagatctcagccctccctcctccctggggccagcagaggagctctaaggagcttaaagaggaagaagactcccaccttccataccttcctctgccctggcagatggaagggagagttacccgggtgcaggggctgacctctcaagttaaaagctcaggtttcttgttcttggtgcccaggtttgctaaacagcaccatctgctgcctcagaagtcatgcaactggaaagtagcaatgcacatgtgaaccttccaggttcccgattagggtgcgcccgtgagactctcctgaaaggcagagggcaggatacacctgcaggccagctttgtgctccctcctcccgcccttccaattaaactcactttttttttctttttctttcttttcttttctttctttctttctttcctttt

SEQ ID NO: 50508 - DNA, 1000 bp, Homo sapiens
tgaactggttctatttaaaagaaaaaaaggtccggtatagtggctcacgcctgtaaccccagcactttatgaggctgagacaggcagatcacctgaggtgaggagttcaagaccagcctggccaacatagtgaaaccccatctctactaaaaatacaaaaattagcctggcatagtggcatatgcctgtaatcccgctactagggaggctgaggcgggagaattgcttgaaccctggaggcagaggttgcagtgagccgagatcacgccactgcactccagcctgggcgacagagccagattctgtctaaaaaatatatatatatatattcacaaatcaaaccctacagtctcaccaagagtgccactagagggagctgcggcgcagcgttcaccccatgggagcgccctggggctcccccagcacttcccacgctctggggtggctttcgaggacattccggctaccccttcccatcacacccccatgtctttcttttttgttgacccgcatgttttctcatgtacatgccaacccagaggttagggacagaggcgagtccatgggcagaactggtccccagtgcgctgggacacttaataaatgtcacattttgtgtctccaataaaggaaactgagggcctgttggcagaagcccagcctgggaaccaggaggcggctgctcaacggcgctgggcattccctgtgagtccaccacggttcccaacatgacgccttaggttttacatggggaagtagtgcttcctccatttcactcgtggaaaaaaaaatggaatttcagagtgatttgtaaagggtgcataggaagttagtggactttgaacccagaactttttatccacaaaactcatggaattaacactgcaccatcggctttgagttttcaaatatgtccatactgagagggttgctttttgtgagatccagtgaggctagaagactgagtccagggttccgttggagtccgcagaagggaaaa

SEQ ID NO: 50509 - DNA, 3682 bp, Homo sapiens
gcctcagcttcctgagtagctgggattacaggtgcaccacccaatttcccttttaaactgccctcccctcttcaccctcttccccacaatatgtgcccataatgctaagaacttctcaaacccaacaagcttttccatcctcggtccttcttgcatttttctctctccccttgaacatccatccatccatccatccatccatccatccatccatccatccaaggagtacctactaaacctcaggtggacgttggactcaattcaggggctatcgggaaacctcttcgacactcttactcctctccaacgcccttccccaccacccacctctgcgcccccagctctaaatttagctcccaggacgccgctggttggttcactcctcctcccacaccctctctaaaggccgggaacggaattgttagcccctccacccccacccccatcaaggtcaagaaattgaagcggggcggggggcggtgagcataactactcaatccccattttctcatctgaggaactaaggcacgaaacagggagtgccgaagggtacaccaggcctgatgtcctaatgcagaaaccgggccttcctgcagtgggccgggtcagctcggatctccgcgcggtcctgagtcgccgcccccaacccagccaaggattaatttaggcgagctatcccgcccgccatccccatatccgtccctgccagcgtggcggggagggaccccggacggaggggcagtcgctgcggggcggcgccagcgcccgtgcggaagagcccgtgagcagacgggagtgggtcggggggcggcgggggatcccacgtggaagcagcgtcctggagctgggtggggctgcggcgcggactacaaatcccaggggcgtggggcgggagaggcggaaggggcgtcctggggcggggcggcacggggcgaggcggagcgaggctggaggcgcgggagggcagcgagaggttcgcgggtgcagcgcacaggagaccatgtccgggggcagcagctgcagccagaccccaagccgggccatccccgccactcgccgggtggtgctcggcgacggcgtgcagctcccgcccggggactacagcacgacccccggcggcacgctcttcagcaccaccccgggaggtaggcgcgggcttggcgacgccgcttgccggctcctgggcgggcgggaggatcgggaatcgcggattggaccgggtgtccaggctcaagggcgccgtgattggaaagaacggaaaaggggcatcggagagacagcgagggtcatggaagtggccgcccgcttcccctctgagtgcgtcttccagacccgagttacaaactgccccgtttgtttcctctttctgttaggtgtcagacagctgacacctaacaaacacgcacgcctccaggacagccacatgccgagctgtgctgccccttgtgggtgttgggggcgctcccgaagcgggagagggcggagttagggtggcccacgatccaggagaggcctggcctggtgtttttatgggatgggtattatctgttgggataaacgattcctgcagggccctttttccttcccgaagcacgccgagttttgtgttggactcgcgcgctctgactgaggttcggatctgggggtgcttgcctgctccagcagcgcctcccgggcacctgtggcacgttccccatttacgcgagtgggatctccgcgggggggaccctggcgccacggccagggctgtgcagaaaaacacgttcttctgtccggggagaggaggaggcaccgtgtgacctccctgggagaggatgaggaagaggaagctgagctggcacgggtgggggggccagcctcgggctgccctcaggaacctggcattccctcccagccccggagccccagcgcacagacgctgatgaaacctacgcgcctgtttgcatgatgaaataaatcctcgtggctctctcctcccctctcattgtcgcactgcccccacccctttttgctcctctcccttcattctcctccacgctgctttccatactactagaaaacgcgacagatcctggcgcttggctaggtggcgggcgggggccacatgcttattttctcaggcagctgtcccaccagcagcgagcgcggccagatccgaggtcctctgctgtttgatccaaaacatacactgttagaacggttagggatcttgtccagccctgccgtcttattctacagagcccggcattgaggccccagagcttgaacacgtgtctgttgcccattgtcacaccgttttcccagattggacaagaaatagcaaccaggcagagaagggagaaatgcttccttttctattagaaatgagccaaggaaaagctcgcaggggctcttgttgccattcccgactcatcctctttcccttgctgggtcttttgtagtccatgctgttctcctttgtctctgtcacaatggtctaccaggacaattcctgacaattttggagttctttcaaatgagggtgtaagtgtctgctggatttgttcagggtgggccctgaggccggcctgaaggcgcaggtagcccttttttgcactctttattgctggattgttgggtcaaattggaagccaggatactgtttataggcacttctggcccgggtaccaaggttcacacctgtaatgccagcattttggggagccaaggcaggagaattgcttgaggccaggagttcaagaccagcctgggcaacatagtgagactccatctctacaaagaaacaaacaaaacaacaacaaaatgttgtcctagctactacagaggctgaggccagaggatcgcttgagcccaggagttggaggctgtagtgagctatgattgaccactgcactccagcctgggtgacagagcgagaccctatctctaaaataaataataaatataaaatataggaacttcaaatccacttttcactttgggttgggaagtggggagtgggcagggggctgacagaccacagcaaatccccttccctttgaaggtctttagcagtagggggagtggggaagggacttctgcatcagggcatagcatatgtttctgagatcactggaagaagctagcagtgccaggagcctaaagccagctcactgtttggtcgtccagtggagcaggtacagctcacagtccctaagccagggaaacctggctgacttccactaaagtcaagcaagcctggtcggcctcgattagccaaggtgtggactcttcctccaaagcccacctcagcccacctctgccagggcagagaagccaaaatggtcacattgcagccaaaatggtcacacccttttgctccagagcagaatactgcctctcagtcttccaggtgcttgaggataactgggggcttcatttaagtgcatattctgattctgtaggtgggggtgggaactagattcagcatttctttcttttctttctttcttttttttttttttttttttgagacagggtctcactctatcacccaggctggagtgcagtggcgcaatctcagctcacagcaacctccacctcctgggttcaagcaatcctcccaccccagcctccccaataactgggacaacaggcatgcaccacccatgcccagctgatttttgtattttttggtagagac

SEQ ID NO: 50510 - DNA, 429 bp, Homo sapiens
cacagcaatattgaaaaaaaggaacattgctttctaaggtgagttttaaaaaaaaaaaatgttcagttgtgcacatagattcttgcctgtgccaacaaacccatgaaaaacctgtttctttctggtctgacttagacccatgcctggggtctctctccattatgattcatagcgaatgaatcacacgtttttgtttacgtgtttgttccctaggttagccaggaaattttttctgagcagtcttactcatctttgtatccacatgacctaatgccaggtctagtgtctggaaggtgaagagttgaaaagaatgctggaatgaaagcgttcccctcaggataacctagttttcttattttatttatttatttatttttgagactgagtcttgctctgtcgcccaggctggagtgcagtggcatgatctca

SEQ ID NO: 50511 - DNA, 841 bp, Homo sapiens
atgctggtctcaaactcctgacctcaggcgatccacctgcctcggcctcccaaagtgctgggataacaggtgtgagctatcacacctggcctgaagccaattttcaaagaaactgacctattccctcccatgccagggcctcagagggagaggctgccgatcgtccccatctggtatccagcagcttcataagacccctggcccctgagaaatgttgggatcttggttctctttgtggaggtcagcggttgcggggcagaggtaaagaaaagtcttggactgagtgtgctctgcatctctcaccaggatttccaccccggcagttctgtcctgcttgttaaatagaccatccagccagaaaagccacccagacacatgtgattcctccctggactgtgtggcgaggagggagggaagaccgagattctggcatgtcggcgtatttacctccaggttaacagggagctgcctcagagctggagttcagattgtccagggtgttttgctcactggctgttggcttggatctgagcagaagcatttggacctcccccaccccggccctgttgtgaaatgctctccctctccctggaatgggaacagcagttctaggaattccatcctcgtactctcactaagcctcacgtccccacatccaatggaagaatgcttctgccaaaggaaccccaggggaaagtgagggccatgcgcggctcagtttacagaagtcctatccagccgcagagtatgggcactggagggctatggggaagcgctcaaggcagggaacatcctgttctgacaagcacccagaagtctaagacctcctaatttttccagc

SEQ ID NO: 50512 - DNA, 2458 bp, Homo sapiens
tgctgggattatgggcatgagccaccgcacccagcctcctctgggtttttcaggagaatctgctgcctctactgcagccacgcctttaaaaagtggaaaaaccggcaggcaagaggctgcagatggcttgaccaacctccctgttcccttctaggtaccaggatcatctatgaccggaaattcctgatggagtgtcggaactcacctgtgaccaaaacacccccaagggatctgcccaccattccgggggtcaccagcccttccagtgatgagccccccatggaagccagccagagccacctgcgcaatagcccagaagataagcgggcgggcggtgagtgtcggggcttggccaggctctaccttgggaaagggaatgtatgaggctcctggagtccatccactgggggcaattccagggaggaggaacaacagggactctgccctaccctctaaggagcagctcagagcccagagggtgagagtaggggtggggaggttgaactcttcattggtagcaactttccccctgaaaggggcccaggcacctcaggaaaggtgatctggcacctttgggtcatgtaattagcggggagtttgtttgaaatggcagcggctgcacacagcaactttcgtaagcatgtgcctctgtataattgtctctgaagcatttccacttggaacacacccatgatgtttgtggtgcaagagacaagttatcaaagacacagtgtacttgtcctttgggaaattatatgtctacaagataagaaatacatccgggatgcctcctgttgggctgttggtcccctagtggatcttcatgaaggcaggtagaaacaatgcagccagttgtctctgccgatttgacatttggtagctgggtccttcctgctgtccccacctcccgagtaattagagcagccactgtggtagtggtgtaagtgaatgcactctttgtggcatcctgactggcttggcagagtgttggagttctctgctgcaagatgatgcagcataagcacttccgggcaactataatcagattggaacccgccgacccttcacccggaaggccgtaccccaggcccagacaggaagcagcagggacctcagcttggctggctctgctaacagcagcagaattaatctccccagggcctgcaggacatgattcataattaccttgggaacctcacagtacaagacagacaatagttgcctgtgtcttagtctgtttttttatggctgtaactgaatacctgagactgggtaatttatgaagaaaaatggtttatttcttacagttctagaggctgggaaggccaagggcatggtgcccgcatctgctgggcttctggtgagggcctcctgctgcatcataacatggcggaaggcatcacagggcaagaggggcacatgagagagaaccaagctgcctttttataacactcttgtgataactagcccactcctgtggtaacccattaatccaggaatgggctaatccattcatgaggacagagccttcatgacccaattacctcttaacggccccaactcttaatactgttacattggggattaagtttctgtatgaatttcaaaccatagcattccagccctggaccccccaaactcatgtccttctcatatacacatatattaatttggtccccatatccccaaagacttaacacgttgcagtcctagctcaaaagttcaaagtccagaatttcatctgaatcagacaagactcacagcatgattcatctcaagcttaatttccttccagctgtgagcctgtgaaactaaacaagttatctactttcaaaaaataggggctgtccctggcccctaaaaacatcagctggtggccaggcacagtggctcatgcctgaaatcccagcactctgggaggctgaggcaggatgaatacttgaggccagaagttcaataccagcctgggcaacaatgcaagaccccatctctacataaaattttaaaattagccaggcatggtggtgcatgcctgtaatcccaactacttgggaggctgaggccagaggatcatttgagcccaggaggtcaaggctgcagtgagctatgattgcgtaactgcacgccagcctggccaagagagtgagaccctgtctctaaagaaaaaagcaaaaacaacaagagtcagacgaaatgatatagtctggatatttgtccctgcccaaatctcatgttaaattgtaatccccagtgttggaggtagggcctggtgggaggtgtttgggtcgtggggacagatccctcacagcttggtgctgtcctcatgatagtgaatgagttctctcgagatctggttgttgtaaagtgtgggagcgccactccaccctctctcttgctcctgcttcctccatgtgacatgcctgctcccgctttgctttccaccatgacgaaaagcccc

SEQ ID NO: 50513 - DNA, 1188 bp, Homo sapiens
tttcgtcagcaggaaaaggcaaggaacccgctttctgccggttaaccggggggaaagtgcaacccttaaggattaggttttgctgagtttaacacactccagagagtatgctgcagggagagtagggaagagaagggctcttgggccacagcaaagtgaaggtgaatccctccaacccccagctgcaaatcagaggccgtttcctatgcaaaacagcataggaagacgtttttctaaggaggagccttaaatccgtccttgtttgttccttggtcttgggttctgcgcggaatgatgttgcaagcctcgtctttgtgctgccgcctgctggtagagttcattaaagcaaggaaggctgggtacgtctaggaaatggttattgcactccgttaggtgaagaaaagtgaggatgccatatgtattcaagacttaagcacatttctccacattttttctatcgagatcatgcaactgtatcctcattgtctgaaaggaatacttaggaagaagttttccagacacagtgggcaggattgtgttgtggggcagaaccagacatagtatagaatctgcctgcgatgcccagacttggtttgggacaagctagttatagccctgcttcctcccttcgaccaagcgcagccatgcacatggtcatactgccctttgatcctcgacccatctctctggccagcagccgccagctgactctatctgccaaggaattccagccaggaacactgtttactcttgtctggcatttctcaacccgagcttctaccatgaggttgcatttgaacattttcctaggtactgcactaccttccaaaaacagtcaggactctgggctgttcaaaacttcttccttagcctctataggataggtttcagatttgcataggaatcctggatattcaggttatcctccaactcctgggacagtttcagcttttttttttttttttttttttttgacacggagttccgctcttgtctcccaggctggagtgcaatggcacaatctcggctcactgcaacctccgcctcccaggttcaagcaattctcctgcctcagcctcccaaatagctgggattacaggtgcctgccaccacacctggctaattttcgcatttttagtagagatgaggtttcaccatgtcggccaggctggcctcgaactccagacc

SEQ ID NO: 50514 - DNA, 1989 bp, Homo sapiens
caaacaacaacaagaaaacacaaaattctgcgaccatatgttaaaactgctacaatactacgtatttgggaggagatacttagatcaagcatcctgcttctctttggagtaccaacccctgatttaagtatttatcatcaattttaaaaatgtaacctggcaactcagttaggtctttcttcaattttgttgaaaaccaataattgagaaccaattgggaaatcaatatctacgtatttcccatggcgtccagtggcccagagattcctacactatcggtggacacatcacagtaagattagactgaggattggcgaggggtgcgccgttcttgtgtaaagcgggagaagagtgtattatcgttaggcaacattttaggatataggataaacactggtgtcctgaaaacgttcctggccgcaacactctcagaggtttgcattctcgagtttggagaccatggctctgaaagactcaactcactccactgatgccagccaccagctactgttgatgacttcccaagttcgtactttcagtccacacctcttcctttcgctgggcaccaaacttgtctacattccgagtgccccggcacaccccggggcttcgctttccgcctctcacagtaggaagcggcgagccgcttctagtgcccacgccgctcctcggctgcccggcctgggttttccaccctcgcccctggaatcggcctccctagattcccttccctcttaaaatcatttggaaacgggctccaaggggcgaccctgcgcagaaaaccaaattccatccggggcgggcagggagtgctagactccaaggaagacgtttcccacattcggtggtgaggagtgtttggcggcacggcacggccagcgctctcaaggaccctcttctgcgcagaatatccagtcgtagccacgaaaatacgccgcgtcagtccctgactcgaaaggaagtcctccagagagccgcactaaccatctagcttcctccaccttcagcctgccaggcccgcggccaccgccggcgcgggaggccggcccacctctgcccgcgcgcctggccttaaagcggtcgtggaattatgcttcctcaggcaggcggtggacgcaccgcgggctttttctgtttgaagactacagcgtcacacagcaacgcgcgcgagagaagagagtattctcgcgagaagtccaggggtggccgtgatggcggcggcaggagcaggacctggccaggaagcgggtgccgggcctggcccaggagcggtcgcaaatgcaacaggggcagaagagggggagatgaagccggtggcagcgggagcagccgctcctcctggagaggggatctctgctgctccgacagttgagcccagttccggggaggctgaaggcgggtaagaggtcctgccgcccgaggaagacgcgggagggaggcccgcccctcgcgaatcccgcggctcctggagccctgccgcccgccccctgcgaacccaggccccgccgccaatggctcgccctgcctctgcgccgcttggcccgtcccctctcaagcatatctcggataacgccccttccgcacctttcacgggcggtgggagctgaggctcctgtcgttatctctgatccttgcaccctggcaggaagctggtagctcacactttaacgggaggccttcacatattccagaaaagaaaccactttgcagtgccagactggaagaagtaacggtcactctgaaaacagggtgggagagctgcctctctttgaacctctcccaggaccaactctaacccaggtagatttgactgtaaaggccggttaggcttccctgtgctccgtgggtccgcgactgtctgacatgtccaccttctcagtatcctgacagtaccttgggcatccagtctgagatcaggcttagctgaaaaagctgcaggagtatgaagttcggctgtaatttgatcatcatttttgggaataggcattt

SEQ ID NO: 50515 - DNA, 2636 bp, Homo sapiens
aaaaggaaagccagaacaactgcagacggttcttttcgcttttgtataggactgagctcctcttccggacaaaaaccaggaataagggaggtcttcttagtaaaagcaaaagtaaattgtcttaaaaaaaaaaaaaaggttgcaagtgatttggtctttccagaaaagtcaataccatgtctaacagtggtctctactacaataacctgaaggtgctaatgaccctcacagtaaaataagctagcaaatggccacaccgtagagcgcctacatttactgccaattaagtccaactgccgctgtcttaatattttcgctttttaatgaatcctctctctaggtattccgatccatccaccggtaacacgctgatacttcgaaatactgcaggcaggagtggacgggggagaagccccccccctccccgggcttctttcgtgttcgggcctctgctgccgcgatccacggaagcaagaatgagttccatcgcttggggctcaccagctagagggctggcggaggctgcgaggggcagaagtagcagcaggctactgggtgggcaagcggtgtgtaccgcagctgtggaggacatcgacgcggaacgcccggattgagctcagaacacaccggccccgcccgggactcattctacaagcttcttcggaagaggcgcccgcccgggaggaagggtctaaccccgggctccaccgggaggagataaactactcactgtcaatgtcctcgatgaggctggcggtgccaggcatatagttcattttgaactgaaataatgctgcaatgcacagcggcgggaggccagcgcgtccaaaacctcttccctcctaccgcagtcgccgcctcggtgggaccaagcccggaatcccgaccgagaccagcacttctgccccggctttcagccgccgggggctgccggaagctcctccatattacccttacccacttcctgtaacacgtgtgggcccccaggaagaggcggggcagccgtaccgttgggggacaccctttccctgttcctgttaagtaggtaagaggaaactccattggataaatggcgaggaaacgtatactccctcttaaggaacacggtgtcttccttcgtctccgggttcccgagaccccagagtcactgacctccgtccctcagctttcggggttcggcagcagaaggggcgggcccgggcctgggattggctggcgtcgtccgacccccttcgctgctctccattcgcaatcgcccgcgggcgcctgcgcgatgggtcggccgtggggagcggggcgggaagcgcttcagggcagcggatcccatgtcggccctgaggcgctcgggctacggccccagtgacggtccgtcctacggccgctactacgggcctgggggtggagatgtgccggtacacccacctccacccttatatcctcttcgccctgaacctccccagcctcccatttcctggcgggtgcgcgggggcggcccggcggagaccacctggctgggagaaggcggaggaggcgatggctactatccctcgggaggcgcctggccagagcctggtcgagccggaggaagccaccaggtaagctttgcaccctctgtccttgcggggaggtgagggcccttggggctggggttcgtaaaggatcgggtttcatacttgttttccttatgtggaggagggtgtgttgcggggggtgttggagagaccgagactaagatcagaggttggggggacatgcttgtgttccctttgcccctccttttctgcttcgaccccaaaaaatatgtttattaccatttaaaaaagaaagatcctgcgcggacttactaagcttagcagcaggctgcagatctctctcctgggagcggtgctgggtaggggtggcacggatctactgctccagctctagcaatttatcctgcgtggctggcaggccggctctcccggggaagggaagtggctgcagcccccgatgccgctcagggaccctcccgaggggaaggaacctttgcgaggaggagggatctgggcatttagctgtttgcccctaatgccttgcctgagatcgaatcatgaataatcagtgttgtaaagtacctttacgcggattgactgatttaattttcacggcgactgcaaggtaaaatggcattacagcggcccttttttttgttttcgaataaggaaccggggctctgcgaggttaactcacttgcctaatacacttggacctgcaacattttattctccgttttcctgccggacatatacttctgctttgttaatacagtcttctgggtagtgggttgtcgttctgcggtggcagcatacctctctgttcgttcaagaattatcctcatttgttgaaaatgtaatagtgaaattctcgtacattgctggtggggatgtaaaatggtggaaaatagtttggtagttcctcaaaacattaagcattagaattagtctatgacccagcaagcccactcctggctatatacccaagaaaactgataacgtatgttcacataaagcttgtccgcccatgttcatagcatcattattcataatcgccaaaaagtagaaatgtcgttttttttgttttttttttttttgagttgg

SEQ ID NO: 50516 - DNA, 1455 bp, Homo sapiens
tgcagtggtgccatctcggctcactgcaacctccgcctcccggtttaagcgattctcctgcctcagcctctcgagtagctaggattacaggcgccggccatcacacccggctaatttttgtatttttagtacagacggggtttcgccatgttggccaggatggtcttgaactcctgacctcaagtgatccccctttcccctgcccctcggcctcccgaagtgttgggattacaggcgtgagccactgcgctcggccccaaatgtcattttattatttgagttataaagtgagtgaacctcttggagccctggttctttattcgaatacaggaatgttgtaaggacataacgactgatgcatcgataaacaaaatatggtgttaatatattcattcaatggagtattatttggccttagaaaggaatgaactgctgatgcatgctacaatatgaatgaaccttgaaaacatcacactacgtgagctaagtcagtcagaaagactgcatattgtgtgattccatttatatgaaatggccagagtaggtaaatctagagacagaaagcttaatggttgccagaggttgggggactggcggtgtaggtgagaatattctttttgggataatgaaatgttctaaaatcagggcctggtgagatggctcacacctgtaatcccagcactttgagttgccgaggctggaggattgcttgagtccaggagttcgagaccagcctgggcaacatagtaagaccttgtctctaaaaataaaaaaataaaaaacaaaaaataagaaatgttctaaaatcagtggtgatggttgcacaactctgaatatactaaaaactactgaattgtacattttaaaagggtagagtttatagtatgttgattatatcacagtgtaaacaattgtatgagaaaaacatggagcagtgataaattattttttatttttattttttatttttgggacacagtcttgctctgtcgcccaggctggaatgcagtggcgcaatctcagctcactgcaacctctgcctcccggggtcaaagtctcctgcttcagccttcctagtagctgggattacaggcgcctgccaccatgcccaactaaattttgtattttaagtagagacggggttttgtcgtgtgggccaggttggtcttgaactcctgatctcagggtatcctcctgcctcggcctccaaaagtgctgggattacaggtgtgagccacagtgcccggccaagattaattataaattaaagaaagatccagctgggtgtggtgacatgcctgtaatcccagcactttgggagtccaaggaaggcggatcacctgaggtcaggagttcgagaccagcctggcccacatggcaaaaccccgtctctactaaaaatacaaaaattagctgggcatggtggcgggcgcctgtaatcccagctattcgaga

SEQ ID NO: 50517 - DNA, 2189 bp, Homo sapiens
cctggcctcccaaagtgttgggattacaagcgtgagccactgcgtccagcccctttcaacttttcacctcagttatgtcttcctgtttggacagcagtatctcatctccaacctccctggcatcttttaaatcctgttaaggttgcctctacaaaacaaaacaaaaaaaaattattaattttattgtttgtttagagactagtgtcgcagtgttacccaggctggagtgcactggcgccatctgggctcatgcagctggcaccaatgggctggggcgctccttcagcctcagcctcctgagtagctcagacccaggcgctgacaccacgcccgacacctctacattttttagggatacctttttggtaacctctaaatcataataaatgcacggaggacgggccaaagcctttttgcctggcaaatgctagtgacacccgttctcagcacccagaagcagaggccaggagcggggcggctgtggctgcgccctccgccctactccgctaatcccggggccgcgcagtccctgcgtccggtgatcaccgcgctgctcctggcgcactagtagggtctgtagcgtatcccgaggatcattccgactttcccgccccgtacgtgaggggccgccttgaagcctcttccgccacggacactcgaaactgatcttgaagcccctgccgtcacggatactagaaactgatctcgaagccccttccgccacggacactcgaaactctcccccactgttagacctcagcagccagcagcccgccgcccggcgctgcagctccctgcccgcaggagccacgtctcgcgcgactccccccacctctcgcgacacttgccgcccgtgccctgcggccctgcacgccccacccgcggtcgcgcgccgcgctccccgccgcctcaccttttcgcctggcatccgggcccgctactcgcccactgggagcgccgtggcgcctggtgttcggcgcgagcccggcggggctgcaggttccgccctgctccgccgcgccccgcccgggctggggtaaaggccgcggccgggccatgcagtgtcctcctcagggagggcaggagagcctgaggagtggcggggccgccaggtgagaccgcgtcgggcgggcggctggaccgagggaggccaggctgggtgcaggtgggcggcgcagcgctgcggggccgggatgcggggcgggggaacctcggctcccgggaagccccgagcctgggggaaccctgggcaccctgtgaaccctgtggtctgcactggctgccctgctgctgtcgcggggctgcgggcggacgacctgagcccgagctccgagggcccggagcggggcgccagggcctagggtcgcgggggccaggggcgcgccagggtggctgaggtaagtctgtgtggggaaaaggacaatggagccgaaagccggcgtctgccgtcccgccgggcccgcgcgagatgccctcctgccccccgccctacgaggcagcttagaagtgtccttctggtgcctgcggcgctgatcgttgccgagtggaaggagtgttggagaggtagaaacagctggtcagagccgcctctgcgggaggaggcttttgaggtcgcttgttagctttcatctgagattctggctatgggagtgggcgtgcgtgtgcgcaccgtggccccaggcgaggtttcgtcttttcccaatttgtaccaccacccattaagcgacttcaaggatccatcaaaaatgattggttcctaagcgaacagttttattttttgtattttaagattccattagttgtgtaatggtaggggcctggagcccaaaaccttggcgttactaggacagggcatgacccagctgacttggagtaaattttctgcctttaactacatttagattggaaattagggtaaaatgtttttgttgcaatctagtttcgagcatgtggtcctgtgattctgggtttgttttataacttatggactgagtaaaattacccagtttactgagagaattgagaactctgtgcaatggttgatctaatagaagcattttatttaaagcttccacccatccagttgctaatttatgttatttctcttttaaattatgtagattttgttgttgttgttgttgcagaaatggctccgtaaaatgattagttttgtgcgtgtgtgtgtgcga

SEQ ID NO: 50518 - DNA, 1841 bp, Homo sapiens
ttcaggcagaaaagagcccaggtgtcacctggaggactgaggtatggggaagggagtaagcgttgaatgacaaaagaaaaatcagagtgaagataaaggagaaaagaatgagaaagacgtgtggtggacaccattaacctctctgttctggtgggtaagggctgaggcagatgctggggtggttagctgttgtcacttacctccctacgatcagttttattgtgttggtaaagacgccattcagagccagggcaaggctggcagctgcaaagcaaagccattagttgaaaggatctgtctaggaggaaaggtatggtcatggcctcgttatgagagcagccgtgctgtttctgagatggatagaatccaaccaggcctgggcacaaaaataattagggtcctcagtgatcactcttttgtagccgagaacttttgtactaggccaaagacatttctgaggtacaaataacccagtgcatttaggcacagggctgcctgccgtgtagcctgcgtaaccaagtccctgcagtgctattttcctctcccgcggggatagagttcctttaggaatgcagaactcagtggcctccacacaggctcaccgtggctgaatcccacaacgacctcctaggttcccagcacgaagaaaccggcccgaaagggctagcgctcacccaggcaggcttgtctgctgtctcttgtgtctgccttcttgagaaatttggccaggaagatcagagacagtggagagagaaatgcaataacctgaatcagaatgtcagaggttaaaaacaatccaaaaaaaagccacactcgtgctcctacaggaaagagggatgtgacacagcaggactcactggagctaacataaggtctctgagtgcgcgtaaccgggcgccaggcagcgccaccagtgaacagcagcgcccgtgcggctcgggccccggtacctcaggctgaggcacagagcgcccgggaaaacgttgtctcagcccaaagaggctcggacaccctcctctctcaatcaggatcttaaacactcgagccctaggaggcggaacccagcgcacagcagcggagtgggcagtgggtccctacaaaggccgtctcggggtggaaaacgcacaggtgcccgcgggaagccgggtcatggggagggaggaaagacgatctttctccacgcacaaacatcggcttggtggggaaatactccgcctccacgtaggggttccggtagagccacatctcctccggctggatgagtctctggaacggggggagcagctccgtcaccctagaggggaacaaagaagcgcagagcaggtcgcctggcttcctccccgcttccccactgcccgacccgccgccccgtgccgcccgcctgcctgggaagcggggccgcccgggcccggccgtggatctttcttacaggaaggccgcgaacagcgcgagccgcacgcccacttcggccccaaaggccaccgccgccgccgccttccccatccggccgcgagctccgagcgacgctgcgctgacgtggccacctccgcggggagggccgggccgggaactgggcaccgccccctctcccagttgcccgcgctccggcggctccccaggaagacggcctggcggctgtgccgagggcatcgtctggcaaagggtacgcaaagccagcggagctgccctctggtgcgttcagcagggagccagcgccccagttccagccgagtaggtcggcgtacggtccatcatcagcagctcgtctccacggcccaaccacaccaccgcggggagcagccttctcccgggacctcgcctctaaatggaaaaccaaacag

SEQ ID NO: 50519 - DNA, 522 bp, Homo sapiens
ggtttcaccgtgttagccaggatggtctcgatctcctgacctcgtgatctgcccgccttggcctcccaaagtgctgggattacaggcatgagccaccgcgcccggccaaacagacttcttaacagccctactccttatcgcctgttgactgggggcgctcccctgcaagactgacctttggccgcactcctagaaaaccactgcagttatctgctccacagtggcactccgttctgccgttgcccagacaatctaggttataattaaatgttaactccatccctgaaacacaggagaaataattattcaaactcgagtcatggggaagagaaaagctctcacaggcacactcccctaatgaaaaaaagagacatcattttggcatgaaggcgtttcccttgccagtgttctacctcattgataacagtgatggtaaaaaaagaaaaggagaaaaacatccccacccaggaacaatgacagcaaaactacacatcctcaaaagaagtcatgtccttttcacag

SEQ ID NO: 50520 - DNA, 550 bp, Homo sapiens
catctgaaaaataactcaattaacatactttatataactctttagataaaacacaaattcatcttggtaatttgacaggttttatggtagaaggcaccagtaggaggaaatttaactactttttaaatcttgaagccaaatcttaatttgttgaaatacctttgggaagagaggaggagggctaataaaagtgatgggaacaagatgtcctaggagaggttgtcagtgcacattcctggcacaatcccattcatcttttcatgactatcgaaataagtcatcttaccagttttacattccatgcagatgaacttgctatcaggaagtgatgccaatcccaggcactccaggtgaaagtgtttgcagcactctccctcacaaggaatcagagagtcaccagagctttcacaaatctgtaatatggcaaaaagcagtggttctcaaactttggcaaacatcaagaccacatgggcggcttgttaaacacaaattaccgggtccctcacccacagactgtgattcagtaggtctggcgggggccccaagaatg

SEQ ID NO: 50521 - DNA, 2304 bp, Homo sapiens
tctccctatttatcagtccacccaggtctgtaatctccatgcaactcttctcccctttccctgcccctccccgatccatccttatccccgcccccatcccactttcccaattcccagctcagcgccactccgactcccatcccactccccacctcccctggcccaccccccaattccctccacaccccccaccttgccatctgctcctccgtcaggactcccctcgagccctttcaggccacccgcttccccttccattcctcctggggtctggcgctccatccctaggtcgccccctccccgtcgttccctcctcagcccttcctagcactacacacgcgcgcgcgcgcacacacacacacacacacacacacacatacacacacgcacacgcactttaccttcagtttgttccattctaaccccccggccgtgtcagtgcgatcacaggagagacacggaggcccggagtggggctggggtgcgggcagccgctggggccgcgcgaggaggaggcggaaccgagctaggccgcatgaaatccccgggctagattttccccgcgccggacgcctctgccatggcggccggcactgaggagggccacggccgggccgggccgggcgtgctgcgggaagaggaaggctcgggaggtgggatgggaaggggaggccgagggacgggggtcgccgcgccgccgctgctgccagagaggagcctgcggctggcagcccggcctgggtagcacggtcctcggcgctcggctcggaattcgcacgcctctccgcggcgacctgtgcacagccccctcggcctccgcctccgtgctggccgccgccgccgcctctcccgccgccgccgcgcacaaagcccccccaccccgactctcggggcgccgccgccgccaaatcctcagcccctcattggccgcgggccgcggcgcctgccgggaaatgcagtccctggttcgggacgctggggctccggaggaagcggcgagtcggcggggcggagggggcgggagcgcgaaccaggaacgcccgcggcagctagcgtctggacgactagggagaccgggcgagagggccgaggaacgagggacggggagggactgtacgtgggagagtgacacacaaaacaccccgggaagccggaggaggcgtggaaaggtggggcccgggaggtaaaactgggatcggcgcgttcagtgaggctgattaaagaacaacgcgcaaccagcgccatacggcgctcctcagggtgactcggctctctagctcttaagggttagaagcgaccctcgcacggtccccggtgggtcaccgcgcgagggcggggcagtccaggcgacccctcggccgtctcccgtcctacggctgtcagggaagggctccggttccggtagggtctgcatttggaaagccgggggcgatgcaagaccgccttggcgtcgtctccctctcagccccggctgagctgtcggatggtccccctcccccggttgcaagcagtaggagacccggccggcggcgccggctcgccgagggagcgcctcgacctccccggcaggcgccggccccgcgcgcctcttcctgctctgctgcggcccggaggcttgtgggtaaccgggaggacgacgtcagcgcccgccgcatccccgggtgccccccagccgcgggggaccgcgacggctccgtgaccgtcacgtgccggaggccgcggctgctcgcggccagaccttcgcatcgagggacgtgagggacatttgtcctagagggcccaagataagaacgagaggaagaaccgggaggcaactctccgtcatcctctagccccccgcatcctaggaaacgtatggaaaacaatggaaggttaagtgtgtgcacagtgatctggccctgcaggagtgtgccgaccaggtgatatttcctggggcctggtgataaggatttggaaggttacagcacagagacgtgaacgtaaaaaggaaacagaggcagcaagcaaatgaggaaaccgatactctgttctgagaataaagccattttaccgctagacgtcatactctgtagacgttatagtgctggatgtctttggtactattacaagaaattagatatctctatctttaaatatcacttaaggaaattaaatgatttctacagatcagttatttaaaagggcactaattatgaactattttttttaaacgtaacccggttaatactagatactgagaattatcagtattggctgggcgcagtggctcacgcctgtaatcccagcactttgggaggccgaggc

SEQ ID NO: 50522 - DNA, 1430 bp, Homo sapiens
agaaagcaaatatttttagtagaatacagatttccatatgaagatttcacagtattccagcctctggagaggaagggagaggaatgcgctccttccgattcccgccctttctgcgacaccatcaaatcctctcagcgcccctctggcagttccggatttgcagggtccgagggagaatacatcaaagtgatgtcattcatgactccgaaatggttaccatggcgactatcagacatattaagctgtcagggaaagagcctgtttaatccagtcttcaatcacgggtttcctcgggcgttagccactgcctgcggagtgtggactggcagaaaaacgtcaccttcgggccccccagcaccaacgcgccttaaaccaagccccacaaagaagtcacttcggcgatgtaaacgcgactttgcggcttcctgggctgctaaggtgaaggacgcccgccctccccagaacttgagagcttattggttggcgatgtcgtcactcagagtgacgtcaggggcgaggaaagaggcggaaccgtagagacttggcttcgggcccttctagcttgggggtcccgggaaggagctgggaggacctaggcggccgttccgcggagcccggccgaggaggtaggggtgggcaggcccagccctcaggccgcgacctggtgggccgcgctgcctttttttcctccggatcccgctcggtccgcatcctgctcctctcatcagagcatgatccaggcttctgacagcttccagttcccaccgcgctctcctccacccacgacctcatccccgccagttccccagcacagcgcgaactctgaagctcggcctctcctcccccttccccgcacagcgcgctccgtccttttttccgtcccaggccctgcttctttctcctcggcttcatttccaacaaccccgatcatccacgagggtcgtcgttcccgtgcctgtcccacctccgcaccagaaaaccaaagcatatcccccagaccccgccgcatgcaggccgcgcacacatcaggcgcgccgaagccgccgggcgaggaagccgagggcgcgttttgctcccgtgtggtgatgggcaaagccgagggagcccgggagcagcgggcgtggggcggcgccaatgcgagtgcgagtggtgtccgccgcccgggagcgcccgggcccgagcggattaaccgccgcctcaggtgtcgtctcctgcccgcgaaacaccacccaccgttagtgtgggtccacaggtttcgagcccctgttgaaaatgtcagctctgtggctaaggtttctattcaggagagctcctggaactcttttcccaaccacaagagagcaaagctgccattgggaatgtcagctcttctgccgttcctcgcggcccttagcagaaaagcgcccctggatggagatgggttttggtga

SEQ ID NO: 50523 - DNA, 975 bp, Homo sapiens
tttaaacaaccattaccatgacaacctgaaccttgattactcatttgaggagttgtcatccccttacccatttcttgagaaggccatcataagcagttagtaatttggatgtcttagctgggactcatctaaagcagttaggacctgctgggaaggaaacagcagctcagtagattcctgacaaagctctgctcccacacttctgctctcataccgggaagctggtgccaaagtcaatattctgccgggcgcattggcctgccaagaaggggtagttggcttggtatgcaaagcataatactgggaggaaaagcagagcctcaacaccttgtagaagaaaggcacccttggactataactactaattaggcttttttaaaaaatggaaggaatgtttgactcagaatcagctgctttataagcattccacctgggggagcaggtttcccagaactgagaaagcatgatccttttggccccatttagatttcagttgttgctcttagagctttggaataaacaacactggtcccagaaataccattgttttgggttacgccaagcagaaactgtgttatttactgagggagttttgtggaccagtgtgttagggccatttctgggggtgttggggggacagcaggggagaacactacagggacatgcaacaaatggtacattgtgagcttttcaagtgaactacttttttctaatgaaccataaagctgccatggaaaagtatgtatgtcacaaccagacaaaatgcagatcaaaaagggaaataattactctgatgacagaatgttgggaaggagttgtgtaaatagccctgatattgctaattgctaatacctgttggcaggattcccattatttcaactgccacctccctacgtcgcctttgcagtagcagccagtgcaggggacaaagcatccaagcctctgattctgtttccactgatttgctggaattta

SEQ ID NO: 50524 - DNA, 1455 bp, Homo sapiens
agatcgagccactgcactccagccttggtgacagagtgagactccatctccaaaaaaaagaaaaaaagaaaaacaaataattgagaaatggcttttgaggccaacagcaggaccagtgccatcagtggattgctaatgattattttaaatgctagaatctatcagagtgcaacttttgtatataaagtactcaaaactcaaagagaaataatactaagttgctacatcaggggcatatttcataggttactcataaagggtgtagctagaggaggaagttagggatttagtggaaagcaaatagtgctaaaaaaggcattgactactgtaaaagtttctgggttttaggaagagcagaaagcttatgatacataaaatgtttatctccccaggctccaaagactgatattcttgtggaattacctactttcactgaatctaaagagaacatggtggatcttgcacctcaactgaagggaactaaggttagacagttactttccatttggttaattagattaaaaaatgaaaatagcaatgggtcattttctcctgttttaatccccttaatgaaattgaaattcaatacaataatgttccttaataaggaatatttattgtactgtttgatctaagaggaagcttaatatttggctacacgtaattaggttccagattttgccttttgaatcctgtgccaggatatgaggtagttgtgacaagttcctggtagtcaaggtagtggactgtagattaatacacattttcttttaaatcagtaacccaactctcagttctgatgtttaaggatgaagactttatacagccgccaccagttacatcatcacccataacaccatcaacacctatttcattacctaaaggacccatcacttcttctgaagaacctgtaagtatctttaataaatgaaaaagaaagagaagaccctttccctctagttatctttaagggcagtgagaatctagaattagtcctgttgcaaaacactgcacaattcttcctgttgtccaaacaggaaattgtaggccaaactttagtcatcttgtaaccacgttttttacttcaactatccaaaaaaaaaaattgtgggtcagactaaaacatgcaaagtgtagaagtcagttacaatataggcagaccctttttttcttatgtgccaggtggaaatagtttccatgtgttattttacacatgcttccgacgtgaggaaatactagctggaaagcaactttaatttccagagaaatgcatgtaaataagaaactacttatctatcatccagttttcccaattgggtgaagggatttggggcaagagcacagggcatgaagagagtaaacagtggggaggttgtgggagagttgaagtgggaagtggctcctgtggaccaaagacatggctggcaggacagagaatctatgaagacacagatg

SEQ ID NO: 50525 - DNA, 1137 bp, Homo sapiens
agttccaaaaaccattttaggagcacctgattaactttctgaatgatccaccagtaggatcagcaccctggaaacaaagtaccttatgagatgggatggatatactccccagtaagatctttctggatataatgaagcttcctggagaaacagactggcaatcagaaagatttggctgcttccgacacctccatcttgggcctgcagaggctgcagcaatctgtgaggcagccgcaatctgcgaggcagccactcttctagcacatatggctttcattagccaccattttgctaggaagcataattaagggtttaagccttaaccatgtttgtgttgggtgtgtgtgtttctggccagtttgtctttcacaaataagactattagtcatagggattgtgaaagtctgatataatccctgtgctacccagcaacaagtattacattaggatatttatgcttggtgttttcagtattaataatatgaaataatagatagactgccatgcagctgaccaagggctttcttcccctggggagtggttagaaggccaaaggtatttcagcctgtaggtgataaaattagatttctttacttgctgtggttagacagcagtcagttaaaacaagtaaaactccactgtcctgtctgggatcacctaaatgaggaatgtcaccagcacttcacagcaagaatatgcattctacaatgctttctaaatttgtgctccatcagagaagccccaccatgtcccactaatgaagcccagttctttgggaatgatgaatccctactgtgcacatacagcaatcatggatcctgcctatcgaggtgattcacaatacactttcccatttcaaaaatgacgggtattttaattagtccacatttcaggtgttaaatgtgggaaagggattagctaaacttgctcaattctgttttagctgaatgagtcataggtactgctgggctgtcctacagttccttctggctttccctccgagcagggtgggaatgagcagtgacctggtcaagggacccgggccacttgatagacctctcctcccactcttctgctagcagctcagagaagtcaaggatgttttgttgttctcatcatttagggtgcttggctgtt

SEQ ID NO: 50526 - DNA, 3359 bp, Homo sapiens
ccttgcaaatatatttttttatattcaaggaaacatttggtgattctactcttttggcccatgtgtcatatatgaaggacacttactatatcaacccttaatctgtctgtcagtctgccacacgagaaagcatcctttttttttttttttgaggcagagtctcaaaaaatcaggctagagtgcagtggcgcgatctcagctcactgcaacttccgcctcccaggttcaagcgattctcctgcctcagcctcctgagtagcttggattacaggtgtgcgcgccaccacacctgactaatttttgtatttttagtgcagacggggtttcaccatgttggtcaggctggtctcgaactcctgatctcaggtgatccacccccccctcagcctcccaaagtgctgggattacaggtgtgagccaccgcgctcggctgagaaggcatccttttacctccctttccagggcatgtttttagcagagccctgttgggaaaagcaccagtttatgaatgtagaacctgggcccaaatgtaagaccactccactccagatctagtctggagcagtgatttctctgcccctcccattctccttgcctcatgtgccctgagcacctcagccgcctccatggtcagtgacaagctgtaattggagtgaaagggctttgaagttctgataaatgagataataaatctctgctctccagggatgtagggcagtgtctgtgcctattgaatggcctcaacagtgctgtgtatatagtaactacttaattattatgaaataattattatgaaataagtggttgaagtgatccctttgaagttcaggtcaactctgagccatctgagaagaatgaatggaatgggtaattgaaacagataatccccaaacctcaacttactagttaatagggttaggctctttacctattaaaccctttgagatactcaatttgaaaactgctaaaataaatcccctactttcatttattttttcattgttgtggggcaggagaaattgagctgtgaaatggccaccaggaaggtggcaggatgacgagtcaggagtcctgtgtgagacatccgcaaacatctcataagcagcttctgaatcacacagcatcaaggctgccaaagtgcctggccaatcttggacctagagacctaagaatgggtctccctgtggactcctcctgacctgggtggggcaaggctcttggaaaataggtcaaatgactctcagtctagaaccgtctggccagagatgccccaactttgccttttgggctattcatcaaatccagcctttaggacgtgacatcagggtttcatttcatgggaagatctgggtgcattttagttaaaagaagtgatgtcatcacatccctgctgaaaaaaggaaaaaggacccactttgtgctgacataccgagtcctgggcagggaagtctggacagacacctgggtccacacctggcttttctaccagctagctctgtgactctgggaccattgtgtcagctttctctgccacagttcctccctctgcaaaacgaagggcttgaaatgcaggattctaagattgtggccatctctgactctgataacaaccccgtgagcctgaagaattcagcactgctgctccatagggggtttcagcaggaagcgggcacagatggctttctctggaacgtgttcagaaatgtggtgtgtgatgtacggtgtgaatgaagcgtggtgccctttaaacacagcttccccctgggagtgctctgagctcctcgggttctctggctctcattcacattccactgtcactctgggcactggcagccctcacgtgcttgtgcactgagcacacacacaccccgccctgactgacacacaattggtgactcacaactgacacaatcattacacacatggaatgactcagcggggacactcacatgcatgggctcacgctcaccgtgacgtgtagaagtggctgtgctcgtggcatcaggcacccccacagcagccttggtggaggctctcgccagcggcgtctgcaaatgatttgcattcttggctctttggaactgcctgttctttgtctctctgttcgctgctcaaccctttccttcccttctgtcccaaacttggctggttttagtctcttgctcccaagctcctcagccagcttcccggactggctcaggcagtctctaaggctcctgccaactccaagattgcttctaatcaactcctcagctgggaggagtcccttccccaggggtctcattccctccctgacctgagcatctcttcctgtcttcttcaggaagatcttcaatatctgtgccatttgagccagcccctttcgctagataaggagcacccagagctagtcacatgatagaaagtgctggcggcttctggagggtggtcttcagtgtctctgagggtgccctttctctttctggcagcccaggcagatagtagtgttggggttcttgaaaatcatctttgggagttgagcagaaccagctgttactggagaagcagagaaaaaagatgctgcacgtcccagccataatggtctgggagggacctaccccagagcgggaaccagggtggggaagcagtgcagaggaaagagaggcctgtgtccatggctgctggctgagttctgatgggaagataggggaacacgtcctggagctgcacttccttgcaattcatcttctgctttcagatttaaggttactttgcctagaatagctcctgtctttcctcttttcctgggggagccctcacacaggagagggagtgtggcagagtgtgatgtgaagtcaggggtataggtgtagcctctgctagtagctgtggtcctgggctagacattaaccactggagtctctgcttccttggctgtcagatgtcctaataccacctttctgtatcctctgatgtggtggcatagatcaggtgagctagtagatgtgacagtgctttgacaaattaaaagtggcacacaaataaaagtgagaatttgaacagcagcgaggagatggtggaggggctgcccacagaatgtcctgagggtctttgagggagacctgtagattcccctcctgaatatggggtaaagtccttgctggaatcccaaggctggatcaggacctcctttgactccggcaccagaggcccagacaaggacttgctaggcccctgctctggacccagctgtcattaagctgagtgttttcctggagagaggagaaggggtccttccatgtggattttccctaagtatagatgctggcccagcaatgccaagaactgagacaccctgtgcctagctcttggctggctgc

SEQ ID NO: 50527 - DNA, 922 bp, Homo sapiens
aactccgaacacatccaaacatcagaacaaacaaactccggacacgctgcctttaagaactgtaacactcaccgcaagggtccccgacttcattcttgaagtcagtgagaccaagaacccaccaattccgcacacagtgacacaacccaatataccttttattatatcaaaccccgagtgggctaggggagcaccttgtaatcaaacatataaaccctttctgcagcgaaatgtaagaatattcaagctaagtaggatagtacgtaacttcaggtcagttgaggtcaggttttgctgccccacagttacgaaatgcttgtggtttccagagtggggaagtttggaaatgtggataagggatcgcggacctacaaaaccatcaccttttggatgaggtaactgagattcaaagaggtgaagtaatgtgcccaaggtcactctactgggcggaggagtccaggttaggacacggcggtgttgggttgcaagatccatgcgctctctactgcataattctggcctgcttcctgctgtccggtacaaaaaggagtaaatggcagtccctccggtgctcagcggcaatggcaatcagaccaagtttgcaaagaagagttttctttctggaacagcaatgcctccacctactggacatatgtgagaatatcacctgactcccccagaaaacggagtttattgtcctggtaatggactcttaaaggagggcaacggaattgtctttctgcgactctgcaaatgacatttcaggagccaggaagtggttactaaattgctgttacataactatccttcaaaataataacaacaacaaaacaacaataataacgttggaaccgtcaatgagatttgtttgtttgcttgcttgctttctctactggactcagctcctgcaccttgaaatgta

SEQ ID NO: 50528 - DNA, 1261 bp, Homo sapiens
gcccaggctggtctcaacctcctgagctcaagcaattctcctgcctcagccttccaaagtgcggggattatgggcacaaaccactatgcccagtccaaccagctattattactattttttaattagaaggaaaaaaaaaaaaacaaaaaacagagggatgtgggtgtgtatgtttcttggaatccaagcgatcagggggaaaaaatccgtcaaaaatgttctcagtacaaaagttggcaaaacagctctcttttttaaactgaactttgtaataggagaaatactctcacaaggacaggatgtttctgagccaagttgaagcaaaagaaactttttccagcatgtcaggaacgaagctgacgttccattaagaaaaaaaaaaaaaaaaaaagaagtgctagaggaaggagtaagaggtgaaaaggcaccagaattcagacggagctttaaattccagacagggccagcgttgggagcacgtaggaggcgcccctcggaaaggagccggagacccagctgacttcgcacttgagctccagccccgtggacatttcctgttctgcctctggaaattcaagctgaaagttacaaaacatccttttccctggaaccaagtgcttggttgggagaccatgccctccccttccttcctcggaactcctccctgatcgccccgtggcttccccaggagagatgcgaaatcagcggtagcaggtggcgcagaagggagaggggagcgaccctggggaccgactctggggaccctcgccgaagaggtaggaaacgggggactgcacgttcctgaggccacttcacacttattgagcaaaacgaggtgctgtcctttaagcctggggctgaggtgtttccctcgcttgggtatgcgccgggtggtgggtggactggcctcgaatctggaataagttcaggcattccttttccctctctctttccaagttgaactttaattcttgggtctctggaaccacgtattttgtttggtgtgggaggtattaaatggcagaattctaggaagtaaatattgtgaatccctgattttgctcttttctttattttcttttctctttccttttcttttcttttccctttgcttctctcttctcttcttttttctttccgcccctgaaatgcccaggagcagtcataaataccttcatctgggaatagattcggggagaagtgagaaggggacagggctgggaaaagcattctcaccacggtgaacggggcgcggctgttt

SEQ ID NO: 50529 - DNA, 2158 bp, Homo sapiens
ctagaggcaatgaagataccagataccttcttctttagtttcagcctgtttgtttgtttgttttttctagacagagtcttgctctgtcacccatgctggagtgcagtggtgtgatctcgactcactgcaacctccgcctcacaggttcaagcgattctcctgcctcagcctcctgagtagctgggattacaggcacctgccaccacaccagctaatttttgtagttttggtagagacggggtttcaccatgttggccaggcaggctggtcttgaacttctgacctcaggtgatccgccctcgttggcctcccaaagtgctgaggttataggtatgagccacacgcctggccataagcctgtgtttttaaaatgaggttccaggcagatacaagcagaaaggaagagttgcaaaagcagacacgatacagaacaaaatgccccaaggtagcagggagggcttggtatgtttattatgcaacaaaggactctcctggcccttggaactttccatagtttgactttcgggttaatcattaccatctgcatggctgctggcagccgaggctttgcttggcctgccgggcctggcagtcgcgttgctggccagcctgagggctgcactagccatagttagctgcgatgcccccttgagtttcctgcaggaacaagcaagggtgcctgcggcctgctgacgcaggctggcggggagtggcttgccttaggcctgtctccttgtctctcacagctggctctccagggccggtctggttttcatagtctcacgtttccttttccagcacacttgtgtgtgtctgcataccacgtgagaacacagcctgctctcttccttggagtggctggatttccagcaggcaccacacgtgcttgttcagatgcaaggatacgtcatggaaaagagaggcctgaatagatgcatcttagttcatacacagctgtcaggacttgaggcacgcatcagcagagcctgggaaaaagcatgagatctgcttttagaatcatgagcaccagagctgaaagggatcttactctctattcgaaacccttcatttcacagctttggaaaatgaggcttaagacaggtggggagttgccttgggtcacagagcaaggtccaggggtccttctatttcttgaaaccaaactggttgtgtggagagtcttgagaggaagctaaagttacatgggtgctggatttttccatttggccttagaaatcactctccaccgttttccacccgcgctgtgcctgggaggctggccagactggcacccttacatctggcttccgggtagatttagccagaggagggcacctgcaggtaggtttagagggaggggagtgtgtcatggaggatttagtccacttcttcctttcccgctgcttccatgggctggtggtgtccgctgactgaaggccaggactcctgtcagcaaccaccccctgcactcagctctctcccctgacccttcaggcctaaggcagtgacagcatctcctacagtgggcagccctgggctacgctgctgtctcctgtggcctcccaaaccctcctcagacctttgtaaatggtccctttattaaaccctcaagtcaaagagagagtgttacctgctgggctcctgactgaaagaatggatcctgacccacctgacaggtggctttgtttgttagcataaaagagaaaatctgtaggaaaggaagatgtccctgaaatttaggaagagggtgtgttagtttcctgtggctgctctaactaatgaccacgaacttggtagcttaaaacagaacaaaaccagaaatgcattctctcccagttctggaggagaaaactggggtctaccggccggtactccctccagtggctccaggaaatcatctggtccttgtcccttgcctcctttggtgtctggtggctgccagcattccttggcttgtggccatgtccttttgatgttgacctccgtggtgacactgtgtgtatgaaatcttcctttgcctctcttgtataatgatgcttggggttgcatttaaggcccacccagataattcaggatagtctccctctctcagaaatccttaatttcatcacattagcaaatacagtaagatatttacaaataataaaacattgttcca

SEQ ID NO: 50530 - DNA, 1630 bp, Homo sapiens
tggagtgcagtggcatgatctctgctcactacaacctccacctcctgggttcaagcagttctcctgcctcagcctcccaagtagctaggattacaggcacccgccaccatgcctggctgattttttttgtatttgtagtagagatggggtttcaccatgttggccaggctggtctcaaactcctgacctcgggtgatatgcctgcctctgcctcacaaagtgctgggattacaggcaggagccgccgcgcctggcccatgctgttatttttacacagtgaaccatgaatactgattttaattccaaaggctcacaaattaaagagcttccttgaaccctggccctcaggattctttcagtctcctggtttttctgtctgctttgtcatttctcagtggaatgactaaagccagaacctgctgggttagtgaatggaaataaagtattggtggatgtactcttcctgccctgcccgtccaagactagactgtggggttggaatccatgtttcaatacccaaacactgcaccagctcacgactacaaaattagatgagacccaaaaaaatacaaagagtcaatattccaagaagatacttgcggttactgggtccaagatgtttgaattataggtagactctatctctgccagggactgaaatacggccagggcataaaaaatagcctgtttaaaaaaaaatcaataaaaatctcagaaagagcacactgtccctggaccattatatacaaaaagaaatgacaagtaaatggaacaaaacaaaagaagtttataaacacaaatgcttttattcctctctctgaaaatacagactgacactgtacacttggcagctgtttccacagcagggaagcagggtcacaggtctgaagcatgagttctcttctggaaaccacctactgattataggtgacagttgcatcaccttgaaatggaggaacaaagacttttttttgccagaatttggcattgctagcacaaagtgttagaaaacggtgacacacagagtggctggtagaactgcagaggaatttctgaaagtgagccttaggcaaaaggttggaaacttgtgctggaaacttaccttatgattaagcatgtgactcccacctgacttaattctcttccagtcccaagggttccaaggccagagagaggtcctggtcttgattgctggcatgtttactcttccaagtacactgagatcaaatgcaaagacaaaccatcaaaggtaattcttttctttgacattgaatatacctgggatggattttaaagtaaaaatttttatttcctagtgaaaaataacagatatgtaatctttgtatttggattaagtgtgaatgaaggaaataatgatcgaggaaagaacaaagaactgggtggtggtgatgcaagctgagtcctggttctggctttgctactaactataacttgggcaagtctgtacttctgctgcatagaatatatttacttatttctttttttgcttgtttgttttgattttatttcgagacagagtttcactctgtcacccgggctggagggcagtggcacgatctcggctcactgcaactttcgtctcccaggttcaagcaattcccctgcctca

SEQ ID NO: 50531 - DNA, 1469 bp, Homo sapiens
ggaatgggtgaggaagggcatgagagatgctctaaagggagttgctaggtgtagctggatcgcagatgagatgatagggataggtgtttgtttgtttgtttgttttttccttgcgacagagtttggaggaaaattcattgcctggttgtcagagcctaaagggacattaaaagctaaagatgaacatactcccttgttttatggataaagaaaacaagactcagagagggtgaaataacttgttccaagttactcagctagttggaggcataaccagagcccagttttctgtgcagcgcagtccaggcctcccctagtctcaggaggcagaagcggtttaggggaaagagcatgccctttgcagggccgcctgggtcccctgaccccgtcacacaccgccccctcctgctgcttctctgaacagcagctcccggggcctcttcccgcggcttcccttccagccccggacccagcgggcggagagggcgacgtccgcggatcgcggagtcccgggggcgcccgcaggcctagcgccctccacctgctgccccgtgccacctaggagtttccttgccgggcgaggaggcgccgctgcccgggctccccgcagccccgcacgccccaggggctccgcatctccaggcggcagcacccgcggggccctgcaatccgcggagaagttggcggcatctgaagccacctccttccccgctttcccagcggcggggaccctacggccgggcgccccaccccgccctccctcgccccacccttcctcccgccccaccgcctccccgcccagggtctgggcacagccgcccgccgcccagcacaggagggtgcagccccggccccaagttctgcgccatgggaggctcccactctcagaccccgaggggccgggaacccgccggggagaggcacccgagacccacggagaccgcgtgagtcccagagccctctccaagggccgcctttgggggtttgcgtgccagcccgggatggagcgcgctggggcccgtcccagaaaggctgggaaggtggggttcccgctggcggcagcggggcacgagcgctcggcagcggggcacgagagtttggccagcagggccccaggggcgtccggctgggagcgtcctgccaggaccccaccgcgaccggatcgcgtccgggcgtgaccgtggtcctgccccagtacacgctgtactggggagacaaggggaccccggcctcgtccaagcagaaaacgcacgtgtcctaaagagctctgaaacattcacaagacagagttatttgtagggaggtgaaactatgagagaggcactcaagtctcaaaacgcaattggcgttggccctcggggtccaggaattttgacgcagtgcttgctgcttgcaagaactccctctcttgtttgctccaagggtttcatgatgatctcagaaaaaaagggcagtattgtagcagcagc

SEQ ID NO: 50532 - DNA, 571 bp, Homo sapiens
tgaaatagacattattatctgcattttacagatgaagaaactgaggcctggaaaagttgagaaactaaggccacagagctaggtttcagtcctgatgaacctggctgaagcagaggacacaaattaccagtcaattccagagtgtttctgccacccaggcaactcattaaccagtggaggcttctgtttatctactagaaaaggagtttttatggctatttcctactgataagatagtttcagggaagtaaatgtttgagaaaacatcgcccagcccattctgtagctaaatagctatagagaaatcctgtattgcatttacacagagccgacagaagacctctgtgtaaatttcctgggtttctgtgctgaagtatttttgtctatgagtcttgctttcctaacaacggcaaaatgttatgtttctatggctacatcagaattgttcttaaataggggtttgagaaaacaaaactaggaaggcttgggcaagatacgaaggtaggaagatgactgacgtttcctctgccttttcacacctgtgtatccattggcctcagaaggcccttga

SEQ ID NO: 50533 - DNA, 1483 bp, Homo sapiens
caggctgtaatctcacagggaatttagtaccctttacctaagacaagacctgggcacttgggaagcctccccgagtgcggtttggggagggggagggcatcttaaattccagtcctcggtcactcttgtggctttgccaagggattttcaaatcccgggaatgccagggatggagatgaacaggctgaaatcccccacgctgccagggttagggaggggaaaacaacagtccacagcggccgcgaaggtttgtatttttttttttttggtaacaaggggcttgtgtgcagtccaatatcaccatcgccgtgaagtcacagtggcaagatgaaaatgtttaaaaaaattttaaaaaggaataaggaaagaggaagaggacagcgtgccccggctcagaaaacggtcctcctctgccccggacgccggcggacctgtggggtatgaccgaatctccccgcgcagccggcaagccccggccctcagtcgggccgcgaccagcgtgacgccgcggtagggggatccggcgggcgcgcggccgtcttcaaagccccggcgccgccgccgcccccgcgcgcgcgcgcgagtagtacggtccgagggggcggcttctggggcgcggctccggcggcagctgatgcgcgccccgccggccgggaggcgggagtccgcgagccgggagcgggagcagcagaggtctagcagccgggcgccgcgggccgggggcctgaggaggccacaggacgggcgtcttcccggctagtggagcccggcgcggggcccgctgcggccgcaccgtgaggggaggaggccgaggaggacgcagcgccggctgccggcgggaggaagcgctccaccagggcccccgacggcactcgtttaaccacatccgcgcctctgctggaaacgcttgctggcgcctgtcaccggttccctccattttgaaagggaaaaaggctctccccacccattcccctgcccctaggagctggagccggaggagccgcgctcatggcgttcagcccgtggcagatcctgtcccccgtgcagtgggcgaaatggacgtggtctgcggtacgcggcggggccgccggcgaggacgaggctggcgggcccgagggcgaccccgaggaggaggattcgcaagccgagaccaaatccttgagtttcaggcaagtacacggcgtccccgctgagatgcagacgcgcttgcctccatccatctgcgactccctctgtgtgcgtgtgtgtggtcgccacccgcgaaaccgtcctcacggccgtgccgcgtccctgcccggagccgggtccccgtgtgcgtccgaaagttcaggatcttctgtcctcccgtggggtttctggcccccgtttcgctaggagagttccgcacccaacccagaatctgcagtctctccgcatccccgctggcctcggtcactttctctaagcttcgacccccagcccccgcccctccacactggagcaa

SEQ ID NO: 50534 - DNA, 1306 bp, Homo sapiens
agccccccttccccaaacacacacacctttatctacagattgttacctctctctgagaaagagaatcttaattagtgtagaagctctcacatcacccttggaacaactcgttaaacctctccagtttgatgtgttaattaaatgcctaggtatttcaaacacaaactgtagttctctggacttttccccagaatagaagaaaagagataaatgggatctgtgcacagatatttactgcctcaggcctgtgagggaatgccaagttgtttgttgacacaattttggtagtctcgatcagaatcagcaaactgtgactcatagaccaagccctgcctgtcctgtttttttgcatggccctgaacagaagaatgagttttacattttttgatggtttaatggtgatgtgtgaaaataatgtgaaatccaaatttcagggcccatcaatggtcacacgattatgtgaatttactaaaaaccattgcatcatatattttaaagggtggactgtatggtttgtgaattatatctcaataaagtagttcttaaaaaaaaacaaaacaaaatttcagggcccatcaagttatatatatatgaaatatatattttggtagatatggggtcttgctatgttgcccaggctgatcttgagctccagggctcaagtaagtgatcctcccacctcagcctcccaaaatgctgggatttcaggtttgaaccaccactgtcatccccataaataaagttattggaatacagccatactcattcattcatgtattgtctatggctgcttttgctctacaatagctgggttgagtacttggaacagagaccaaatgtctggcaaaagtctaacatatttactatcttgtacagaaaaaaaatgtcaacctacatctatacttattacaatttcagtaaaaatacagagtttaagtaatttgggaaaatggctttaagaatgaaaaggtgcaaggttatacctgctgaacaaatgaactgtgggcgtgaggtgccattagtctaggcctgcatgttcagggaaggcccaggggagagcctgatgtggcctggctatttgtcatatttgcaaaggggaagtgatgtaattggtctgcaatgaacttgattttcaattgactcaaagatctaaggaggaataaaaattatttaaaaaggaaattagggaagaatggggagaatattggaatcatttaatagaagtacaaacacatagacttttaacttttgcccattaaattttttttaacattttattttcttaaattttttttaaaaaaatagt

SEQ ID NO: 50535 - DNA, 711 bp, Homo sapiens
agaaaggctcccagaactttggctagcaactcagaggcccttctcttctcaccttatgagttcagagttctgttccagaaactgaagttgccagaaaggtgaccatgttcctatatcttcttagggagctggaactatgacaacttcagacactgaagggtgcatttggtcattcaggcaattaaaacacccacagcatcattaagtattaggtgtaaggataaatttagtttgtgatagtttaattgctaaatgaaggagttaaactggactggccttaattctccagtctggtgctacacttaattttaatgtagtttgaaggacatgtggagtcatcatacaaattatgatgaaatttgaaagaagattcctgagcaacttacctatctccagtgactcatgctgattcactaggactcagagttcaagctgctaactacgttttgcatctcttttccagtagcaggagttttaatgtgaatggacacaaaactggccaaaattttttgaaaaatatatccacagactggcattttctttctttctttttttgagagagggcctctctatggtcctccaggctaggcgggagtgcagtagcacagtcatcacttactgtagcctcaacctcctgagctcaaatgatcctcctacctcagcctcccaggtagctaggactacatgctcatggtgccatgcctggcacca

SEQ ID NO: 50536 - DNA, 1755 bp, Homo sapiens
tgcttgtctgtttcccattttttcccagagcaccctcatgctctgggggcaggaagggagtcttcgcatcacaccgaaaaagtcccaacgggcacggtgtaggcgcctgtggtcccagctactcgggaggctggggcagaaggatcgctggacccaggaggtcgaggctgcagtgagctatgactgcgccaccgcactccagcctgggcgacagagccagaccctgtcttgattaaaaaataaaataaaataaagaaattaaagtccttataaccctggttagagcgttcccgcccactggtctcttagggcacatttaggacaacctgaagaagccactcttcttgggaccctaacccttaccccaactcctcggtccccaaaggctaagggctcgggatccgaaggaggcccagctgaggtcgctgggtggggctctgggaggaggaaatggggttcttgagggagctcgcgctccagctcgcctcctcctgcgaggacgccccctgcccggacacctgctgcccgagcgagcgtcggggccgggcctccccgcggggcagtctcggcgcgcaggtcccacctgccaggcgcggaacgcgggcggcctcgggcgcagcctccgggcgccccgcccccgcctcccccgcgcggccccggcgcccggccgcaccccctcccagcccgcggcgccccggcacccctctccctccccggcgggctccgcggagcattgtactcacatccggggctgggttttgctttaatgcgaaacgtaattaacccggaaaaaagagccgagggacgggagagaaggagggggcactgggggagaccagagcgaggggagcgagaggcgcggagagtttggcaggcagacccagaaatccctggagcgcggcggacccggcggccggaggggcgaccccgcccgatgtaacgcgccccgcccgagccccggcccctgcacgggggggtaagttgggcgccctcgcgggctcgggagtggagaggcgcagaggggcgcgcgggggctggcggggctgggggtgcagggggcgccccggcggaggcctggcggcctaggggcgcgaggggcgcgcgcgcagggctgaatacgccggtcctagtggctgacaggcgaggggaggtggccgcagaccctggaggcctcctccaaccctctgggagagccccgagggcagcccctcctccaagtgccccgggtggccaaggtcgccgccgccaggggtcgggctgcggggggtggggccgcggagagggtgggggcgggagttctgctgagctgcattttctcacgtttgcagcagcgaaacttctctgcgggttctggcgctggggcaccgaccccgcaacgactgcccgggctgcgggaggggaggagagcagagaacgtccccaggcaagtcccttgggtacggattgggccatggagactcctctttcactcccccgactaccttattaaatgacaggcctagaaggctcccctagggactcctgtcctttcctctgggtgcagcctggacttcgggcttctggaactccagacagtgaaaaggactgccctaaaatgcaggttcggtgccaggttgggtgagccctcgaggggagctgtcgttctctctctcaccaacttcttcctcaccttacacgcttcccttttctcctccagtcctaaagacgatttcaccaaaatttttttaaaaagaaagagaaaagaagggtgtgggg

SEQ ID NO: 50537 - DNA, 2197 bp, Homo sapiens
gatctgtcaggaagttctttattgaggaaatgttcccgcggggactgtgaagagagctggggaaggaggacagggaagggaggaggccagacaagggtgtgaactcaggtggaggtctgagcaagggatggtttcactgtgggcctgcaggagcgctggggtgagtcatgcctcagccttgtctcagggagctgggctttcgtgtgcctgcaccgggcagtcactggctccagctctgcacatgtgggcagaatggcttccagcagcccagaggcagttctctgaagcagagctgtagatgcaggccatggaaggcacagccaaatggcaaaaagagatggagggaatttgggaagtcagtggcaacgtctgctagatggacatacggtgggggtgtgttggggatcagaacacagcgtgggccaggcgcagccttgaatgtctggcagaatttagaatcagtgtggttaagtaatgaatcaaggcttctcgtacaggcagtggtgactctaaactgatatagaacaaaaacccattagctaaaaaggacctgtataaatggaaagtctcagtattattgattatggacactgatttggctaatgcatttaaaaatcaatatactgacaatatcaagcaaacttttttttaaattatagtaaggatgttcagcatgagatctacccttttaacaaatttttaaatgcatgataccatattgttgactgtaggcacgatgtaatacagccagtctccctactctagaacttcttcatcttgcatgcaatcaaataattcttgaacagaaacaaatgctggcttgattttccttaaaatgttactacaatattatggcactagcgcttgtattttgatttcacattggttcccgtcatgatagaggagatgaaattccttagggccgccctactctagtacagcaatctgcagactaactatgttttagttgcagagaattgcttacatcccccactttctaaagtccacttggctaagtaattgcaagaccaaattatatggccctgaacaaagagtaaacagaagcgtgaaacacaatattgcactagattgctggtcttgtcaaatttactctgtcaaatgtgttttttcctctttttccaaaaaatacgtagttgcttttactttccaaaggccacgatatgactcatggatcatcaaataaccaaaaagattgcatggctcttagtactcctggggtgccaatgaaagccctttgcttttatttaatttttttaaataaactgaaagcagttctttccattgatggggtgaagagcgttagcagtgttggtaagaagatggatatttggtgcattttagtagaaagcatacaaagttatgggaggaggttataataacacataatgtataatggacaatactgttgtcttaaaggctacatgaaaattggtgtttttttaaaaaaacgtgaaattttcctaagcaaattttggctgaaagccaggaataatttttgcattgtatgcttcaacctgtcagaatgccaagaaccaggaaataatgttctttaaaaattgggcaatagatgcacgtggtgcagaatttggaatgtaggaatgcagagttagtgacaaatttctccctcccacttctgtcctctcagcaggggcagccagtcttgacagtttcttgtgtctgtctggagataatctctgcctgagagactatctcttaagatcatggtaactttcagatcttcagcaaattgtttgggcaaagtgtcttcaattcatggattttgtgtaattgatatcttaactatccatgtagacttgtgatttccaggagtcagtggaatatttgatgtgcttttgtctgtagtgtgttagagtaagaacgcagaatcctttggtaaaaaaaaaatcccaaaagaagattataagtgacaaatctgtacttttaccaaatgcaaattttgctaagggtaaaaatattattaaaaagtactttttttttttttttttagagacagggttcttactccgtctccgagactgaagtgtagtgtgcagtcagagctcactgctggatttgactgggcctggtcaaaacatgcttagaattaaaattatatgtgggctttttgagagcttaatgtagaattagaaactgcaattttgctttatgtgttttc

SEQ ID NO: 50538 - DNA, 3574 bp, Homo sapiens
gagccactgtgcctggccttcttaaatgtattaactcatttttacagctttcttatgaggtaggtgctattatccctattttacagaaggaaaaactaaggatcggtggttaaggaacttgttcacagtggagcttacacttttttttttttttttaagagatagggtcttgctgtgttgtgcagtggcatgaacacagcttaccgcagcctctatctcctgggctccagcagtcctgccaactcagccttccatggaggtgggactgcaagtgtgagcctccatacccagctaatttttaaaatttttgtagagatggggtcttgatatgttatccaggctggtctcaaactcctggcctcaagtgatcttcccaccttggccttccaaagtactgggattacaggcatgaaccagtatgcccagcctgagcacacacttttaccactgtactagaatatttctttataatagataaggcttgggggtaatgttaatgtcacaggtttctatcaggaatcctgaatcattatccaggaattatcatcactgtttcacaggtgaggaatgcaagttaaagaatggttgagtaacttgctcagtgttgccaggaaagtggcataaacagagctagaatcttggtcttctgtctcttggtgctgtttccacagccttcttaaaatgaaaactatgtgtctttcagaatctggcaatgggggcaggagctgttggagctttgcagctgacctacatctcgaaggtaatgttgacctggaactctgggaattcatgctctgtaagtcgatctggtttctaagcaaggggaagtgtccagtcctttgggcattagtatttagggacgttgcatggtgttgaaatgctcccctgaacccacacaatgcctgtggaggcttagctgctaatgggtggctgtagaggtatgtggttccaagttgttggagggtggacctacagcctcttactccttgaacacatcaatccataatgctcccagctcctgcgcaggaggtgttatgtggtggtggagctggggtaggggtagtacatgatccatgacctttttttgtaattgggacgaaagggaacacgaaaacaatcaccaaaaatccagcaactgtgaaggattctctcaaagggtacagtcaaacaaaaaatattggggcttcactggattttttaccagtcacctggacaggattactgtggagggaaggctaagaaggccctgagaagccactcagattaccaagaagacattcagcagccagataactgctgggggttggggcaggtggctgcgaggccacccccgtcccatttgtacagaaggggccggagcaggccctctcttgtgctgagagctggggtggggactggttaacggtgcccacatgtaactgctgaattcagcttctattagcagccgctccctggagcaggcaccactgctgacccgtgatgcagcggtgataaaaaggccgggagatttagagcctccccaggaagaggaactctttgtacagtgaggagagccaggtggcaccccgccagcactgaggtttcggaagtcctgtgctccccacacaccctcactgcaggcctcttgggagcctcttctgccctgcacatcccctttcatcctcaggggctggaggcctgggggcccctgagccaagggtctatcggctccatcttgtaacaagctttgggagtcttgtaccctggctggtcaggagatgaacctgaaggggactgggggactctggaggagaggccacccttggctggaggggcagcccgcccctgtgcctgtggtatgcaggcagagtctggcagacacagcccagtacaaaggcacaagatgcagggcagcgtcagggcggattaaagagggagagaatgacctcagggaaggaggaagggccttttcaagtccagccttgctagcacagctgccggcaatttgtgcatgccttgtggtgagaaatgtggctgcctccccgggccagagcagccagaggcccaggcctgcccgccctccctggcttgtcctcatcttgctgagagctcctgaggtcgtttctccaggagggtcggagatggagaattgagagcagaggagcagagaacctcgcagtaataaaggaaaactgaaaccctctcctgtgtgagagggtttgggaagccttttttttttatttttggttggggaagaatgaattcagtctcctgctgaatcatgatttataaatgcagctcagatgagggttttagagttctcagccttggaggctgcgtcatttagaaagggtgacctgccgtttagccccttcccgagaaaggcagggctggatgggcattttgcaaaacccacagctgccactgggtcgggttacacagagctcagagcctttaactcctgcctgactccctgccagaaagcaggggtttttcccagaatgacatttagcctcagaggcgctggactccagctcagcattccaggtcattatttgttaactcttaggtattccttcttggaggagagcgcttgccaccgtgtcaggtggcctggccagagggctgcgtgtgggctggctgttcagggtgtgtgcttctctgctgtctgctgagggccagtgatgggaagatgaggacgggcgtgtggccctggccctttggagagacagagatgaaagtgatgattggatgtcatccagagcatcaatggcaacagaaccagttcttagcaaactagaaaataattaaagctgcactttgacccctgcctccacccgccgactgcacagccaaccccgctgtcccacccccagctgtgtcccagttgtcagggccttgctttcagccacctctcagaaagaacttgtaggggctcatggatccttttttgagactgatgaaatgcatggatgccttctccaggtaaatgcataggtgtacagacacaccctgcttttgcctataatttcagggagcccattgacctcctgaagctggtccagagacccccatcccatgtaggtggctgctattcccctgatcctgatgccaccttgtggggcaaggtcacccccagataccagggcagaggccgcagcagagctaggagaccttgttttgctgccactgcttctgccagaggggccccagctcctcttccggccatgggcagacagggtggggctggccctagccgtgcctggccgctgacgagcttgcagctcctgtggtctgtgtttgatctgataagcgcaagttcctgagagtctgttgagctgtggagcagccctgtctgcgtcactctacgggggacctgtgcccactccctgctcacatccctgacctctgctcgctgctggggtgttcacaggacccaccagtcaaccactgctgggtagcgcctctgctgtggccacctcggctgtgtggatggctgcactttggtggcctcactggagtcagacggtcgggtgacctcacccgcctgcagccacgcctcttcatgagaggaggtgaagccaccacgtctcca

SEQ ID NO: 50539 - DNA, 4502 bp, Homo sapiens
cctgtttctataaggattctacttctgccatggtttcatctcttcagtaggcaaacaacaagattctgggggcaaaatttaagccaaagtattctcagtcctctttgcatttcccaaatgccttttcttgtttgatcaaaaagagatgttaaaaaatggcgtgattctgcaacggtaagaatattgattgcttttttaaaagatgccttgtaggcagagacaagtcatttactccatttatgccttactcagtactggcaccgaatcgaccgactaatactctccttgggctaaagggcgcagggcaaagaaagcacaaccttacgcccttcttccagaggctatatgatgttactcctacccagttttcctctttggggatctcaaagcctctgtcactgacacacaagagttttctctgcacgggctgtgagaaacctggttcatgatatttgcctccggaacgacctcagagaggcagggtctgaaaaaatgcagcgtccccccaaccctgccttcccttaacacccatatattcctggcacaccctccacgtccacccgcctcgaccactggtagcttacaggtaagagcagaggatgaccggagagtgggggtcgccatattcccagctcgcagcacccccggggccctccggctgggcggcgccagcggatgtgagctcaggctcagcggtcgcattttgcgagtggctccgagacacacaatgcagcagaagtaaattccccagcagcaaagccgcctggccgcacagaagtaagtaactaaccgggcaaccacctagcaccatcttcccgggcacaggagcggagacccggcctcaaccacaaccccaggccagcagcacagacccaagaactgcgtggtcaggcctttccgcgtagccccgcccgcgtagccccgccaaacagccaatggacgcgcagctcgacgctccgcgcacctccgccaaccaactagaaaaggtcgagcagacgggcggggctactccgccctctgcttctgcttctcgattcctcttctgggtctcatgctcctccttcttttgcgccgaatgcgttctccaatcggatccgtcgacccccctaggtgggcgtgcccggcagccgacggggcggggcggatatgactggcgggccgactagtgctggttgccaccgccggtttagaaatcctattctcgcgccggggactggatttttccctacgtcagcgcagctaggcgatgtcgggagcgagctcggaccgagggctcagttgcgtcagtgccgcgcgcgtgctcgtcgggcgcgcgtgctcgtcgggcgcgcgcgcttcccggccagacttggggccccggcagggttggaaaatgatggaagaggcggaggtggaggcgaccgagtgctgagaggaacctgcggaatcggccgagatggggtctggcgcgcgctttccctcggggacccttcgtgtccggtggttgctgttgcttggcctggtgggcccagtcctcggtgcggcgcggccaggtgggtgtccgcgccccgggtcggttgggacggctgcttcctagggacggggcgctcggagtgaacctgtggtgcctgggagtggaggggcccggcctggggatcggacccggggtcggggggcgcggccgctccaggtgtgtgcggaccggggtcgcacccgaggcgcggggtttggcgccccaagcccttcttggcccgggtcctctgcccggcaccgcttcctccgtgtcctgttcgatggagccgttcccagcgtccccccatccctcgccgcctcgcgcgaccccgggtcccccagacgccccgaaacccgctctggggcgggcgctgacctcggcgggccggagccctgcaggctgggcgcgcccgcgggcgttcagtcctccaaacgcctgcagggagggagctggctctcgctcgtggagttaatgtcgcttggaaagagactgagagatgaaacttttgctgcaggttataatttgaaattttgacgttcatggtatccttgggtcaacacagctaaatttaatggtggaataaaggtgggtgggaggacgctcatttctcttgggtcatttttgtagtaagaatattttgtaaacgatgtgctacctttctatagccaaaccattcttaaaaaatctgtgtttttattgggttcgtactgtgttaaatccggacagataatccctgctcttttgaactcacaggattattgtaggaattaaatcatttgtgtgaaatcgtttttgaattgtgaaactgcccttgactatgtaagatacttgtattggagatgcccaaacatagtggaagcagattgtcagcacgctggcgtctttctggaaacaagttgtttattttggattttgtatgatataattgtttgcatggctgtattttctctatcagcgacagaggatgatggagaatgggagtttttactaaatcattgattgaaagttattcaaaggtgatgatagaagatttcaacgcaggactgttgaccttcaggaaactaattacttgtttttcttatctttggctgctttatttgaaattaagtaaatttgccccagtgtggaaatgttgaaactctgacaatgttttgaatgggaagttgccaaatttcttctggttaaaactacttttccggtggtattctagatggttaacactcaccgatgtttaaggtgaagacgattatacatccggagttttattaatctgtgatttttttttgtgtttgtaaatgtaaataagactgtatttttaaatgttaatataaattgtcagtcattaccgacctgcattaggtgagtggaatatcctgatggtctttaactgtggttttggccagctcctcacttcggcatgtgtatgccccttcaaagtttagccaccgtttatggaactcctataaacaccacacagttgattgtagaggggcagaaggtgaccaaatatgctaagcgcatctgagagatgttggggaagatttttagagaaaataatatttgaactgggctacatcggtgatttttcaagtagaatagtagatacattctaagcagaggaaagtttttgcaagagtatggtggggcggggggcgtatgaaagaacatgactttttaggaaatgataaaaatgtcaatatgtcttcatgcagactataaaagggagggatggaagatcaaactaaggtaggttgttaccagttgggaagagtcttctatgctgaactaaggggtttggacttcaccccgtaggaagttctttgggcagtggaggttttaagtaggggtgcgacctaatctcattttctgttaagaaaacgggcaacacggtggaggatagaatctaggagggagagactagaggctgggacaccggttaagaggcttttgtaatagtgtgcagtgagtcaactcttgtttctctcggggaacgttcatacaaaatcagctgaccacatttttgcagtataaggtgtttaaaacgtgcactgaaacattttccaggatcgaaagaggaatttgaggtaccaggcacacgtcagttacattaggagttaattaggttttataggatttttactaccttttataacattgtctcaatgaggaaatgcagtataatttccaaacagctaactttcagtaaactttttttttttttttaaactgacaaaggtaactgtgtcattgtaaaaaataagcggaatcaggtatgaaacctcttctgattttctaaggtagtaattatgaggaacagatttagaatttttttttaaacaaagactggcattctaaagaaaatgactttgaaagcttactcatggtgagtcactgtaaaatcatttgtgtagtaagaacttaggtccatactaatctcgttttcagatgccagcaaaatatttgaatttgatatgtttgtgtttgtgccgataggagaatgtagccttttacatttaagaatgatttggttttcaaccttttaagtaaaaaagaaagcatatataattaaaatatgtacaaacctagttcctggtttccaagacagttttcaaaaagcacttgaagctttaacttaccaaatttatatttgctctttgtaaaaaatctgggtttataatagaatttattatggaatcccccaaaagatgcaagctctaagtaactggaagctttttcttgggaatatccgcaagctcaaacatatgacatagcctcatatttctttttcctttttggtatgtaacatatactggaggcttggagtcatgccatccttttgagtcagcgctatggaactgcctcataaatgaatgcagtccttttgtatctcagtagctaatccctcacagtctttttttttttgagatggagtcttgctgtgtcgcccaggctggagtgcagtggcacgatctcggcccactgcaaccttcacctcccgagttcaagcaat

SEQ ID NO: 50540 - DNA, 2214 bp, Homo sapiens
aagtgctgggattacaagcgtaagccaccacgcccggcctgcctgcgcaagttctatggccattgtctaattaaatatatgtaatttataaatatatatttatgtagtatatatatttaaatatatatttaagtgtgtgtgtgtgtgtgttttttttttttttttggagacagggtctctggagagcagtggcttgatcatagctcactgcagccttaaactcctcccaccccagcctcctgagtagctgggactacaggtgtgcaccaccatgcccagcttattttttgtagagacagggtctcattatgttgcccaggtggccttgaattcctgggctcaagtgatcctcttgccttagcttcccaaagcattgggattacattattaaatatattcctacagaaaacattattgcatgtataccatgtagcaggcgctgtgcttaccacataaagatcaacagtacaaaataaaaaacaattacaagcctctgtttaaactgcagtcttctttgtttatcaaataattattttatactgctttgacatttttacttgatgtctaataggctcaaactcctgtgatccctcctaaagttgtcctaaaatgtgatctacccatagtcttccccatgtgaattaatggtaactccttccttctagtatcccaggacaacaacctgggagtcattcttgatttctcttttttctcactcttcatcttaatggctgttcctttaaaacaaaagcaatccaaccacttcttacagctcccactgtttcattttggtccatcatcatctgtttggtggatttctctaagagccttctttgtagtcttcctcttaatagaacaagtatggtgatcctattaaaacattagtcaaatcacattactcctgcacttttcatggtcttccccttccaacttccccattccacttagagtagaaagccacattcctacaatggcctattcctgtctttgctgactgtatctctcatgactcatttcctcactgactcagtctgccaggaaagcttctaccccagagtttttgcatttgctattccttctttctatagtgttttcctcccagatacacagttttgattgaactgtcacatatttgaggtgcctgtcctgactgcccttttaaaatcacaagcatcccttcctctgcagagctcatcacacccacaccccgtcgccttttttccccatagcacttattaccttataatatgctatctaatttattatataagtaaatcactgaatcataatcataacctttacatgggcagggatttttgtctgctatgttcacagtttcatcccttgcaccaagaagaatgccttgtacataatagatattcagtaaatatttgttgagtgagtggttgattgatattgcacaaaaggactcctccccacaatattcttagtagcaagaaaaagaataaggaagacaagtctttctgttattgacaaaagccttgtgctaaatgttttctttccgtgagtcagaattttgtctttgcctattcttttgtctcaaaccattgatagtttatgttctttcttttttctttctctgccagtcttttaaaatccttccacgtcctacatctagatactttttttgttttttttggtcaaacagcagttaacagtaccaaaatgttctaggcagactgcattccaatccaagaggcaggagtcagtactatcaacttttctagagaccagttagcaaagaagagtttaacatgactactcagggcaaaaaatatgtttcttagagttccttggatatacaaaagaccaagctatagatagggctgcttcttcattaactagaatgcaacatagctttcactcctgctgctacttctggtaccattgctcaaactgatgaaaagagattcagggtaccaaattcccttgaaaaaatacaaatatatgtaagatataaattttattgtatttaagatgtacaacatgttttgatgtaaatataggtggtgaaatggttagtcaagcagattaacacatccatcattccacattgttgcccattttttgtgtgtgtggcaaagagcacctataatctcttttagcaaaaatcttgaatgtaatacaatattattatctatagtcctcatgctgtacctgagatctctagacttgtttgtcttacatatctgc

SEQ ID NO: 50541 - DNA, 713 bp, Homo sapiens
tgtcatttaaaatattcacattttgtgggttaaagtcatgacttaacattttcaaagtgagtaatcactgtgacatagatctttttcttaatgtttattataggggttccagaaactttagcagttgcagtgcagaggactttgagaagttaactttaaataaaggaggaaactgccttcttaatattccaaagcctgatgaagcctatagtgctccctcctgtggtaataagttggtggacgctggggaagagtgtgactgtggtactccaaaggtcagtttaatttttgacttttgccttgtaaaattgccatgatatttgcaagaaataaaatggcttgctttgggcaactctgacataggagctaaagtaaaatttagtggcacagtgaggattgttattttgtttgtatggctgtgttccagggattggtcatctccttcttctcagagtatgactaacggtgccatctgttttgaagtcagggaatgtgccatgtttattctctacttttttaatgctattttctatgatttatggttattagcttatttgctttaaagaatgaatttcacctggctctttatttgtaagctttcaccattctggcactgccattgcaggaatatttatttagctggactcattttaaaaatgaattggagctggcctgtcctccagcgtccttcagtattcaaagttcttgctact

SEQ ID NO: 50542 - DNA, 855 bp, Homo sapiens
ccagtcttctgaccttgagccagtgcttgttaaaaactccactctatacatctaacccaattcaggaatatcctgcctagttccaaaggaagaaaagaccaaattgctcttattgggattaaatgcgtacactgagctgaggaaaaacagtattacaaatgagctaaacatgacgtagatccacagttgtagaattcccctctttgttctttcctctttcataactacggaaacagatgagaaacatttacggcatcaggttcttgtgatgctccctgcctgatatgctatggttttgttaatggaatgtccattcctgagcttatgcagaaaaaagtcccttgggaaagtggttttactgtgttatgttcattttccccatagttctcaaaatgtacttccttgtttcagttttaattttctttcattggtgtgaccattttcaactgctccctttctgggaagaggtagcagacggacattttcatcaaaatctgccccaggttgcttcacagataaggagggacccagccactaaaatcaccaggcagagtgttgcaagagtagatagagaatcacaattggctgccctgctcaaggggacaccagatcttactttcgtttagttgaaaggcaagcgtcagagtcgggaggctgtaccttcatgtccagtggcctcacagaagttccttcagtatctcttttagatgaaactcttttagaagttccttcagtatctcttttggtttctcactatagatagttacttgaacatgtctgaagaaaacgtggtcaagacagtgaataaaaaaaattctggttttgggaagcagtctgacttagtttcaaatattc

SEQ ID NO: 50543 - DNA, 725 bp, Homo sapiens
tcagagcccatgtctgagaccctaatgaaactttctatttatacatctggattgttcttttgtctaaagatggggaagggcttgatttactgtccaaggcacagaggaacagaggaacggcgtggtctatattttctgctctgacctttggtttaactatccttatttgctatctgtatgtcaaaatcattccttgtggggcctccccacacacagcttttatgacaacatgctgaaatggggttgtttatagcattccccaccttttgtttccttttatcacttttctcaaaccttcttgtgtgtttacactctactccttactgtccacctgccagggtctgtgtcacctgtgaaagcaatctccactcccgtctgcacgctaaaatcaatgtgagcatggctttgttccgttttacgtatgaccagtgagaccagttccgattctcctgccctcagatgtggacatctgaccttatcacctttgaacacccatgccacagtgaactttgcagggctagcgggtgacttaagcagggccagtgtgtgacctgaacagggccattatactcctctctgattttggatatctgggtgctgaaagaggttcaggaaaatgtagatttgaagttgattatagaaagaacatgtgattgaaaccagctctattcaactggacatttcagctgcctaaaccaatagattaatttttttttttttttttt

SEQ ID NO: 50544 - DNA, 2000 bp, Homo sapiens
agaaatggaaagcctatctaaaatgatttcttaccaatctcagcagtgccaactatcacaagaatcagttatatgagactctaatcactcagggggtatgtcatacaattccaccaacgacaaagtgggggcacacctacaggtcttcctagtgatttttcctctgcaaaccccgttcaggcacattattgatccattaattcatatttactgggcacccgctatgcacagagctaattactcaggaaatatatttatagcataaatctcaacccttcaagctgggaagaattatgcattaattcattaattcattcatgcatgcatccaaggatttaacaaatatttaatgaacatccactaagtgccagacactctacttaggaatgggatgtgaaaataaataagacaaaattcacggagctgtctagagtttgatcccacagccaacacaacacatttacccctctgcacctgtgagtctttcctggtagggtggcatatgtgatggagcaggcagcaggtcaaagtagttgggggtgaaagaaacagtaccttggtacgcaggtggtgcccataaggtagtggcttttgtccccagggagaggtgaaaagaggacacaggttagaaggtcgctctttgcggtgcaggtggcacagacatcaatcaatgaaattgacctttggattttagagacatgctccttgaataaacaaacatttcatcaactctgggaaaacttgtttcagaagcctgttgagcaatagttaacaaagggcatccggtgtgctactcgtttgcattttgctgcatgagtacggtttctgccttgctccccccacccttcttgtggaccgtctgaaactaaatgtgcatgtctggaagttaatgccgtattgtgctgctggctctgtctgcctcagctaatggagtgtagagagctatggttgtttgcaacttctgtcctccccttaggggttccagtcagtaattccagccagttctgataaacaaaggacaaaaagaactggcacagagtttggaaattgcctgctcggtgccagttccagcctgccacaggccagtgcccagagagtgacagtgcagctgtaggtagaccacattggggtgagccgtcatcgtcaagcatggtgttagatgaacaagtgtaccctggagtagaatgagggacctctcagagaggaaaggggcctcgagaggtcacctggcgaggagctggatgagccacatggctgggagtattctccaaggacacttatcagctgtggagaggaaactccgtcctttgcttctgtccttcttacttattgcagattggttagtttgtttattttccaaaagaagacctcaagataaggcttgcatgcaggtagtttatttgtgaaatagtccctggaagcataaataagacagtgatggcaatgattcagggcaggagaaaagccatgaaagggagtattattgtgtgggttgagctctgcaggcccctgggtttcaatcccagtgtagaccctccaggaaacctgaaggaagaagcacacctctgaattgtcccagcagagggtgtggaggctgccttatttaacctggcaattctcatccccattaattggggatttctccctagggcgttagccccctcactatacacttttgggctgtaccactaggtagaaagcgagttcctgaagaaaatggtactgaagaaaacctcaggcagaggaggaaaagaaatgtaggtgcttggggtgagaagttctcaaacttctggaaactgcctacatggtcacaggtgaatgtgaaggtgggttgtggaatatggaggtggggtgccaatagggtctactactgcccacagaagaaaactgtagcacacacacaattttcacttaggcatgaaaaagaagacacctagcaaaaaaagtgttctttgtatgaaataagaagctaagatctgggatattgtggtatgaataaa

SEQ ID NO: 50545 - DNA, 1370 bp, Homo sapiens
aaatttttcttacaattctgcaagctgcctcaagtcttgtgcagaataaggcacaaaataaacactagtacttaccatcatatgcagatggcaaaacataaaatatattacgtgactggagatgtgcaccctgcaaacccagtgctactacaaacaactggtgggtgatgaaatttcttgcgaagttatcaaccctcagtctctagggcaacgaacaagtagaggggtgtcatggcaccactcataagaaatcacttcacaggacagaaatattttgaccactttgtcacttagattttaacattaaggaagaaatcagaatcacagcccccaactccagaagtgagtctaccaggaactgtaacaggtcattagacagtgtttagtcctgggtgtattttcttcaaagtttctgtggtaaacagtgtccaaaacaaacaccaacggatcctgcgtctaaaggcacttgtctaccaaacacttccttttagaaagtactaatcagtgactcagcctggtgactcctcaccctaaagtccctttggcttcaggaagggccggttctatgacatcagttcagagacttgtaatttttattcccaaacatcagtacaggcacttaaaaggagaaaataaatatcaggtatcttcctcagtactcccaaatagacaaacgtccattctgtcgagattcccttttttgagaacacatcagtgtgttgctttaagaggtgtagctgcagtaaagtaatgcattttcagctgagaaagggaaaagtgaagaagagtaaaggatgttagattatccttccctctccacaattccagatggtactgcttttggcagcggatgtggcaaatcatgtgacatagagctcattccttctttttctgcattagcctttgtaagatgctctttgtgtgtgtgcattgtgtggagatgtgggcttcaggagcagggatgggaaacagagcagcagagaatggcctaaggtcaagagttttgagtttttgagacagattactctgggcttagatctcaccatgctctaatactcagttatcttatctggagacagaatatgattctactaatttttcagatattgacattgagaacaatatatatctactatactgcttaactcatagagaaaataaatgaaataaaatgaaagaaatgctatgtaaaatgactaacgtatattaagtagtcaatacatgaaaacaccactattattattattattatcatgatcagtagcatagtagtggcagcacagcttatgtggactggctgagccaaagtatggttcaggagatggctctagatgggctgtctagatgcaggcagtgtgtgccttctccat

SEQ ID NO: 50546 - DNA, 1159 bp, Homo sapiens
tgttgagtgcatgatattgtaaatcgtggatgacttatacagtattttcttaatttgatgacatacacacttagcaattacgtggagttattctaatatgatgaaaaggctgggattcactttccttgaaaatgacaagtggccataggaggatgctcccatgaagacctggccccatagttcaggtgagtgggaagatgcatacacgtaccacgcttgtatgtccaaacaacagaagaggaaaaagccacctccctaacttccaatgacatgatttatagaagccacctgaaacttgacacgagtatgtctggaatagtggcaccaaggctccagcagaacaataaagtgcttgcctctcttaagcaagctgaatccaaaagtcccagagagggaaatacaggatttcccctggctgtcagcacagtgagtcagcgtctcctgcactaaacaatggatgaatacacagccacttagagacctttcatctttatccttttttagcaaagcatgtgccttcttttcataggtaggatcactgacgcctcacgctctgccccctcttcaccatcatctgttaaacaggaaatctgcaacactcttttcagtaaacgggaggggtctgctgtcaaccaaaatgaaggcaaaaagttttaactcaggccagtctttctgaagctgggtaaaatgataaggaaatggaaagtaacacctggaagaactggtgatctgctccaaaggcagacataattccttatgagtgaactaaattttatctggaggccatgccctggattgcttaaatgcctgtttacacaggacattttagacatggttactcaaataaaatataaacctaaaacctggaaattcacctctttaaaagaaatgcatggaccatagttttcacatgaattcttctatttttaaacccagcatacaaaagaggagaaaattatattttaaaattcatacttctatggactcaatgccatcattcatcactactcaacaacagccgtgaaaacctaccaatccaagcagtgtcagcccaatgtcatgtactctacactattctcatcaacatacagagaggaggagaataagtttaagtcagggtatctaccttaaatgaatgacagatgttaagtctcacttt

SEQ ID NO: 50547 - DNA, 780 bp, Homo sapiens
tcagcctcttgagtagctgggattacaggtgggcaccaccaagcccggctgatttttaatttttggtagagacggcatttcaccatgttgctcaggctggtctcaaactcctgacctcatgatccatctgcctcggcctcccaaagtgctgggattacaggcgtgagccaccacgtgtatgtctcactttctatgttacaacatggcactcttcttttctaggaaaagctgaaaaacttgagtataatccacacagggacctaataaatgctcctgaacaccagtcaagggcatcatccctaggtctgttggttaggaattgtacttgtctgctagtgtcaaaaaccccgaactcaatggcttaagcaacatagggtttgtttatttttctcatgggagattggtagtcaagtgctggtatggaggcttcacaatttcgtcacaaagtgagtattgctttagttttgtactttccctccttagagtatgacctttatcctcactctcaaaaggacctcaagagccatcatgcaaggaaaaaagggaacatagaaacacttcattatctagttcatgacgtactggaaaaaagtatgtcagctgcattcatcctatttatttatttatttgagacagggtcccgctctgttgcccaggctggagtgcgatggcacgatcatgcctccctgcagccttgagttcccgggttcaagtgatcctcccacctcagtctccgcaatagctgggccttcaggcggggggaggggggtgcgatgagta

SEQ ID NO: 50548 - DNA, 5220 bp, Homo sapiens
ttgcatggtttggttaggttggttttgtttggttttctgtttcatttccaatgcctcaaaaagttctggctaataacacacctttaataaatattgattaaataaatgagtggataaacgagtaagtgaatgaatgaattaaaatataaggagagtctctaacttaatttcctagtgaggtaccttccccacggtgtctccctttgcgcattttctagatcttacttgactagataaaaagaaaaacgaaaagacctgtcctgctttcttaaaggactagaaagcggaccaggcgtaagatccacaaagagaatctccaggaccctttgaagctcacatttagcatatgacaactccataggtcagtgaggacactggctggcttgaatattgtggaagacaggaagaacacatttatatgcttccaaagaagttattgctctatgtctgggtaatgccaaaataaatttgaaaacaaaagatcacctcgttcattttgggcactgtgcacgtaaaacacttgattaacttttcctgctggcttttttgatagctattgttgtggatgtatacacaagcctaaggagatagcctctactattcatattattactacacccaaattacaatggtcttcagtgacacttagcacttgtacacaatctctgaaaagtcaccgtttcaagctgtgtcatgtcagcgttttgtatgtaaaatcccatcctagaattgatcacaccccaaattattatccttgattgctcagctttctctcagtagctctggagttgcccctgatatggatgtccaaagggcactgatgtggactgccaaatgtttgcagtgcactttaattacttctctgcgaacgaaagctttcctgtagttagcagaaccccttgttctaactgtcgtttgggaagatttgagagtctaagcaacctcgtttatgtcttatctttgcattttcctgtattcagctattttcttaaaggaaggcccaggtctgtattatcctactgccacataggaagtaaaatgagtactcacagccttgcgcctaatcactgaacacagcttttagtaatgttttacacaagaacaggatattggcaactcaactgttaagcctttctgtgattattcttccttgagatcactctgatgtcaccagtgtaatttgagcctggagcttttgttcacactttaaatagcagtcccagaatgatttcactacagactctctggaaagcctgggagctgaattccggaagatccccacatcgatgaaagcaaagcgaagccaccaagccgtcatcatgtccacgtcgctacgagtcagcccatccatccatggctaccacttcgacacagcctctcgtaagaaagccgtgggcaacatctttgaaaacacagaccaagaatcactagaaaggctcttcagaaactctggagacaagaaagcagaggagagagccaagatcatttttgccatagatcaagatgtggaggagaaaacgcgtgccctgatggccttgaagaagaggacaaaagacaagcttttccagtttctgaaactgcggaaatattccatcaaagttcactgaagagaagaggatggataaggacgttatccaagaatggacattcaaagaccaagtgagtttgtgagattctaacagatgcagcattttgctgctaccttacaagcttctcttctgtcaggactccagaggctggaaagggaccgggactggaaagggaccaggactgaacagactggttacaaagactccaaacaatttcatgccctgtgctgttacagaggagaacaaaatgctttcagcaaggatttgaaaactcttccgtccctgcaggaaaggattgatgctgatagaagagcctggacagatgtaatgagaactaaagaaaacagatggctggagatgacatttatccagggtcactttgtcaggccctaggacttaaatcgaagttgaacttttttttttttttttaaccaaatagataggggaagggaggagggagagggaggacagggagagaaaataccatgcataaattgtttactgaatttttatatctgagtgttcaaaatatttccaagcctgagtattgtctattggtatagatttttagaaatcaataattgattatttatttgcacttattacaatgcctgaaaaagtgcaccacatggatgttaagtagaaattcaagaaagtaagatgtcttcagcaactcagtaaaaccttacgccaccttttggtttgtaaaaggttttttatacatttcaaacaggttgcacaaaagttaaaataatggggtcttttataaatccaaagtactgtgaaaacattttacatattttttaaatcttctgactaatgctaaaacgtaatctaattaaatttcatacagttactgcagtaagcattaggaagtgaatatgatatacaaaatagtttataaagactctatagtttctataatttattttactggcaaatgtcatgcaacaataataaattattgtaaactttgtggcttttggtctgtgatgcttggtctcaaaggaaaaaataagatggtaaatgttgatatttacaaacttttctaaagatgtgtctctaacaataaaagttaattttagagtagttttatattaattaccaaactttttcaaaacaaattcttacgtcaaatatctgggaagtttctctgtcccaatcttaaaatataaaatatagatatagaagttcatagattgactccttggcatttctatttatgtatccattaaggatgagttttaaaaggctttctcttcatacttttgaaaaatttcttctatgattacagtagctatgtacatgtgtacatctatttttcccaagcaatatgttttgggtttagagtctgagtgatgaccaagattctgtgtgttactactgtttgtttaataggaacaaatatagaaataatattatctctttgcttatttcccgttaaaactataataaaatgtttctaggacagcatacgtaaatgcctgctatgctttcctaacaaaaatgaaatttttccacaagttaagcattttagaaacacctaaagtgtttttcaaaatgctgatcacagtaagtcaaaacaagtgaattacctcacatctgctgggagggttacaagtcaggattataaatactatgtttttaaaaagaaaatcaaatggcaaattctattttcaaatagtaatttactcgttcactgaagataatgcaaagcactttattaaaaatgagttctttccaagagagcattccggaagataacacattaatatgcaaaattgtgtgtgtgtgtgtgtgtgtgtgtgtgtgtgcatttttctaagaggaatattgataattttcacgagatttgtagagacagctataactccaaaaaaagttataaacagaaaaagggtttgcggagtagcaggagaattggaggaagcctaacccaggctggggacatactagacaattccatagaaattttccctgtttcattttcactgtgctgtgttacgggagtatgaaagagaaggctgtaaagaggccctcggctccataaccctactttcccatccttatgaactgagctttcttaatgttcactgcgtgtgctagaaataacttccttctcctgatagggcccatcagtgaaaatctttattttctattcaaaaattgaagcacacttggatgctaaatgtagttcaagagttaagtgtattatacatactcataactatttactctgccactgttgttttcaatagggtacaaagtatatcttctcctcttttcacattagcatgtattaagttgttttcttgcagtatattacgttattttctgatttcaaggctgtaacatgggagacaaattaaaaagcaatttggatgcactccacaatggtatggagaataataacacatccagtagattatcacaaacgtgtcatctttaccattcatggagaacaaaagttggaatcaatttaattgcataaggatgatttttagcttcataatacattcattacttaatgtgaggtgaaaataaacatcagtagaacagggaggattggttcagtttagaaatttatggcacaaggataaacaaatatatctcaggacatctcactgtaattgaagaaatgaaagcagcaaagattaaatagctcgttaatcatatttgtatcatgagatcacagtaataactttcactgagtgtttactctcagtcagacaattttctaagtgttttttttgtgtattactaatacatcacttaattagtgccatgacataaatgctaagggcatgtgcgtgtgtaatatagtaataaaactgaagcacagagaggtgcagtaacttggtcaatgacacgcagctaataactccagaaatcaaatccaggaactctggccttcattcccagccactagactataccggttctttaggagaaaccaagcttctctttttcttttaagtaacgatacttctatgttagtcagtcatgaagacaggaaggcctggcctctgaagcatcacttttatctgacctgggtatgtttgtctatttatttgttacacgtgctacatggggaaagcgtcttagtttaatagttttaattgtatcaaggatgtgcttagatacaggctttcaagcctgcagttaaaataacacttgtattagcatcctggaacacaaggccacacgtaagctttgggtcttagtttgttcattgaaggaactcagaaaccatggattcaatattttattcactcagttcatcccctggcccacagcaaagggggatttgtccagcagataggattttctgagaaaggggtccagggtgtatggttgactatatttttctcatcatcggagggtaaccagggtacgcaattgacattcccttagaaagtttcatctgctagtaaactaataatgaagccatggcctgaggattgcatgttttttcagagtatttagttgacctttctatactccacatgagggtttctcagaacagcctgtatggattcccagcagaacagatgtggggggcagggcagcatttgtatcttacccattcaacaaaaatacagtaagcacccatatgtgggagcctccatgg

SEQ ID NO: 50549 - DNA, 1587 bp, Homo sapiens
taatagagaaacattaaaagtaacatttactgtctagctactgtgtattgggtcctaggaaaagatacggttaatagcttgaaaaataatccaccatctagcagttgaacttggtcagattctgcagaactctgtagcttcacactgaatgaaaagctatagaggacctttgcagttcaataacagtgggcagcaatgtggcagctgaagataaaacagaagtaaaagattatgaagaaaagcattgtgaggcccgattgtggaaacagcaaactaatatattgcccaattaaatatttaagaaattgtgactacacctgatccttataatgagtcttattatttaacaagtattataaataaatggttataagctctttttttttgtcttgaaaaactcttctgcaaacagtttccagatattttaagtgattatcatgggtaatgcaaatgtgttctatttcaatgtctatacacattgacagtggatatggttcagcaaagtactggcaaaactatgttacagagctttggaaataagcatcctgtgccagtaagatttagcagtgttgttgtcgttgttgttgtttaaattaaaagtggatgagtaatcagaagacttttagtgtagctgctttctcccctctgtactccttacacacaagcatgcacacacacatacacacacatgtgcacacagacacatgcacacacatgtgcacgcacacagtacagacacataatcctactagaagcatatcagcttttttccctgagcttttgtttcctcatctgtggacaatagcatcgtgttgagcaaacaaccccagactgagcctggaattctggggtttttcccgaccctgccttagacaaattccttttttatctctgggtttcatctgtaagaaaaaaaacagctagaccagacggatgatgtctgtgacctttatcagctcttatattctacatcaatgggaaatagcaactgtgccaccttacgtgataggatttttttctggaccagttggtattccatatatgataagaatttctcttaagtatgataaaggcctagtttaaaagttttcatctttagccaatggttgctgaaggcacaatgtgaggaaaatcagtttttgtatgtatatctctgctttttaatagcctgcctccgttctggttggttggtgcctgtgccagggctggctggctggcaatattttgactatctcttccatagccaagcaatgacagagtcactgagacaatctccactgttggtgagaattgcattcatatgtaaagttttcaaaatagagattcttggtcccaaactctccaggcattgtttttaggactaggtatttgtacaaagctctacagtcagctataaagaacatgagatatatggaaccatttcttatgttacattggctcttctgttggtagcacttcataatataaagaccaagaaagagggtttgatttcatggcattagttagaatttgttttaccatattaattctgtcattaattgaaaatgatactgatagggtttggctcagtgtcccctcccaaatctc

SEQ ID NO: 50550 - DNA, 559 bp, Homo sapiens
atgatatctgtgaaggtaaggtccttggggaccaggacaacactttgctcatggttgaattctacaaagcttcttgcacaggctctggcgtggggtgggttcctcataagtgttttctgaacatgaacacacaaatatcccttaaaaatgaggtatttgtttattaacctctgaagtcaacatctgtaccctttttgtctcttaagcatctccaaggagggctaagtcaacagtgttccattagcattaaatagctgaacctggggatgaaccacagttcatgctgaaagagccatgtcgaaatggcattgtgcaatggtgcatttctgccactaaaaactttgtttgcttttcattatacaggaatggcttcaaatgttcagtggaagtgaacaagttcttgtattgttttctcctattctccttccagcttcagggtcatatgtcacagcgctgggcatttcatttgggtgagtgaaaggagggaagggagcaacgctgggaaggtttaaaatctccaagtgatatacgaggaaaaaggctgtgctcatcacaaaag

SEQ ID NO: 50551 - DNA, 4997 bp, Homo sapiens
caaaaaggaaaagcaactagaatttttactttcttcaatctgttgatattactgtgctgtattaatatagtaaggcattcgtgtcattaatacttgggaaatgctgcttcattctctatttttatttgaatgatgtttcaaaaaataattcaaaaacgtttattgcctaagaaacattttagtcagcactgcttagctgaagccagcactaaaaacacaacctttttagaactccactttttttatgtaaagcattaagtggtaacctagtagcaggatttggaatcaagaataacatttgccgagtggctactgtaagactgattcagtataaacacaatctcacttgattctcataataatctttgcaggtatctatcatcattcccattctgcaatgaggaaatgctgtcagagtgattaagtaatttgcccatggtctcacatagtaagtactgcaggtgaaactctgacttctcttctcgttgccaaagcctacaaacatccttctctatcaagaggcccttataaagctaccatctattttattaaaatgtcatgtctgtgtaagaagcttaacacacaaggctgtctgtatcttagataacagaatctcattttgctcatttcttctataaacgtttcctgggtttttcctacgtacttggtaatgtgctgagtgctaaaaccagagataaaatacagtagaatcaggagagacagccaattcaaagacaaatgtaatttcaaattgccaatgtttcactgcttttgagttacaaaaatgccaactttatatgatttatactaaaatatgttatccaataaagagaatggcacattttgttccaattattccaactcaatattttagaaaagtaaacagatttctgtgtgatttcccagcattttgattatactggctatgtatataaatgtttcttttggtttataggaagcctgtcttctccagggaacacagcactcagaatcgtctcggcccctgcataagcctgcatgagcctgggctctggggacccatcctggtgcatcattcgttggctctgtgacaatgggcacatcgtttaacctctcttggcttcattctccttactggaatgatggagagagttttgcctatttcagaggcttgctcttctatacgtgagcctataagtaacttgtcttaagaatttccactccttctgtactctgatttaaatttgaaggcatcaaaacaaaaacaatcaagatttcagattccaaatactttcattttcattttttattttgattagaatttcttctgaatgaatttctgttttgtaattttagcattgccctgagggggggaaaaggcagtttatcaccatgcagtatatttttcagacagcctctctttgacaaactgatttttgtcagtctcaactgactcaccaattccaaatcccagggcttccctgggaaacttccttggatcatggctctgccacacaggaccgacatcccagaggccaaagcaacctgctataaactgagatcattgctcagcaagctggtaccacatgcaaggagtctcaagagctaacaggaaatgattcaagaccagaattacccagaacaagtgtgttagcttcctctgcgcatgggataataaggagcttgcatcaccaaccttccgtgaatagcctactcagtgattcaacaggtttcaaaattgtgaaataagggatgtctcttgcatggtgtactttagaagtctctacctgaggatgaaggaagtacccaggagtaggcatcattccacttttgtaccatcttccactatgtttatatgggtcctcactgagaaaaaggtattaaaagtgagatggaaagaataggtcagctaggtgaaaaatgggaggaagagacagaaggatctgggttacaaaaggctgagaccaggccgggcacggtggttcactcctgtaatcccagcactttgggaggccgaagcaggtggatcacgaggccaggagatcgagaccatcctggctaacacggtgaaaccctatctctactaaaaatacaaaaaattaaaattaaccgggcgtagtggcaggcacctgtagtcccagctactcaggaggctgaggcaagagaatcgcttgaacctgggaggcagaggttgcagtgagctgagactgcaccactgcactgcactctaacctgggcaacagagtgagactctgtctcaaaaaaaaaaaaaaatgctgagaccaaagtagcctggtggctttgggaatggaagtcaaacctggtgcgtggggtggagttcctgtagtttttattatactctcagagtaaggcaaggtcagtgaagcattttgaagggaaagatggcaaagtgggtccatatttttaaaagctcatttgaattgccatgtggcaattcaaataggataggataaagaataaaagcagaaatggagagaataagagaaatgtggccgggtgcagtgtctcacacttgtaatcccagcactttgggaagcccagagagcagcatctcttgagtccaagagtacaagaccagcctgagcaacatttcaagaccctgtctatacaaaaattacaaaaattatcctgtggttgtgcacctgtagtcccagctacccagaaggatgacgtgggaggatcacttgggcctgggagatcgaggctgcagtgaaccaagatcatgccactgtactccagcctgggtgagagtgagaccctgtctcaaaaaagagagagaaatgtggtctcaacaagcattaaggggatggtgggaaaggatgaaattaatggaaggagtagagggaagtgcaaaggatgaaattaatggaaggagtagagggcagtgcaaatgggcaaagaatctgtctgagggtgaggctgtgcacaaagtccttgggatatagcaaaacaggtcagtgaggcatgaaatcagagaggcaggctttatacagacttgtggtagttgcaggacgagggttggggggaagtggtttgcagactgctgtgaactacagacattttttaaggatatcaagaagagccccctcattttcttccttacccccgctgccccactcctgattcatgggcaggtgaacctagcccatgaagcaatgctgacccaaccatcaaaacatgacaccagcttgctgcccaatcctctgtggaccaaactgcagtcagtcaccatgtacaatacaatcaagcagtaacactctgaggttctcgaacgcccctttacagagggaacttggcagggagtagccatgtgtgaacaacagggactccccattgttctgcactgatgattgaatagacttccttggtggcccatggagacagctgtttttactgaggaacattttgccctttgaatgtgattagtaagacagagatgactctattctttaaaggtctccaatgaccaaatttggcctctgagaactggaccgaaacattttgtgtgagtcacgtctgtttgcctcattttctgtcactagttgttatggaaactacatagcacagcctgagggttcagaattcctgaagttggcctcaaacttatgcatagtttgtacagcaaacaagtttgcttactttgttaatctttagctacttcccatcctgctcagattggaagcggaagaggtcaatactgcctagcgtccactctggtcttttcacatgaatcaaaataatagacttgaccttgtgtcctgccctgaggatggtacagatatttaaaagaattccaaatcacttcctgggttatctgattgtaggatcaaagtggcccccttgctaacataaaaatgatacacatgtgaaaagaatttaagacttcttcatgctgtcttttttgggttcatcccaatcttttggcaaaatctccagccagatcttaatggccactgggtttactctgggaaatatgcactttagagagatgtttgacatatttttgttacttgaacttctttgagatatctatagatctttgaaactcagacacaagaaagttttatgtccatggtgcctcccgattattcaaagaaaggtgatgagttttatggcttcttcagaaaggaatctaaatcagacagacctggagtcatagtctggttctaccatttaataattgcttgactgagtaagtaaattacctttgtgagcctctgttatccatctacaagacaatgctattaacaactatcccatgggttgttatgaagactaagcaaatttaacatgcaaattgcctagaacaggtttttatacatagtaggcacttagcaaatgttaatttcctttccttttccattgcactacctgctttgtggccatgttgttgaccaatagcacttccagttgcagatgagcaggaatagacaaagaatgtggaatttttataaagttccaattaagagagcctgaaagccatccaggtgttccttctaaacttagatgtgtgatttaacatgaggaagccatgtaacttttgtgctgtgaccataaactgagaaggctggagcatgtaatcctgaagccaggcattttaactgatgtaacggaagcaatgtgtatttttactattaactaaaaagtgactggggcaggtctcaatccatagagaggtattttgccaaggttaaagacatgcctggggaaattttaagtcccaagagtatctgtgacttgtgtttttttccaaaaggtggtaaaccaaaaataaaattctaagctccacagccatcagaatgaacccctcctctcagccaagggcattccaaagttaacctgaaaaactggttcaggccgtgatgttcctatcatgggagtcagacatgcctcattataccttcctcccttttggaattcaggcacagctgactagcattaacatcaacacagagaccttagaactggtaaaacagactctttacgtctgataagaa

SEQ ID NO: 50552 - DNA, 981 bp, Homo sapiens
cccagctacttgggaggctgaggcaggagaatcactagaacccaggagatggaggttgtagtgtgccaagatcttgccactgcactccagcctaggtgactgaacgagactctgtctcaaaaacataaataaataaataaaataagaatgctcctgtcattcttgactcctggttgtcataccctcttatgattccctcccaaggtgtaccaaggttgttctgtgacaccagtggaacgcaacagaaataatgatgtgtcctttccaaggttaggtggtaaaagacaaagcggccgcaatgttggttgttctctctcttacctctatgactggactatacaacccaccaagaggaaaataagttatctgtaaccaggttcaggatgattttgaccccagggaaagtgttgcagaatcacatttcaaaaaatgcctttctgttccagagagcttgatgttgagaaactgccctgggaagtaaatatttatccagacagatctagaattccaggtgcctgaatggtagtgattcagcaaatttatgaggtcacaaaaccatcagttatagcgctggccctgaatagcctctagtgctttccagtgtgggggaaggttagggttgtggtatgagggccctgggattagggacaggtactgttatgcaatggaaaggggcctggctgttatgggttccggtcacttactttgtaactttgggagagtcacatcctctctgtgtcttatctttagcatctgtgaaatgatgcttcccagagtttttgagagaataaggtgagttaaatgtgagagtctttggtaatctctgaaatgctatataactatgaaagattattattactcacccataccaattttaaaaacccaaatgtaaattgacaaattagaaagtcattctgtgctaaaaatattgttccaaatctaattaaattagaacaatagtgtatttgccaatttgtaggc

SEQ ID NO: 50553 - DNA, 887 bp, Homo sapiens
gccctttacaaaaagtttgctgacccttggcttaaaacttccaatccttacaggtagtaaaacccttccaatccttataggttccttggctggccaggaattttaatagagaagagaagaacttactcacttttacagacattgcaggcaaaactagtagagacaaatgtcttgggtttcattttctggcctcagattagaaaaaaaaatagataagaacaataaaacacatctctgaaacaagagaaactcttccatttctccagacagaagttaattttctggccttacaagttgcttaatgccatagggctctagatttgctgacagtattgaaaggtggcttatgtatgttaattaacactttttgccacaactatgtacatgaatcaggcccaaacacaatgagatcagcttttcataatcaataataatctttggaaattatttataatcaaaagggagactgttaagaataattattcaaaccttaaaactgtgacaaagaaaactgagtgtcccctcaattttctcacaagcttacctgtggattatctaattatccagggccggtgtcttcaaactttgacccacaggacaaatattgtggtcacctttattggtaaattgcctgtggctgcatgtgtaggcaaaaatgagtcattgctacagaaaccatgtggcccacaaagccaaaataaggtaatttctggccttctacaggaaaagtttgccaacccctgctcttgaaatgtttctctttgtttgacttgctagttactactgataagggtagttttcaactctgaaattgtaggtggtgacttatagaaaactgatagcaatgtaaatgatagttgtctgataggaatgcaaaaaaaattgct

SEQ ID NO: 50554 - DNA, 1945 bp, Homo sapiens
acagtggtttatgggtgtattcatatgtccaaagttatcaaatccactgctttaaatgtgtggtttattgtatgccatttatatctcgaaaaagctgtttttaaaatacagtaagagaatttttcatatttaaaaggcaggatatttaaactatattaaatatataaaagacagtggtactaacaggttgtattagcaggagacaagggtaaggtggggtttctttggctgccttgcaaagaaatgctgagtcaagtaagggccagtgggcaacgagggcggaaccacttgtccccttggtcacctgagggatgtggatgggagctgggtggaaatggggggtgagaggaacgccgcccccaaagaagagtcggggcaggggcgcccaacgctggggcccaggcaggttcttcgtcctcacttcctgaccctttctcaagagtctagggaccaaatggatccatccttggagcctgctttctacttctgaacacaatgagcagtttgtgtttgagggtttggggagggggtgttgttttttctttatgttttgttttttgttttgtgtatgagttgggtggcataacccacacgtaagctgcgacgtccaatcaagaacgaaaatgacccctcacaatcagtgatcgggaaccacctgccacaatcactagggaagtgacacagccgggaaactccgcccctcacacccccgcgcgctcgcgccggccgcagccccacagctcgccccggccgcagccccacagctcgccccgcctctctccttccggaaacaatccccgcgcgggcggaaggcggggtcggccctggccccgcccacatcatttcccttcctcggcccagccccacagcgcgcagcttcggcagggtggctttacggccggaggagagggtgggtcccagacctgaggtaggaggccgagctgaggggcggggaagaggctttttgcggcaggacgtaagtgacggcgaaggcggtgcgacagcagctggagggcagaggaggcgggtttgtgtttcccgggccgaaccgggttgtggggggcgcggggcctgggccaggcggcagctaaggcccgcggtgacagcatgggtgaaggggagcggggcagaggaggccttgggctgttttcggcggcgggtgggggcgaggggctggcgggtcagagtcccgggtccaggccggggctctgactcgcggttggtgttcccccgaccccgcagcgcggggtgtcctgtcctcgccatgaggccgcagcaggcgccggtgtccggaaaggtgttcattcagcgagactacagcagtggcacacgctgccagttccagaccaagttccctgcggagctggagaaccgggtacgcaacctggctccccacgcctgctctggcgagggagagagactcaccggggacgggaagggtgtgggcgacaaccgggcctttgagggtcccgcagttctggggaggtccaggcacagaaggggccttggccaaacgtgtaagaagagagccactaagcaagacaggtgtttggagcaggaagaataatataggccgatcgccggggttgacgaccttatggaactttgttgcccggtgccgggaatctggatccagcagtgttcccctgctgcactcccccaaatccccaccccgggttattgtcggcagcgatgaggagccaattcctgaggctccaggtcgtctcagtcaccaggttgtaaactatatcctcctacctctccgcgcaagataaatcatcatcattctcgtgactggtgtttgctgcctctgtgctggccgcactgtttggctgaaagggtttattaggtgcatggccaggcggtgcgttcaggctttcttggaaccttaaagacgtcgggcgttagataggcctggacaggaaaatgtctcagaacaaggcct

SEQ ID NO: 50555 - DNA, 1024 bp, Homo sapiens
gacagcacagacacagaatgtaccaaagcagacacatgtcttcctagggcaacatcaataacagctaccattttgagggcacgtactatgtgcctggtattgtacaaatggtacttctgaatctcacaagaaccctacaaagtatttccccattttatagatgagcaaacttggatacaaatagattaaatgatgttctcacagtcacacagttaacgagtattgggatatgaacccaagtctgattgatcataaaacccctgtcttttacaccgtacttcctctcagtacttgcagcagcaggaacatggagaaagggaagagttcatcagataattctagaggtttatccccttctcttctttttcaatactttaaaaaagaatacattttgtctgctcctgtatgatttattcaatcctgtaagccatgcaacattccagagctgccttctttagcactagtgaatgtgtcacctgaattcctgaaagccaaagatctaaatcatgatatctatcctctgccatatgttgtatttccttaaaaaggctttgttttggaatacttagtgttacttgtccatacgctttctcatgtacaattttcaaactgatacttctcaaacaaccagcaaccttctgtgtggcttttgttccatgccatggtttgtatatcagttgcagctgcgatgacttggcacagcccatttgtcatgactcattttgcagctattgtgtaatcatgtgtttttctgatgtgtgaggtttgagcaattacacaccagaggctaatctatcaatattcaaataactagaattttgaaatgggaaagatttacattaataacttctggataccctctttcatgaatgcagatatttttgttcaacacaatttcgttttgggatttgggtgttcccaaggtccaggatgcaatgtgagctgagatcttagagaaggggaggaaactctaagcataatttattcaattcttccatttttcttcagtctgcaaggtgtctgc

SEQ ID NO: 50556 - DNA, 1362 bp, Homo sapiens
ccaaccccgccacagttctttttttttttttttttaattaaaaaataactgggcgtggtggcgctggcctgtggtcccagctactccggaggctgaggtgggaggatcgctggagcccgggaggcggaggttgcagtgagctgtggtggtgccactgcactccagcctgggcaccagaacgagaccctgtctcaagaaagatgaaaaggaatatactggagattctgaaggcaatgaccacactgaccacaggtgaaaccccgcaaagacggaggaacccaaagagccacgagagctgtgggtggagacggcccaggaggctgcagcggcctgctttcaacagcatacttctgggtgggaccccccggggcggacaccgccgctccccttggccgcggtggcgggcgccccctcccgacgctcttgggtagtgcaacccggaccgcacagcggagcggccggcccccaggtgggcggggccaacccggaccagcctcccgccgcctcaagtccttgggttgctgggactgcaggccgccgcgaagacagtccccgcccgccgggtgggcgggcccaaggagaccgccccgctcttccccccgggccttgattggtcagcgtcgcccttgcgcgatgacgtcgtgcctgggcggaaactttgcgagagtagcgcgggagctgagaagttgcagggttgagttggtcccggcaagtccttgagcagtttgttcctctgtcttcccgcttcctggtgccccgactgcgtccccacgaacgccccgtccttaccgccggctgctgtggagtgcctcgctgtctcccaggtccccgagtgagcgtcgaatgggacctctgtggctagggcaggcctgtgtgggtggcactgagagggaggaggggagggggatgttcgcagtttccttgcgaccccagggactttctttgtccccgccatccacctccttaggcctttgggatcgccgactggtctaatgtcgccggcccttgtggctctgggaaattagcattgattaatcttcctaacaatttttgtttttatagagacaggatctccctatgttgcccaggctggtctcgaactcctgggctcaaggtatcttcctgcctcggcttcccaaagtgctgggattacaggcgtgagcccggccagctcctaataatgttaagtgcttgctaggagtcaagcgctgtgctgagcgcaggggcttcccacgtcattgcgtccccagtgcttagtgccaggcactgagcagaggcgcgattcgtatttgaactaaaacgaaccccgtccctgaggaacaagacctctactgggaagtcaaagaaatgaatagtgattgt

SEQ ID NO: 50557 - DNA, 1510 bp, Homo sapiens
gtttttgactgtagtcccagctactccggaagctgaggtgggagaatcacttgacccaggaggtggcggaggttgcagtgaaccgagatggcaccactgtgcgccagcctggttgtcagagtgagaccctgtctcaaaaacaaaaaaagaggttttgagaggtcagagtatcacacatatataagatgtataagatgttgtcttcatcttcttacaatacattgacatagacagttaccattatcccattttcagatataaaagcttcagcgtttccgtagtcactggtaggcagtatggccaagcttgcgatctagcacttctgactcagaaaatcagttagctttccctgaccccacactgtttgtccagcaaaaataagttccgaccttgacctcttcccatggcacctacagaggcaatgcctccccagctgcctggtttccaactatgttgagcagtgaaattgcttagatcatggtagatcatttccaggtctaactttggtccaatatgttcttccaactcaaggtctctgtgggtgaaaggtttttagggtctttgaaacttttacatatgttgtgtgtttagccagatttggggggtttcagtgtgcaagataaatgcacacaatcctgacaaaaagagatctaaataactgtctaaacaactgctcttttagcctacatttgctttgatagcaatgccaggatcacgctgagctaaatacttggcattaaccagtgtaaatagagaaaaacaactcttatgcaatgagagtcagttgaaaacctagagcttattgaaagtaccaagaacaagagaaaaagaaatctggaaaaacaatccagctactttctcttccttcaaaataatcacacacctcaaatagtagaaagtggataaaaaataaacaataacaatgaatctattaaaaacattggtattaacggccaggtgcagtggctcatgcttgtaatcatagcactttgggaggccgaggtgggtcgatcacctgaggtcaggagttcgagaccagcctggccaacatagtgaaaccctgtctctactaaaaatacaaaaaaattagccgggcatggtggcacacacctgtaatcccagctactcgggaggctgaggcaggagaatcgcttgaatttggggtagggggtgagcgggggcagaggttgcagtgagccaagattgcaccatgcaccattgcactccagcctgggcaaaagagcaaaactccatctcaaaaaaaaaaaaaaagactgatattaacaaagcaaaattggggtgtcagaaaaatcaatataaacttaaaggcaaaatcattaaatagaatagaggtttatcaaccattaatataagacaaaatcaccaagaagatataataatagtgagccttcacataccaaacaacatagtgttacaatatataaatgctaaactgtcagaaacacaagaatttgagaaaaactcaaccatcataggagacctgaaaact

SEQ ID NO: 50558 - DNA, 835 bp, Homo sapiens
acttttatctcttctgatacttgatttcttggactacattttttatgccaatggcaggtattgaggttgaacaagcaacattcactttattttttctttctttctttctttctttttttttttttgagacagaatcttgctctgtcacccaggctggagcgcaatggcactatcctggctcactgcaacctctgcctcacgggtaagcgattctcctccctcagcctcccgagtagcagggattacaggtgcctgccaccatgcccagctaatttttgtatttttagtagagacggggtttcaccatgttggccaggctggtcatgaactcctgacctcaagtgatccacccaaccttggccttccaaagtgctgtgattacaggcatgagtcaccccaaccggccacttcatttttttccctaaagggcctgccccacctgactctcgaacaaaacagccagggtgccctgccaggtggttaacagggtaaaggcagaagcagccaaacacacaggcttccaggaacagtgtggacagagctgcagcttcctcatctgataatgggagctattgcaatcgctactgtttcccccttgccttctagaaggcctgactccattaagggttgatcatgaatagggcaggtggacttatagagcatgctgtcagagttgggggttgctttcaaattcaagctagtaaaaatcaacagaaaagatgagtagccagctgtagaagtgacgtactcctaagatgtgtggtaatgtatttctaatgacattagagtttctgaaatccatctcatcatcatggcctagcactagaaaggggaa

SEQ ID NO: 50559 - DNA, 1895 bp, Homo sapiens
ccgtgtacagcgtaaaccggcggagagggcttggcactaaaggcaaactgtcttttaagaacaggaaaaagaaaggtaatatatattttaaggaggtcccattttaggggagataataagcttgggttaggcgtccgaagtcagaagatatagtaagaaacacacacgcaaactccagcagccaccagctagacttgagtagagagagcaggtccaagtggaggtggaagttggaaagttgcatctgccaggcagggcgaaagtggcctacacccactcctggagcaccctgcttgacgagcaaggtagacgaggctgagggatactgctggtgatgacggtggtcgtggtgatggtgctggtagctaacagatcttgagcgtaccaggccctgagctgagtcctctaacgggcagaatgtcgctgcatacggacagcagcctcaagaggacaaggtgatttagtgactctagcctcttcccgcggtgccagcctgatttcaccctctccggaacacacaagcgaacctccggggagggagccagtatcgggtcctaacgcagggaagcgctccgctttctgagagggacgcgccagcggagggacagccagggcccggcctctcctgctcctgccccgccccgcccccggcagtgccccctagtccgccagagggcgactccgcgggtcgcccaacccgcgaccggtccacgcggcacccgcctctccctaggcccccgccctgccggcccgcgcgcgcccgacgggagcgtgcggggcggtgggcgcagggtcacgttgggcggcgcagacaaaggcgggcgcgcgcacgtcctgacgcagcttgggcccgcggcggcggcaagggcgggagggagcggtcgccgcgggatttggagctgcctagcctcgcggtcggtgagtaggagggagctggccccttacctcaaagtctccgacctccggggagccgagagcgggacgtgggagccgggcttgggcggccgcgcggggcctgcggtctgggacgccccggcgacgctgcgccggcgtcaggaggcaccatcgccgcgccccggggatccccggcgggtggagcgggtgccccccgtccgggatggaacggtccgcgcccgccccgaaccccggccgcccgcctctccgctcgcctgctctccgagcccggctcctcggagcccctcgcctcccccaagtcccaggtgtgcgcagccctcccgccccgggagtccggggatgtgggtggcgagggctgctgggcgttggagcaccaggaagcgccttcccctgtcattccccttcctgtgttctctggctgccgtaagatgcatgtctttaccctctccttctccaaatgcatgctcccatttttctttaggatttcttaactcctgaaatcccttgcctttccttttttatttcagcaccctctgaggcatccttctcccagtggggcttgtttatttcctcgctttccatgtcacagagggctgaagtttagctgttcagaagttgcagaaaatagcttataggagacatacggtgtagcacgatggaaataagttccatcctctgccaagtattaccatggatcttctcatggataaccttgaggtcatttgaggaattttgtttttggttcattttccttaattttggctgaactttgaggagctctccttagtttcatgtcttgtagattctatctcaatccaagggaaatggtgtgaagagcagttataccataccaaagtctccagacaaaatcctgtaataatgccaatcaaatatacttctctctttgaaagagatgtgcttttcttttcttttttaactttgtattttggagaatttcagacacagggaaatagatggaa

SEQ ID NO: 50560 - DNA, 1417 bp, Homo sapiens
aacatttatattttatggctgtattaatagtgtttacttgttgttgtgtgtctacattttcttttggcattttatcagccattttcacattttactaaataatcttcataaagatcattaaaactggatacctaatagttcatgcagtacatacacctgtgcttttggcagacctaagctagccctggcttacagctcctttcccatgactagttctccctatataaaggaaccaggagaaagtatttgtgtacctgccaagggaggaggaacatggagaggatatgggtggatcaatatcttttctgttccctttcctggaagccctaactcagtgcaggtcctgttcatgctgagtcacagaagatctttgtgtgcagagagcagcatgtgactggaagggttttagtgtttgcttaatgtttgtgcttcacatgaaccccctccacagtggtgatggtattactaggagtagaattcccaggagttgaccctcagctgagttgaaaatgacctggaagaggggagagaagaaagcctggatgtaaaggagaaagatgagaacaaatgatgtgaaaggagttgatcaggtcacgttagagaagatgagacagctatgatgtgatctgtgttaaactccaaggtggaacttgttggtggagagtcagaaaccagtggcagttgtggagaagctgaagagactagtggtggtggcattgtgtgcgatgggcatttgtgttgggtcaggcagctgttaccttgaatcccagggctttcattactggctctgaaaaaggcattgaactttccagtgtttcttcatttagagagtgggagtattaatactcctttcacatggttgtagtgaaagaggtcatcctacccccgatgaggagtgtgattttaacatagccttgagtaggttaaaggacagactgaagcagacaggaattaagggggaagacgaaaggaaatagctccaggttttgtcattttggctctacttttccataaggagaccttgatggagaaaaatattgggagttgatgaattaaattagtgactgcctactaagtagaaggcactctctcagactgtgctgaaatgcacataggggtaagttctggctgccgcctcttgaggtttgtgtagtctagtaggaaagacatatgcatctataactaactcagaatgaattagttgaaataccagttgaaatacacaggcagaggtgaattctgattgcaggaattgagtaggtaacatttcttagatttgacatttgaactggatcctaaaagggagaaggatagagcattctagaagcacagttgataaaggtgaaaaggtaatattgtttagagatggcacatagttcagtagagcaaaaacacggcgcatggagggaatgaggtg

SEQ ID NO: 50561 - DNA, 632 bp, Homo sapiens
gtggggctcgctgctgccaccccacgtggtgcacagcccacctgcctgctctgctgtgtattcccgttttagaaaggaggagggaatgactgtcgttagccaggccacgtgactctttggagggatacactggtgattctcctttagaggcccttggattctctgcatatcagacagaaatagttggatttcttaaagacagcttgcttctctagatgacagcaaacacagggacagggaacattgtgtgctttctgccactccttcctggacatggctcattctttcctgaagcttgcctctcaggtacaggggcagtattgatctttcagcttctctgcaccatgtgctgctctgagtgtgccttgccagatgctaataccttcaagctccacctcctgttgcttcagagggaagctgtgcttccaccggggtttccagccaaagggaaggggagggcagcagggagcagccctgtggcagaatggccagcttagggttttccagccttccagctgcctgaggcctcaggagatgcaggcagctgagagccagacccatggctcactgtcagctggaatcaaaaggatctctggttctgataggcctgcttacatttctaggtgaactct

SEQ ID NO: 50562 - DNA, 411 bp, Homo sapiens
tgaaattcttggtccttgccagatgatttgagatgcaaatgtaaacactcaatttccacttagtgtttttgagtctgggaaactggttgaggaggagctgaaaagagaatgaggcaaagctccctccaggttggaggaagctcctgggagaatgagaactggttcagactggggtccagctcacccagactgtgtcctgagaggacaatactcatttgcttgggaaattcaacaggaagacctcaaagatgagtcatacaccctgcacagatgttgtcatctaggagtcctgatgcaatttttatgttattttttttagagtcaggattttgcttgttgcccaggctggagtgcagcagtgcaactgtagctcactcagccttgacctcccaggctcaagtgatcctcctg

SEQ ID NO: 50563 - DNA, 1220 bp, Homo sapiens
accctgggcaccaggttggaatcaaaatgatggagttcccggtcggtcctccagtgctgaatgtttaatttcctatgaaaggctgcgagctagaggaggaagcaggaacacccagcgccgttcccgcccatcctcccgctccgccccgctccgcccgtgctgggctgtggcctccacaccaagcagccgccctgggccgccttccttcgtctgtgcgtgcagcgccgcctccttcagcttaggcccgacactccatgaactctcattttccaccttctccgtctccagcttccaagctgcacagggccaggccgaggtacgtgatggcgggcactgaattacagatcccgtctgtggccgccagcctctgtgtcctgccacctcctccgagaggacatcaccgccaccaggtggagcgagtctcctcctcggcgctccaaccacgtgctgtttattactctgtggggattcccataccgaggcctcttcagttcctggaacagtagcactaaaaggctcctgagtgcctctgttaatttgattgttctggttcgcactacaatgaccgggctggagagggggcgctcgtaatgaaacaggaactgctcctcgcgcccgctccagagtcctttacatctttggggagagggcatacggggagctacatttcattttcctgaagattttccacgcgaaagtgctggggagagagttgggcctgggaggctgcgccttcttcccgcgaatcccgaaaactgcgcggcaaaggcgggttccgcagaagtcgcgcgtgacccggggcgccgccctcctcggggcccattcggatctgccgcccgtcctctccagagcgccccctggcgccctctaggccatcttgattccaccgccgcagttgaaagaattaataaataaatcctagtctcgcgtctagaccggtccgtgagggtcccctgctcaccggacaccctgccgcaatctctgctgtcccattctggcctccctacggggacgggggccaccgtttgcacatcagcggcgtttgggacagcactgtgcaagatctgtgactcggctttcagaagcttctgccacaaggcttcaaaggaaaccttcaattttcacatttcctagggggaaaaaaaatctgagatttcttcttgtggcttgatgaacttagctttcgtcgctggaacaaaacccgaggaacagcgtcttcg

SEQ ID NO: 50564 - DNA, 584 bp, Homo sapiens
tcgtgtttaaaaaaaatcagtacttttctgtcttcaaagtcctttcagaagatattcttttctacactaccctaatgttgcccagaaacacacaaaagcatactctaagttaatattgcatcaaattaaaatttctgacttaaatatatttcatcttcaatactacctccgtaacagtataaataaagccttaagtgtttaacgagtttgaagcctgaggacagtagctttcaaaagaaaagccagtgtgataagggtggagaacatagtgacgtaatgctcaataaggaaaaccctgacaaatgcagactgcacacacacaataagagatcaggaaagcgaggctgaagcagccagcttggtttcatgctgcaaatttttggcagacattcaactccttctgctgttttcctagccagcacatttatctatgtaatgtcaccagatccagagagggagtgaggttggaaggagggggaagaggagaaaaactgttttacaggctgccagcccttccacacatgctgttactatacaaaggatgtctagaaagccaatgtgctgcacatattcaaatgctgcaa

SEQ ID NO: 50565 - DNA, 2393 bp, Homo sapiens
tattaagtctaaactaaatgagaagctacatcctgagtttaacaagctgggaacgaacgtcctaattgactaagcttcgcaggtaaaagaatgagtgacagtcactcattgtctttccagtcgggattgtcatcagtctccaggtcttcggaaagtcaagcgcctgcagcctcggatcttaactcccggaaagtacacgagcggctagagcgagcgcaactcgcttccgacagtccttcccgtccccattccccacccctaaacacgtcttcgcgctctcttttcaaagagcgagaaactttaaaaacttggatctgcacagcccggcagctcgccgacggggcgctgcaccgtttccacgcgatggaaacagaccccgagcacaagttaacaatgaaatcacgtgaaggagttcagagcggtgcatagccccggcccagctccgcaccctaagctctgggggccggctcgagggcggcgcgggttgctgggagcctgacagtcgcgcaccgggccaagccgcgaggttgacaggcgcccggcctcccctcggcggctgggctgacagcccggcagacacaacaccacacgtgctgcgcctcgcaccacaacacccgccggcctgtcagccccgctcgccgcctcagccccgctcggatccccgcgcccccggccggagccaaagccggagccggaacccgagcccgagcccgaacccgagcgcccgcgagcgcggggagaagcggcccggcccggcacagccggcacgcgcgcggcgggcgggtgggcgcgccccgagggagagcgggctcgccggctccgccagcccgaggctccgcggcctgggccgctcgccgcccgcccacccgccggctcccccagggcgggcccggccggcgggatcgggggcgcggggcccgcgagcgcggggccgggcggcggcgcgcgggccgcgggccggggcagccgggcgccgaacaagcgagcaagcgagcgagcgagcgggcgggcgcgagggggcggccacggcgccccagcccgaggcctggcgcagagcagcgggaggcggcgcaggccgcggcggggcctgcagcggcccgccgaccccgcgaggcagcggagtgggccctggagcggctcggcctcgggctgggcggccgggggcggccgggaacggcccctcggctacttaccgggaggaaggacagccgagatcccggggccccgggccggaccgcggagatgccccaaactgacacggccgccatcttggagacagtgagctccagccggggggaggggaggcaaggcggcggaacagccgcggggggaggggagcgtcgcgagggaacggcggcctgggggagggagctggaagagcctgggcgggcggcgaggggaggcggaggcccggcagcgcgggtggggggcggccgagagcgggaagagctgggccgagagccgggaaaggccggagggcggggcggggcagcagggaagagccggccggcggggtcacgtggggccggtacaaaaggccaaagccaggggaggaggaggacttggtggggctggaggctggggagcgggggttcctcctctcccgtctcacgcgtttaagtcagacggcgacccgggagaggaggagctggtgcaccccatgccaccgctggggaaactgagggcaggagtctgggtggggtggcttcagtgtggcacggaaatccggcagccacgcaggatgggaactctcggcggcgtctgtttacagttagtgagccctccctccccactcatttgcctgcacagcgactttccggagcccgagggcggggcctggggggcggagaggaggcggcttcccgtcctcacccctggcagctcgcctcagcccccgacggctctcctgtgtcggtgggaagagttggggagagggtggaaccagaagcacccgtcttaacccctttcagcagtgacttcatttcttccctcccccagcagctgagagggttcttggagctcactagagccattttatgggagactccacagacctgggtcgtgtgacttggacaaggtcacacagctagtatgtggcgcgcacctgagcctgggactgagatttgtcttattccaaagccggtcttcccttcttgccctgtgcggaactcttgtccatacttagggcgttggaaccacgagcaggcggttcttcatggcctgcctgtccactactggctgtatggacgtttctttgtcttgcctttcatctactttaaactctttgatgcagagactgagtcatacttttttttttttttttgagacagtgtcgctctgttgcccaggctggagtgcaagtggtgcgatcttggctcactgcaacctccgtc

SEQ ID NO: 50566 - DNA, 1248 bp, Homo sapiens
ttttcttacctaaccatagtacagttatgaaattcagaaattttaacattgacacaatagtttaatctcatctataatccacattctaattttgttgattgtcccaaatatatccttgaagacatttttctctccaggatccagtccaggatcatatgtggcatgttcctaatccagcagatttccccaaccattgtttgtccttcatgatgctggcatttttgaaggatacagaccatttatgttacagaaaagtttgcagtttattttctgtgtcctctggaggtatgtgacttctacttgcccctcattgatgaagttatttttttaaaaaacaactttctgagttataagtcacataccgtaaaacttactcatttaaaacctacaactcaattctttttactaagttcacagggctgtgcaactatcaccccaatctaactttagaatattttcgtcctccctaaaaaaaaaaacaaaaaaaacatgcccatcaactattactccctatctcccttttaccactccaacccccatacccagctcttaacaaccattcatctaacttcacctctctagatttgcctattctggacatttcatataaattgcatcatacaatgtgtgttttatgtgactcagttctttcacttagcataatggtttcaaagttcatttgtgttgtagcatgtagcaggtatcagtactttatttccttttttctttctttctttttttggagatggggtctcactctgttgcccaggctggagtacagtggtgcaatcacagctcactgcagcctcgacctcctgggcttacgtaatcctcccacttcagccttccaagtagctgtaccaccacacctggctaattttttaatattttgaaaagactagtcctcactatgttgcccaggctggacttgaactcctgggctcaagcgatcctcccaccccagactcctaaagtcctgggattactggcataagctactagacccagccagtattttatttctttttacagctgaataatattccattgtatggttatactacattttatttagccatcaacacatgttaatggacatttatgttgtttccagtttggggcaatcatgaataatgctgctacagacattcatccgtatacaagtttatatgtggatgtatgttttcatttctcttgggtatatacctaggagtgaaattactgggttatgtgtaactctatgtttaa

SEQ ID NO: 50567 - DNA, 1785 bp, Homo sapiens
agccaagtcctctggcaccagcgtccctaagcccacccagagtcataccattctgccattttgtttctggcttttcttcatagttcaaagtcagccaactacctgcccttagcaagcgtggagagaaccccccgcaccacctcagcaaagggcttgtgtgtggaggagctgccacccacgctccatttcaccaaagtgacaactaatgctagggagggcgaacctctcatcggcgaggtcgccactgtcaccagcgcccactgctgggtccaaggctggcgacgcctcaccgcatctgggcttgacttcctgcgtcactggggcgacccctggtcctgacttccactccacgccttcgtggatcaggacgactgggaccactcaaaagcgtatccaagtcctgaggtctccaaagcggtggagagacccgcccagcccctcactccccggctgggaactgagattgtggagggtgggcgccctgccgcggcccagtggggctgggggcttccagagtcggggtccagggctcggtgtccgagactccaccgccagccgcgccgacctgacccacggccgggtacaacagagaaggcggcgcttcccaaaggcaccgatggagtgcagggtagccgccgccctcaggatttatcaaccgcgaggcgctgtcagcaactcgtgcccggaagccaccccgccccggcacacacatactccagcgccccctccaggcgcactccgcaaacacgcgagcgcggcgaccgccccagccctttgtgactggatgagtggggccgagcagcacgcactgtcttcgacctccaatcaggactcggggtctcggagctgtaccaatcggagatgaccgtggcctcaacagggccaatcgggggactcgagcccgacaacagggcaagccgccaacagcgatcaatcagaggggaggagcggctcccagatacccaatcagcggccttcaggcgcagatcgtgggcggagcggtagccaggccgcgggccggccaatcagcgggcgagcggctgcctcagcgcgcgcggcgggcggggcggggcctgtccgcgcctaggagcagtgggcgctgagagcagcaaggccaggtgaggagtagggacgaccccgagcctggagagggggcaggagtgggggcgcgcgagggtcggggcggggtctcaggatgcagccgggcggcctctcagggctgcggacgcggcggggagaggtgaggggccgggttcagagttcggggagggcgtccttcccggcgccgcggctgcgggcggaggggacactgttgccatggcagcgcacgtgcgctcgctggcgcggcccggcacccctgcgctcttcaccccggaacgcgcgtgccccttcagccaggcccctgcccgcctgcgccccgcggcctccgtcgccgccggctctgggccggggcctgcgcagggaccgcctgcctaggccgctgcctctccctcgcaccccgggctgcctggctgtctctccctcctgctgtctcctccaggcggcgctgggcaccgcaggcctctgcgttttgaccacccgcgccggttcgcggaatggccacatcctggcgactggcaccagagagatgcaaccgtctgagggccttggggtgtctgtcccccagggaaatttttttttttttttggaggtggagggggcggggttctccctctgttgcccgggctgatctcgaactcgtgagctccagcggtctgcccgcggaggcctccctaagtactggga

SEQ ID NO: 50568 - DNA, 2181 bp, Homo sapiens
tcacttgagcccaggagttggaggttgcactgagctgtgatcacaccactgcactccagcctgggtgacagagcgagataataataataatgatgatgatgatgcagtattttccaatttacagggttgccctgaggattgaataaggaaatctaagtacagagatttagaacagagccctgcactgtgtaagcactctatagatgtgagctattattatcatcttcaggttcctttggtagtttttttctgcttgaataaaatatagcaacacacacacacacctcctttgtccactaatgtaatcccataaaacggagaaactcagcagtgaggacattctgattccaagcaggaaggagatgaacgatgaacctcaggctgagcgcctcacggtttcctcatgtcaccggggctgggggtgcagtttggcttcacactgctaggtcttttcttgtttttaagggggcaggggctgtcacctctgaggagtcagctgtgattgatccttctccacacccagccaagcaccccccagacaggggagcgcccgcagtagggcggtaggcaagggcagttctagccaacagtccctaaatcatcccagcgggggcgcgggaaattccaccgaggtgaaagcctagggggccgggtgaagaaatccccatacccgggcccagaaaccgctccaggtggaagtaacttgtctaaagagaacagggtgtaacgggggtcatttcagggctgttcttttaaatcggtgagcacggtctgtctactttccctcagttgtctagagaccacacgccacccccgccccgggggagtcgcccggtcgagggtcccgggacaggcgcagcactcgcagcatccggacctggtctgcctcgcgccgggagcggcctctttaagagcggccgcggccaacgtgctccgtgacgtcagagcaggaagtgtttgaggaagtcgcgccgcgctgcccgcgttaagattcccgcattttaatgttttcaggggggtgtcatagccccgggtttggccgccccagccccgccttccccgccccggggagcccgccccctgccccgcgtccctgccgacaggtgagtccccctcgtgggtgcggcccgggtgccacctgcaggccccgccgccccgctgcctgcaaggcccggaagacccctctgtgccgctgggaagtcgcagcttgcggactggggagcgtttcacttgtgcgggttggagttcgggaagccgggagaaacagctctccctggggtggcttcttgggggtgggtggctttgaggggaacctgcgatttatgggaacattgtaaagaaacacgtgacctcggcgatgctcagaagtaggttctgcccctgccacctcgggcagaaggcgggcaggcccgggcgcccctggtggagtcagctggggatcccctcgctagggcaagggcgtgggcatcgcctccctcggtgactttcttccttgcctgatgccacagcaaccggatgggggagggtgagagggacaaaagtttgccacaaagtttggaccaaccaaacacattggtttctttacaaaataaaaaaccagttgtatttttcttctctcccattcaagagcagtggtatctcttgccttctccatccctttgagctccatttttttcttaatcctaaccttttttccccatcccaaattgcttatagagttagcacgacatcagtatgagctggtcaccttccctgacaacgcagacatgtggggcctgggaaatgaaagagcgccttgggacagggggatttggaaatgtcatccgatggcacaatcaggtaggccctctgtgcagcttggggaggggcggggagccaggccccctcctcactgcctccactttctctgatcctgctgggccaagggctcacctttggctttggtcatcttgggacagtgaatagggggactgggaagagggcttcaggacttctgagctgactccaggttagtggtctccatgctttattgactatgtcacctaaataaatagtaaaataaagttaagctcttagtctctattatatatatatggtaacagtagaatatcatgtactaatatatactgatattatatgttataaaacatatagaaataggaaaatttaaaggatgagact

SEQ ID NO: 50569 - DNA, 2383 bp, Homo sapiens
ggtcattcttatgcagccatttggaggtcagcaatctctgatttgggggtattttagaattcaggagagaggtgtgaacacctgaataattgattggaaatgtttatactgtttctgataaacccattttcattttcaatcaccgtctactggctgccgtctgtgtgtatactgggagacgcacactgtagcccaacattggctggaagtgtctcctcacacactatgctcctctccacagtgtcctggctgagcgactggagaagtggctgcaactgatgctgatgtggcacccccgacagaggggcacggatcccacgtatgggcccaatggctgcttcaaggccctggatgacatcttaaacttaaaggtgagtgtggagccaagttagccctgaggcaaaagctggggtccccagtggaacatgcagttcttaggacagagcaggggatggggccagctgacctagtgaggaaatttaggctcctgcatcagtctttctgcataagtaaagaaaggacagttgtgctaattgacattggctatgaggtcatagccacagacaggattatgaaagatgcaaatatgcgaaacatggcacatgacctccctccctcaagctaggcccttgctttgtgtggttgggaaatgttgggagtagcagagagaggacctaggcaaatagatgggcatttccttgaagaaatcggttttccagtaacatctgggttgtgttgcagctggttcatatcttgaacatggtcacgggcaccatccacacctaccctgtgacagaggatgagagtctgcagagcttgaaggccagaatccaacaggacacgggcatcccagaggaggaccaggagctgctgcaggaagcgggcctggcgttgatccccgataagcctgccactcagtgtatttcagacggcaaggtgagccctggcttcgtacacaccatcctgtttaccttggctgtgcctcctgggaaactcaacacactttcagatttcaattctgctttgtcatgtagtctgttaatcacacagtgcggatacctggctggtttttaagttggagtatggtgtcctctgtgtggcctgataggaaacacaaatctccttgctggacttgttacttccaaaccctccaagaccggtctcttgcctttattgcaaaaaatgatgctataacactcgaatctctcaagttgcctgcttggccctcttccaagtgtactaaaaaaaaaaaaaaaaaggatgctgcactttcttgagtcaactgaaagtatttatgatggcctctgtgtacagaactgggttaggcacctgtgttaactatagctgtgtaagacatgacctctgctcaaaaagaccttctcagctgacttgtggagctaaagttatcatatgagaaataatcattgcatagggaagtatatagtgaatttctgaacttcccagggaagacagagagtaaaatagaatgtaatacgtttgtaaataaagagtgtgttcagacagtaagtgtggctggaaacgttaaacacttcatggatgcttcctacttgctggctgaagatgatgctcttgctgaacagtggggaaagctgtggaacttcttcattatcagttagaaaagagagggttggatccacaagattcattttgtccttgtccctttgcagttaaatgagggccacacattggacatggatcttgtttttctctttgacaacagtaaaatcacctatgagactcagatctccccacggccccaacctgaaagtgtcagctgtatccgtaagaatttgttatgttttgtttttctaaataatccgttataatatgtgggacaaggcagggaagggagactggactaaggaagggggagccacgtaaaggaaattaatatcgccagtcctcagggcagccttccttatttaggacatgcaaggagtagccaggcaagagagagtacaggaaaccattagttaatttcaacctcctaggacgggcgtggtggctcacacctgtaatcccagcactttgggaggctgaggcaggaggatcacttgagcccaggagttcaagaccagcctgggtaatatagtaagctcgcaagtctactaaaaatttagaaattagccagatgtggtggtgcatgcctgtagtccagctattcaggaggctgaggcagaaggatcacttgagcctgagagttcaaggctgcagtgagtcatgatcacccccactgcatgccagcctgggtgacaagagcgagaccttgtctcaaaaaaaaaaaaaaaattctgttgaaaatatatggccctatatacatatgtgtccaatggttcgtaaagtgttccttcaaatcaacagc

SEQ ID NO: 50570 - DNA, 1736 bp, Homo sapiens
gaatcgcttaaaccccggaggtggaggttgcagtgagccaagatcgcacatcgcacttcagcccaggcgacagagcaagactctcaatcataatcaatcagtaaagctgatgaaaataaaaaagcctgcaaattaatgtaggcacccaggtctccttaaatttagaatcctttcctcaaaagtctccgttgatacagaaacacttttgaagccagatgtgaagcaccagttgacccgcaggtgggggtgccaactggtaggctgtagggttagctctggcctctggcagccagccagttgtctcctaagaaaatactgtggcgtgaatgcaaaatgtgattcatcacttggctcctaatttcttttgattttgtcccctagagcaaggtccgtggtcctgtcagtggaagcccggatagcatgaatgcctctcgacttagccagcctgggcagctgatgtctcagccctccacggcctccaacagcttacctgagccagccaagaagaggtaggtcctccttagcagtgccaagtgtgaccatcaagggcacgtcaggagatcggggatggaggcgtttgtcactggtaaatgtctgtctgatggtattaccacctctctggatgtttgttgcatctgctgggtcctgtggggacaaaagtgatacatgtttggctctcatagtcccttgaaacttactaactagtttctttgtccaaggcttggatgactaactgcttaatgagaacattggaaatgctggtcaggcacatgctgttaccctttatccataggaagccacattcccttcagggaggccctgaagccctctgcccccactcaccctaccagtaccttgagttaccgagtcaccaccctcctcccggtgccactgaccttcccattcttcccgtcctctccctcctcttgcctgaaccatcgcagcagaggtgggggcagggctttctgcctcctgcctcctgcctttctgctgccaggccctgtgtggttgaattaatcttcacgaaataccactctgaccaaggtgttccttagtcagtcataaataacagcttctccctccattatagatgctcaggtctgagctttcgtcaagtctcatctgggccagcagtgcatcatcaaattctcaggtcctgctggagacctcacttgagagctcagggttggggcccagcagtctgtgtctagcagccctccgcccgttctccagcacactgcaggccacttctgctcccacgcccatctcttcctgtgttttgttttgtttgacaccttctgtgtgcagggctctatgggttcctgcaggctaatctctaggcatgggaaacaccgatgattacctggggcaggggaggaggttgggagtgactgataattcaaggtttcttctgaggatgacgaaaacattctgaaactagatatggtgatggttgcacagctctgtaaatacgcgaaaacccttgaattgtacactttaaatgggtgagctttatggtatataaattatatctcaatacagtctgctttgaagaatcttgttcttgtccttgggagtttgtagcctcttttggtgtttatgtgaccttggatacttaattttctcttggctgtatggcacgcgcttgtaatcctagcactttgggaggccaaggcaggaggttcgcaggagttcgaggcaagtctcctgggcaacatggtgagactgtctctctc

SEQ ID NO: 50571 - DNA, 1471 bp, Homo sapiens
gtaaatttctcagatgtaggtcatcatgttataattagggttccattgctcatgatctagatgaaacacttctccctttcttgtggtctcttcattaatttggtccctaccgcaaaggcagggggattaaaaataaaatatcttttgacactggttggcaggtgtactaacacgtgtgcgggaggattcctgttctcggcatggttcacgccgggctccggcagcgccctagtacgtaaggggctgcactggagtgtggactgcccggtatccttagagaaagttttgacagtgtgacgccagtgtcgcctctaaccacgtacaaaacgcgccatgcattgggtagctattacagtgcacatttttgtgcaggaagctaccccaccagcgcaagtatttcagaatcaagatcgcactcccgtttccccttctagggaaaggattccagataaacactgagaaaacagatttaatatcttaggtcaaaactccaggtcttcccataggaaggcccctgggctgtcattctgaggtgcctatttcccccgcgccgtgtccacgtccacgagtccacgaaccctccgagttctctctcctcacctgccgagggctcgcccctctagccccgccccgccccgcccaggacgcgtgacgtcacaacaagcgccgtgcgccccgccccccatcgggggcaaccattgttccgccggtcgcgccggagctgggttgctcctgctcccgtctccaagtcctggtacctccttcaagctgggagagggctctagtccctggttctgaacactctggggttctcgggtgcaggccgccatgagcaaacggaaggcgccgcaggagactctcaacgggggaatcaccgacatgctcacaggttagcaccgggccgggccccgctggctttcttctttccttccagcctcttcccctgccttccttctctcccacaccgacagtccagtgggtagggtaggttccttgcagcgggtcgtcttccgtggggatctccctccggcgcccctggctggttgtcagtcctgccggctacacctgggccatcgcttgggctgcttttggtctggcccttggaggaaacgggtggtcactgtctcttagaggctgccatatccccttccagaaaacagttctcgtttgtttactcgtggttcttgttcacccgagccttctgttgcctttcagaactcgcaaactttgagaagaacgtgagccaagctatccacaagtacaatgcttacaggtgggacagtgcagcattctcgggtagcatacgttctgggataccctgtttagtgtggcaattaacaggactgagggcccagtggatatttggtccatctgcaagagcgggaaaaagcaagaatcgaggctggtaccttactatttcttgaagaatgtgggcagtgcgttataggatcagttcagataagttcccaat

SEQ ID NO: 50572 - DNA, 876 bp, Homo sapiens
aaggccactcacccatcctaggatagaccctatcttgacttccctgtctttcaatcatacatctggcagcacatctactggtattgccaggaaaggcatcccccagacatatttccagaagaaaacaggctaaaaaacaagaagactgggtctgtttatttgtttttaaagtatagaagattcaggtgacaataagaacaagaaactaaggcctttatgttgcgacataggaatccatctcagtgggtggtttttgacaaagtttggatgttatacctgtggttcatagtccctggaacttaaaaaaataccgtagttgagcatgctgttttgacatttgtaatcattgttaggaagagaagcactcgaggtcaactttcaaatcaattttagagacaggtaagaggtggtttgtatctttcattatagaagaataaatttggatacagaagatagagggtcttattctggctccattactaatactctgtatggcattgggaaggtggatttacttctaaaaggcctgagttttatctttaaaattgatatttgccctacgtcagaagaccgttatgcagatcaaaattaaatagtatatgtggaaactttgaagagtttgtacaaatatttgatgtacaaataagaatttgcacaacttcaaagataatggatcttccaagagttgtacaaagagagctgcacaaatataagatgtcatctgtgtggaaatgggtcagtagaggcaggtgacctggtaagggttagattggggaacaaaagaagggatagaaagagagaggatggtgccatgaaaggagaacagaatgaggagagtgagcacccccagggcagcagttgtattcagtcagttca

SEQ ID NO: 50573 - DNA, 1737 bp, Homo sapiens
tcttctcctctacagaagagctttttctcctccacatcctctgcccctttgaattatcatctctcactacttgtgggatcttgaatcaatcacttactccctggggacctgtgtattctcatccttaagacgagatgacctaagagtgacactcttgaagtctggtcagtctgaaatgaaattcccataagaggctgggcgtgggctcaggcctgtgatcccagcactctggtaggcgcaggcgggcggatcacttatgccgtggagttcgagaccagcctggaaacatagggagattcccgtctttaccaaaaaaaaaaaaaaaaaaaaattaaattagccgggcgtggtggcgcgcttctgtggaccctcctactcaggaggcttaggcaggaggacggcttgagcccaggaggtcgaggctccagtgagccaagatcgcgccactacactccggcctgcggcatgcctcaaacctggggtccggcaccctgcggccttttcgcggccgcacccatggcaacagttaactagcaacctcgcgcattctcgcgagaatgagtcccctcaagggcacaggtgcggtccccagcctcttgggcccccagtcaacctcactgtccacaccgagccctcctgcgcacgcgcgctgcggagccggacagttggtggtgctggcttggcccggctgttcgtctccgcgccttgctccgaagcgcgcgaccgtggcgcgacacgccggcgcacaggcgctctcggggaggggcggcgcgcaggcgcggctgggggtgcgaggctgcgcaggcgcggacggcgttggtttgaagaccttcagcgttgccctggcggagcagagacaggccctcggggtggaggtgaggagagctgaggccgcgcgggctccagtcccggagagcggtgggccgcggccgagcagagcgccaggcgggaggcgggcctaacggaggctctgtgggcagggagcaggctaccggggcgcggggggccggggccgctcgctcccgccgggacccgcccgggccacctcaggcgatggagccgcagcacggcggggcaagtggcctccgggcgcgggcagcgacctatcccgccggcgtgtggaccgcactttcctcccaggggtcagctagaaaggagatcggttctagggaagttggatcctcgaaccccacacccatctcccgcccgcccctgccccctccttacggccgagggagggtgccctgcgtgcaattcaaaacggagaagcgaggaacgaaaagggctctgtactggctgtcaagttagtggctttgtaaagcagtagcaaccggcttaacgcctttccccgtctgcgtctcctgcagcctctgtgcagtgtgcacatctatgggcaggtgcattctgtagagctggtggagacgtgtggttgtagctttactctcgaggaacatgaagtttctgttgttctcgatttttgcttgatcatactagcagtgcatttcccatcagagtcataggcctgaaaaagtcagcttgaactaggcagaattgaggtcagttagtatactaaaccagctacgtgacttttgcatagtatctcgtactggttttgaaaaataacaaaacaaaatgctgaaatattgtaaatagtccctagacgtatatatagtgcttctaaacatttaagtgtatcttttctcggcagtatgaaaaaccagactgtaaagctttaac

SEQ ID NO: 50574 - DNA, 1010 bp, Homo sapiens
gttacatttttcatgcaatcggaaaaacatatttggtcattattttcagagaggaacaagtgcctcaaatgagcaaaagattaagaaatgagaaatttagttgcatggcttttcaaatatgtggaatgtgtccagtttcctggaacagcaataaccaaatctgagtctgtgataccactgggtgtggccaacgacccacctccacatttacgcataagcaatgagcacagtatattatcatgcatgtgtctgggagagtttacaggcctggcgagaggtcactcatctggagggtgaccaaggcaggaactgacaggccccagagaggaaaagagaagcctggagaatgaggcaatcctatcactacgccactatcccatctcactaggaggaaaagctagaggccccgccagggtcaggaagacccttcaggcctcctcgcagctcactggccttagctcctctcccctccctcacaatgccctggtgtcactgtccccttgcaatcccttagaaagaccaggcacactctcacctcagggcttttgtacctgaggatccctctgcaggaagaatcttcccccacagctgcacagctccctcctccctgcattcaggtccctgctcaaatatcaccgttaagagaggacttccctgaccccagaaggagcagcccctcccccatgccactgttcctgcttctgggagggagaggagatgccatgagatacatccatgaaataaaaatgtcactgcaagcttcgtaattatggtattctattattggagagccaaggcactgtatattttctttgaatggtatcaagcatataaatgcttattgagttgaactgaataaataccacaccatatacaatataataatttgacccatcaataaggttatttaaagggaaaaatcaggacacacaattttatgtacactgtgattatggcaatgttgaaaatgcatataaaaggccgggtgtagtggctcacgcctataatct

SEQ ID NO: 50575 - DNA, 1836 bp, Homo sapiens
gattgggtgaagtagccgggtttactgtgtcttttttttttttttttttttttttttttttgacacgaaatctcgctctgtcgcccaggctggagtgcagtggcgcgatctcggctcactgcaagctccgcctcctgggttcacgccattctcctgcctcagcctccgaagtagctgggactaaataggcgcccgccaccacgcccggctatttttttaaattttatttttagtagagacggggtttcaccgtgttagccaggatggtctcaatctgctgacctcgtgatccgcccgcctcagcctcccaaagtgctgggattacaggcttgagccaccgtgcccggccggtttactgtgtctcaatggaggactcccttgctgtgcaccttgaatatggcagtggctgtactactgtacatgctgtcaaaactcatgaaattcacacaggtgaaccacaggagcgccctgggtgggaagagcggctggcacaagccccgagcagcttcgccatggcctggttttgcttggggacgttgttaatcatcttgatgttccccttggcactgtgtcagcccggagatcccctctcctacttaaacagccttagacaactcatttccacaattgtgcctatgctctttagcgcggcttttcttcttcacactcacaccctcagcccaccagcctaagtccagcaagcacctgcctgaggaaaaaggcttgccaccttctttcctctctgtggttacaaaaggaacattcatttctcctgcgtggagaagggcaacgagcacaagacctgcagtcggggactctaggtccattcccgtccggccagctcctggctatgcaaccctgggcaagtcacctcaatgactcacctgaaccgtggggactgtggcagatgcctcgccactggttacatgtaaacgcaaaggccaaagctcaatgccagcaatcaatatgtggtgactgttaccattcttagcagataaagccctggggcaaaggtcggaaagcataaggccccgtcgcagttctgttcctctctagtggctgaccctgggtacctcaacacgctttttgaattgcggcatgtataaaatgggatagtgatggcgcatgcactttacagaattattgtgaggaacaaacttaattgggtagaagtgtttcgcctcaagcaacttgtaattactggcatcgctgtagtcacaggaagaataacaaatgagaggttccagaatccttctggaaggatctttctcaggcagccctgtgccccactctcttcccagtcctgtgggtttccccagcctcctcccttagacctgctcttcttcctcaacacgcagacactgaccttgtttttgattaaagactgacacatgttgtgagggacagggacttttttttttttttttttttttttgagaccgagtcttgctctgtagcccaggctggagtgcagtggcgcgatcttggctcactgcaacctctgcctcccaggttcaaacaattctcctgcctcagcctcccgagtagctgggattaaaggcacgcaccaccatgtccagctaatttttgtatttttagtagagacagggcttatcaccatgttggccaggctggtcttgaactcctgaccttgtgaactgcccgccttggcctcccaaagtgctgcaattacaggcatgagccactgcacctggcctggacagggactttttaagggaagaagggaagcaaagaggtagagaagagaaacactaaaagggcgctaagaaaaaaaccactcaacgtggtaaagacactttggaaaactattggcaa

SEQ ID NO: 50576 - DNA, 887 bp, Homo sapiens
tttctttgaaaactatttcctcactctgagaatgctcatggctcttaattccccatgcacgataaagatcatctttcttgcactctgtgctttcaaagctatcttccagctttgcaggagaggccatgggtgcagaatggggtgcagccccatggtgtcccctgacagatccaatgtgcagtctgatgaagtgtgggtgggtgtggtctatggctggcagccaccatgatccaagagagcctgacttgggagggcagccaggcagctaaaggctgctcccatatcatgcgggagcacctgggcctggccttccagaccccgagggcatccagccagctgggtgttctgcttgctggtctacacgcagccactgagcatctcggccatgcagctggccctgagacagcagcagcacaaaaaggcctccaggccaagaggtgaacagggcacacgactaagcacaaggcctgcatttggaccaaagggcaccctggcaaacctaagcccagagtgagccctcgaaactgcgggagggaggtgctaacagcccagcctccagcccacctttcctccttcgcagaggtcaggacaatcacagcccttcccttctcccacccactgtgcctgtaaaggggggctgagatgaccaggcatcagagtcactcatttatttcctcactgcttctctcactgcatggaatgttcagggaggtcagctgatttccctgggtacactcacggggtaatggacacaatgcgtacaaataaaagacccagaaagcacccccctccaaaaaaggggagcttgtcaagctccctgtgcctgcatttttcctttagaaaacttggggctaggccgaacgcggtggctcacgcctgtaattcaa

SEQ ID NO: 50577 - DNA, 1105 bp, Homo sapiens
ttagaatttatttgtattaagtccatcctatgtgtgcccctgggctatttgttgtagatacaaaaatgttgtgataaaatgtgtccctctcctctatctctagtgagagctgacacacagataatacattccactgtgcttggattcgttagggccttctatgttgcttcctgctcctagggtgtagtgggtagggtccaactttccttgcagccccctctcttctgaaatgggctgtgtgaagacagggacggaccaacctggccacagtctgtgatgtaaagtgctcatgagccaacaataagctccccaccccccatatgggctacacgctacctctgcccagatcccctgcaggtggctgtgaggtcacatggggaggagagtctggtaacactgataaaatacagtagatccatatgctaacacaatattattctcacattatctcaggtgagcctcatttgagaggaacactgtcttagctcagaaaagtaattgcaaaattttcctggttaattattaatcttctctaagtgacaaaaggaaatccagagcaaagtcagggctggaagggactttgagaggtcatttatctcctgactttagagagtacattgaaaacactgcaaacaaatataatcccatgtttagatgacttcaggaaaaagggttacattttttggcatccagattgcccattttataataccctccatctttgcatctcatccagcagacctcaaatgtcaacgtgcaccagaatcacttgggagattttttaaacacaggctgctggccctaccccatgttttctgattcagcagggcctgggtggggcctgagaatctgcatttctcacatgtttccaggcggtgctgacgctgaagaaacagggtccccactgtcggcacctctgttccagcccaacccttgctggacctgacccttttattctagatggaaatagataccagtgggtcaccattctttgccactgagacacacatatacttgaagaacaattcaagagtctcccggtcatttgtttcctcttccaggctaaataatagaagttccctaccctcttatcataggtatcatt

SEQ ID NO: 50578 - DNA, 458 bp, Homo sapiens
ttttaacatagttgattttttaaattatattggaattctcttggggctttcatactgctctacattcagaacagccacctatttaacaaacatctgttaaagcaccatcaggaaactcccaagcatttgcaagatttgtataagtggcaggatgcccatgaccacagcagaaagtggtgtcaatgacagttctgcctttaagaggctcataatgtgatgagtcatgacactgtcccacggtccataaacttatcatataagggagtaattagtaagcattccaaaagttaaaagttcattccaataggaacataagcaaagaagaggcttccagttgtgttaatcaagaaaggctggcccggcgcggtggctcatgcctgtaatcccagcactttgggaggctgaggcgggcggatcacctgaggtcaggagttcgagaccagcctggccaatatggt

SEQ ID NO: 50579 - DNA, 1616 bp, Homo sapiens
atggtacttgtgcattaaacaggggtgacaggagagtatggcaggagtaggtttagcatgagcaaggtggggtggggatataaaaaattagttttagacatgctgtgttcaagataatacaagacatacagatgacagtatctgttaaatcagaaaaaataggaaagagatcaagaggtgagagaaggtggtatggtaacagaatatagtatttctgagttctctccaggtgccggcgctgtgctgagtgcttactcacaatggcaaaagtctatcactatctttcttctgcaagtgagagaacagacctaggaaaccagggtcacacagccactaagtgctgaagccagatttgaatccacgaggctaccttcctaacctctaacccaccccttccccgcactctaaaaagtagaaatcccggggtcataagtgactgtaacccccaccccaacagttctaagactgctagtgtgtcttagaacaggggtctaagatacagggttttttaaacaaagttttatataaaaatgtttgacaatatttatgtatttccacagcttcaaggatttttatattgtttcaattatcaaagagtcataagggatagcttagtctcaaccaacaaatattggcagtgcacttccacaggtcggtatgcaagcttgggtgcaaaccatgggcatgacacagcatgacaccagtgccacacagagctgctatgcaagtcagaagccaggacaactagtctagtggagactgtgcttcctgaagccatagcgagggcaggaagtgatgaaatttccttttttaatcatttttgtaatttggaaaactgtgattcttctcctctctaaagtaaccaaaatgaaatcttaaacactatcctacaagtccagactagttacttcaggtggaacagcagagtaacttacgcactgcagtttcagataaaaatcggttatttttcaattctcagcacctttgaaatagctgtactgacaatcacgtagcctttgagtcaaaagcactccttccataaaagtacttttaaagggaatacaatattatcctagaattttttcctgttttagaattaaggtacctaagagaagaaatataaaactccagttaagaacttctgaagtcctgttttataacctctggagctcagacttgtccatggcttggcttgaagggttccccaacctgggaggtcattgctctctagggcagcgcatcctattgctggagagctctcaccaccacaagattctgtcttagaccaagtaaaaatcctttgccttataatctctactcattcattcagttactgagcacagaagagctacataccatcctctggtcttcctattccctgatctataagggctgctaccactttccttttataccatccttcagatccaacaaccaaactcctttagcagcagttcctgatatgacttcctttctccatccaccactagtcctgcctccctcgtttgccaatgtctcacctaaactgtggttcagagacttaaacacaattcatcaacggtgctctaactaacccacaaaacaggacaacagactcgatgtaatctaggcaccca

SEQ ID NO: 50580 - DNA, 549 bp, Homo sapiens
gacaaaagctagaacaatctgagcaataaataaagtagcattggattataacccagggtatattcatgagtatatacagatataaatgttgaataaagaaatggaggagatagatacagctcctgtacagaactccaaatcatctacatagatattctgccctcaaggaggtaggcataacttcccactcctgaagcgtgggctgccttcccaagagggaagcacagaaacaggtaagaaggaggaactctgcagtggtgaagctgggcaaacacgaccccagcagagtgactaaggtcaacatcaacactgatgagtcatgttgactgtatatacctctgaaatgatgtgatgaaaatggcctgctgcctctgtgatctccctccctgaaactcctaaccccagcataaccatgagaaaaacaacagacgaatctcaactgagcaacattctacaaaatatctgactggtgaactgaaaactgtcaaggtcatttaaaaaaaaaaaaagaagtcttagaaacatcacagccggctgggtgtggtggct

SEQ ID NO: 50581 - DNA, 5164 bp, Homo sapiens
aagcatgcacaccatttggcacaggcccggcaaacaatcagtactcaacatcacctgttattttcctgattttccaactttagagtcaaactaaatgttatagaattatatgtatgattatgtatatacaatatatataaatacatataaataccgtaaattaagctagtatgttattgcgtaaagtaatggtcttaccctagacgaaggtgagtttaattgtaacagatgaaacaaagaatagaaaacttgttaagaagtgttcaatgtaagctctcatctctgcagggtttcatgtgacttataattaccagtcagctggtcctagagaacttaatcaaaatgtatagtaaagacgaactacgtggaccagtggccatttatctgcaaggtggcaccagccactgacatctgatcacttccatactgatgctgaaatcctatgcaaattcattacttaggtcaagctgggaaacacttctgtcaagtcactacacaattaaataaaaatacccaaaagggacttacactgacaatgctatagcatcctggccatatccagttttgaaaacactacggtgtcagccacgcaccatttaggacggggagaatggaaagccagtttggagaacagacgctttcttaagagtacacgtgaatatgaaaagggactctatgctctcaagaccaaaaaagaaatcctctgcgccgcccggctacattgcgcctggtgggacaatgtacacgacccctcccccgccgagtcccaccccaagcgcgcacagcggagcaggaggcgcccggcactcgcaggtaatgcccggtccctgccacttccgtcgagttttcgcaaaggcgccgcacggcaagcgacggccaggtccacgtgggccagcaggcgcgggggacgcaacccgccgccgccgcgagccccgccggcgccgaccagccctggcccccacccgcgggagcccgggagtcgggccgggggctcgcgggaggcggcgcgcgcagcccgggcgggggtcgcggcgcggtaggggaaaggagcccggctccactcacgcgcccgggggcggcactggggccgccgctgcgtctctccggctcaaaaaactgaaaaggggaaaggaaaaaaaaaaaaaaaagacctggctcctcgtttcatccggaaaccgaccggccggcaggaaatgacgaaggcagagggcgtccaggtccgctcggtaaccgtttcccgcgcgcccggccccgactccggggtaaagagccccggagcggagcagcgctggccgcgtgccgcctccggagccggcagcgtgagtggccccgcgtccccgcttctcccggtccccggcggggccgcgtcacccggccccgccccgcgccgcccgccccgccccggacgcgggggtaaggggggtggccgcccgcctgccctcggtcccgtgcggtccccgaaactccgagcacccgcccggtcccggcgcggagcccctcggcgtcgcgtggagctgcgagtcgcccgcttccggaagcgcacacgggccagttgcggcggcccatctgccggggcggcgggggctcggcgggagggttgaggctgaatcacgcgcagcctgcgggcggcggaaacgtccctagagcctcgccgccctgggacccgggctgcttcctgggagaggattacattttctccctgctccacttgactttcttccggaaggagcaggtctcgcaggatcggggccaagactggaagagttcaggtttgggagtcgtgtgtataacagccccgcgcctccacgcccaggcctgtgtggctttggacaagttatataaccaccgccgccaccccagtttcttctcctgtaaaatggagctttagtgccgcccagcagggttgttgggataattcagtgactctgtggactgcccagcacctgtgaattgctttcctggatgttgggtgaaggcctgtgagcttgtatgtaccctttggcttcagaataccaagcctttagtgtttcagagggatgagagaaagaaatcccattttttgatgcagaggattttgttgtaagggactctaggaactaagtggttccaatgtgaatttgtatcaaagtaacaaagttctaagtgagagacaaaaatgataacattcaaggcacgatgacaagcggtggtcaattttagaatcacctagacgtgacatcaggaacccaaaatcacgacacagattttaaagcttatgatacagtgacctagtccctagaaaaagtagttctcggctgggcacggtggctcacgcctgtaatcccagcactttgggaggctgaggcgggcggattgcctgagctcaggagttttgagaccagcctgggcagtatagtgagacgacccccaccccacccccgtctttaaaaaaaaaaaaataagaattacccaggcatggtggcacttgcctgtattcccaactacttgggaggctgaggcaggagaatccctcgattctgggacgtcgaggctgcagtgagccgagatcgcaccactgccctccagcctgggtgacagagtgagaccctgtttttgtaaaaaaaaaaaaaaaagtagttctcatcctaaaagtttgtcaatctaaaaccaacccctagttgtaatatattggcaagtttatatactcttgtttacttgagacttaattcagcccatcctagcctctccttactgaaatagttcaagcattacattacaggaaaatgtgaaaaatggtgtcttgctttagattccagaggaaggctgtggtggtatgcagtaagcacgcagcaggtgtatgtgtgtacacttggttacactgtggcatgccggggaggaggggacggggtcatagttcaggctgcctgtgggctgtgggtctgtactgtgactcaggaccagagcactccttactcctggcagccttataaagtcatgccattgatcatgattgaggactgggcgggaaaggcctcccctctgcaaatctttcacaactacactcctaaaaataactcaagtgcatgtgcctggaagcgcagaagagtgacttcatgacataccaatcatgttgtataatataggttgtataattcacgttaaaattttaccgttctatgtcagcagtaattagaaattttttcctaagtgtaattaaagacctgcatatttggggcaggaggaagtagcgcttttgagtaggaatataccatttactgagtggcacatgaacagaatcttgtgaaaaattaaagtaagaaattaacctggttctgatccattttgtcattagaaaataggaaacattttttaatttgtcagataaatgacacccgtgaaatgttctagtggccagtgctgtatggttccccgtttcttgcctaatttgttaataactctcaatcctgaaagctgcctcccttgctgcataattgtcctgggccttctgcagcatctcaaatcagacacataaagtcatcttttttttgccaaacacggtggtggtggttgctattttacactttggcaccaacgaagtttgagattccataaattataaagacagttatagtgtctgggcttccaaaagtttccatgtctaaagtaggctgattacttactataaaccataaagttacattcagaggaactctggaatttagttttgaggaataagaattgaaactctcaatatgtcaaataccggccgggcgcggtggctcacgcttgtaatcccagcactttgggaggccgaggtgggcggatcatgaggtcaggagatcgagaccatcctggcttacacggtgaaaccccgtctctactaaaaatacaaaaaagtagccgggcgcggtggtgggctcctatagtcccagctagtcaggaggctgaggcaggggaatggtgtgaacccgggaggcggagcttgcagtgagccgagatcgtgccactgcattccagcctgggtgacagagcgagactctgtctcagggaaaaaaaaaaaaaaaaatgccaaatgccaaatacctctgtacctctcactcaaaaaaatccacagccagtctttagtatctaggaattgggtatagtctagtgtttaaacaatatttagatagtgcatctgcaaatttttacaacttaatttctgtttttattgttctctggctaattttcacgagacaaatctttatattcagcagacacccatagttagtttagtcaaatcactcctgccctcagtgtgaagagttgaagttaaatggctgttcatgatactcactttattctaaaggagtacagtatgtccccaaacatctgacaaagtcacgttgtcagaaaggcagaaacatgccatgtggcttaggaacagacctctcctgaaatttcatttttctcatatagaggcaagctaaaagaaagaactctgccctcaaaacatgtatattaactagctggccaaatctacactaatgaacactttggaggtttacagcatggactcctgcaagacattttagtgaaagaatttttgtaatgccttcattgttgtaggcagcgtagaaaaaaatcaccaaacaactttttagactgtttttcttggtattagaaaatgactgattctcagaaactacagtgcaactatcacttatatttgtccatttttctcctgtatatagagtgtctaaaacaacacttctggattttctttacatattaggtcattttacttagacttaccttttatgtcccaacacaagggaggaactctctttaaagaaaaattcagttaacttctcaaacacaaagaagaagtcattacttttacttgctgtttgatgcacttgctgtgaccactctaactttctgtgggaatgtccaaagaatgcatttcctagggtagatgtcacagctgtgtcaatagcaaaatgtatcttttcatcccatagcttctttcaaccaaatttgtccagcaggccaaaactagataaagctctaaacgtttcccagtgtgggaggcatgcggggtgagagagccatgttctggctgtcacatccttgctaggctgctgtgcaacacttttgtagcagcacagccaggtgttgagtctctgtggtttttgttttttga

SEQ ID NO: 50582 - DNA, 739 bp, Homo sapiens
aaaatacaaaaattagccaggcgtcgtggcatgcacctgtaattccagctactcaggaggctgaggcaagagaatcccacttgaacccgggaggcaaaggccacagtaagccgagattgcaccactgcactccggcatgagtgacagagggagactgtgtctcaaaaaaaaagaaaaagagaaaataaaaaaaaaatggtacagagagtgggtttctagtaaaaggctctcagggaacatgtggagttgggggctactgtagattcccccgtagcagggagacagctgatgatctattctgtcagcagacaaggcccttgggatgctagggagttttgctggattacagcccctttaaactggaactctaactcagatatcaaagcctttaacaaaacgtatcatcaaagtgacagattccagaccaaggtggcttggctggaaacagaaaaaacagagccaaatatttgaaaatgctgagaaccagtttcataatcacaccaaactgcaataaatgaattctgtactttgctcctaactgtatggctaaggtttaaccttcaagttgaactctggcaattgcaatcgagggtccgtggtaggaacctaaacaatgagcaaacccaaacttctggggcagccaggccctgggtcttcctggggcacttccctcacgtaccactgctgaacaaatgcagggaggaaaccttaggaaacctctttggatgatagggttgaa

SEQ ID NO: 50583 - DNA, 416 bp, Homo sapiens
agcttcttgccaagtaggctgttgccctctggagccacctggactggtctcccctcagctcgtctatgattttggagggttactattaacacctgcttcacaaggttatcatgaggctgcagtgtagcagcaggcacctcataaatgacagctgtgtggcccgtttcaccagcgtggcttacatcaccccacctcatgtttatttctgagtgatcactcaactcaccacgtgctcgtcagcccatgggctcctgtcccaaagtaggaatcagatgcaggcaggcgccaaacctgcagtgcaaacagcctgcaggggaaggggtggggatgccattgcggccgcagagtcagtgctgagaactgccctggggcagccacagcacagcactggcccttgctcctctgtgaccccacag

SEQ ID NO: 50584 - DNA, 1728 bp, Homo sapiens
tatttacctaattataaaagataattagctaattacctatggctaatctgtatagtttacccctggatctgatttcttacctatcatctgcgtatagctgtcaggaattcttgcaaagaaaacttaacataaatgtaattaaaatttgtaaacaaattcagctgaatgaaaatgttatgtcacattttacaagcgtttatcataagtaattacaactctgcacttttttcctattttcaagagaatatttttgatcctatcacttaactgtgctacctactggataagacagctctgaaagctgtggggcagtttctttcgaaagagctttctctatgcacaggtaatgccataataaataaagatccgtgtgagtcattttattatgatccatgttgtaactgtccatattatcattattgtgtgctgaaaagataacgatttatctcggcagtacctgaagctttctccaaaatacagggtccttaaagcttagttcctagagattgggggcaaaaattctccctgatttcccagccaaaaaacccttaattgctacgatgctggcctcccatccacggcaagggcgaaaagtagtgatttcttcgtttaaaggcctttgtttctattttaaatttacccctaagaccatattaaaacacctggctgctctgtgaccctggtggtggcaaaacccgcgccaccctaggcatcgcccgtgggctccgaacgcgtcaacccaggccgtgagcgaagcctgcaaccagggcctgttccaggagcgcgagaaacggctgccgcggcgacgcgcgccgagaacgcgcgatcgggcggcggttcccagcgggacgcggtgggaaacgcccgacacggccggccccagaccccacccgcccctcgcgcggacacgcgcctggctccgcccccggccccgccggccgcgcgcccccaccccggctgagaccggccccgcgaggcgcgcagggtcctcacttgtggaaagaaacgggcttgtccttgtcgtagcggttcttgcagccgtaggcggagcaggactgcaccatccttccggtcctcaggcacttcacttctgccgccgcagaaggcaggggaagctgttctcagtgtcgctgcgctcggttggattccctcgcttcttttgtagctttggccaacagttacagtgatggtggcctccctcgggggtgactagtgtgcccgttttgttgtttgcattagcagaaggaccacagccatcgcccgtctcccatctccaagatggcggaggcagcttcaacctcacctctcgcgaggggtgcgtcccactgtctctgattagccccgaggtcagaggtaacgtttcctgggaagctaactattggctgaggccaggtgtttccggcggtggcttcagagttgccgaagtgggcggagccctgagcttccggcaggcaggaaggaactgcttgtggggggaggaggcgcggcgggaggccggattcctggggcatcctccagccccgggctgttcccgtgggttaattgatgcggaccttttctggggcagcttacagtagggaacaactagggcctcttggagaacaggtgtaaagccgaggtcgttggctgattgcgcccatttctttaaaagggcggacacagatggtgtatgattaataaaattgtggaaccttttcccagagtgctaatctttatcccattacctgt

SEQ ID NO: 50585 - DNA, 2859 bp, Homo sapiens
ccccactcaatgctgtcttggcagttttcagtgctcaatgagaaaacctactcttaatggaaaaaaagtgggggaaaggggttccaggaactacaaagcaaagtgtgtcttgggaagttagctttgttgcactccaaataaaaatttggcattgggtggtagttatgcatactctacgcatcgacaattctctaaggactccaaagtgcatgtcctggaaattccaacatatttgcactacgttccaggtacactagaatgtttatagccatgttctgagtggcctcagtctgaacaaaatgcccaaccagagtagaatggattcactgttctattcacactggaatactaggcaacaattaaaattacctatacatacacagtacaccaatttaatactgattgaaaaccacaaaacaacacactgtgatccacccgcaaaagttcaaaaacaggcaaaggaaaacgacatcgcatgcacacatagatggtaaagctgtaaggaaatgatcacactagtcaggctaggagacaatcaggctccgaaaggagcacagggcatgggtgagaaactcctggggtgccggtaatgcccttttcgtttttatctgggtgttttattaattcttctttaaacgtgtatgtcgtatgcacttttctgcgtatgctatatctgttaaaaatttatcggcagcccagcagacagattcgtgcctctaaagaggtggaagctccagaacgatccgcctcgccattaagcgaaggcaactccgaacgctgagaaacgcaggcccggggtcggccggtgtccttacggattggcgagcgggcgcacacccctcctgcattaaggagagttctcagggtcacgctccgagcgaccctagagggagcggcggtgtcctcgccgccgccaaacccacctagagccgctctccgcgtcggcccctccaccgtcgccggcgactccggacagccgcggggcgattctggggcttccagacgagggaggggcccggggggaaggaggcggcgactcccgccgccccgcagagcctcggcggccagagctaccccaagaaggccagaccccgccgtccgcggctccgcgggccccgatagggtgggcgtggccgccgcgcgccggacgtacctctccaccgcgaaggaactacctcgccagttcccggcgacagaggacagattatttccaggaccgctcccgccacccctcccgggcaacccactagacgtcccctttctaatttggagtgcgggtgcgggcgcacgcgcactgccgagcttccgcgagggcgcgaccggacggcggaggaggacccgtcgccgcagcctccagggcggagcgcgtgctcgcctcgacacgcagcgaactggtggcgggggcgcgcccggcggcagcggcggcggcggcggcggcggcggcggcgcggcggcgcgggtcggccggggcgcgagcgtgcgcagtggctcctcggcctcggctccagccagggcggcggcgctggggaggagcggtgtgggcggccgggggcggggacgcggggcggcgggcgtgtccgaagtcgcgcgcggctggcgcgcggtcccgagtgaaaggagaaggaggggcgctgggggtgacggtgcggagccgctgccagcgctgggcgagagtcggcggccggatccgaggagcaggcgggcctgaggccgagtcagctgcgcgggcccccggatcccccgacagagcggcggcggtgtctggccaggcggtaggcgctgcctggccgcggcggggaagatgttcagcgtagagtcgctggagcgggcggagctgtgcgagagcctcctcacttgggtacgtgggggccgcgggccggcgggaagaccccctccccccgccacctaccgggaccctccacgcgcggcccgtggggcgagcgctgcgggcgacggtgccgtcacatccggggcctggggcgggcggggcgaggaggctcggcccagggtccgagagagacttgccgggcctgaggcgtcgctgttccgggcggaccccggccggggctgggctgggaacgcggcgggcgactctgggatccgtgcggctgctcgcagctggggctgcgctgcgctctgggggtggccgagcctgactgccccgcgtccaggacccgccgccgctcctcgcctttgttgccgcgttcgcggaggacgggcccggctccggcccgggaactgaaaggacctgtgagggagcgtggggagaatgcgggaggcgcccggggaccccgtttcggatgcaaggcaccgctggcggtgggagtgcgcgaggggcggacgcctgtcagaggcgtcgggcagacgtttaaaggagtctggaggtgtctgggcgtcaacaatggaactcgaaggccttgggggacagagtcgtgggattctgattttgaattcttaaacggttttagattcctcatactttgaagtaaatacatgttcacctctcacgtcagctgccgcgccttcctgaagccgggtcttcaggacgcggcaggggaaccgacgcccgggttccagtcgttctcgccgcggcgcggccggggagggggagggatgcgcagagcccgggcggaccccgcgctgccttcgggagcctccgtttcactcattgctgagaatgttaattaaatgtttacggatgtgtttatgaaggctactacagcatttgtattacttttaaaggtaaaacacgaatgtgagagaaattctctttagcggtgtcttgggttacgagtcaggatccctggagtgtagacgtcacgatcctgtgcaaggcactttgctggaaaggctggagaa

SEQ ID NO: 50586 - DNA, 947 bp, Homo sapiens
cttggcccttcttgtatttctttgtatttgtttgacaataccacaactctggttaaatctactcaagatcatcactttaccagttctcccctctttcttgcatcatcatttgcccctcctctactggatcatatccttaagcatagaagcaaactgttacttcttttatctttaaaaatatttctccaccgggcgccgtggctcatgcctgtaatcccagcactttgggaggtggagatgggcggatcacttgaggtcaggacttcaagatcagcctggctaacatgggaacctgaaaccccatcatttgagtttcagtatggcattccagagatgtatagaaattactcataaaagttgaaagaggccaagagccagatgccgactttagatactagggaagtttaattccttctaattttccctagataaggagttttgcctcctggtggcctgtttgttagtcactgggtggactttgctcccttctaaattcctcagataaggagtttttgtctccagggactgtccgatggtcaccaggtgattttcactttcctcagtctctacaaaaatataattagctgggcatggtggcgcatacttgtagtcctaacctcccatacctgggaggctgaggcaggaggatcactgagtctcaaagtcggattgtgttacggcactccaggctgagcaacagagctggactctgtctcaaaacaaaacaagacccaaaaaacctgcacttgtcagggctaccgtgatgtagatattgcctgttattattattattatttttaaagacagagtcttgctcttgttgcccaggtcggagagcaatggtgcgatttcggctcactgcaacctccactttccaggttcaagcgattctcctgccccagcctcccagttagctgggattacaggtgcccaccaccatgcccagc

SEQ ID NO: 50587 - DNA, 2388 bp, Homo sapiens
atgaagcctccaagtaacaggcttcagaaagaatagattgtaaatgtttctcatcagacttaaggtcggccttgatgttaatgacccaccctcacccccacctccttccatcatggcctgaacaagtttttcaggttaactttggaaagcccttggcagagaggaagggtctattcagatggtttggtgttgggttcagaattttattttttggtttacaccattatatccgatcatatataaatacaaacaaaaacttcaccaaatattactttctttttctaatggtgtgtgtgttttgggacaggatctctgtccctcagactggagtgcagtggtgatttctgctcactgcagcctcaaactcccagctcaagcgatcctcccacttcagccttccgagtagctggaaccacaggcacccacatgatgcccagctaatttttgtatttttggtagagatggggtcgcattagattgcccaggctggtctcgacctccctggctcacatgatcctcccgccgcggcctccgagcggctgggatcaggcgttaatcaccgcgcccgggctttatatttcgttttgaaaatgctgagatggacgcaaagggctgagtgctcagtgtcccccagtcaccctcagttgcagcttccgtccaaagaaggaatcgccctctccctgctggggccactaacagcactaacacggtccgaatggcatcggcaaagctcgggaacggcgacagatgggaagacgcgtgggagcctgggggatctcgggagagccgcgcaaactcgcggcggacgcagccagcacccgcagccagcacccgcacactcccacccataccccggcagcccgccaagactctctggcccgcacctctatggtaggaaacccagaaaacaggaagtggcctcgagagggggaagggaggggcggggcctccgccaccacctcagctgcggaccgaggcgagatggcggccaccgagggggtcggggaggctgcgcaagggggcgagcccgggcagccggcgcaacccccgccccagccgcacccaccgccgccccagcagcagcacaaggaagagatggcggccgaggctggggaagccgtggcgtcccccatggacgacgggtttgtgagcctggactcgccctcctatgtcctgtacaggtaacgcccccgcggcggccgcggctcgggacactccctggaggcccagcggccccaagacccgcggcgcgcgcttccggccccggcgcgccaggccgaagttcccgtggcgccgcgtgggccggtgcatggcgctgggcccgggcggctgccgggacgtcgccgcttcccagggcggcgccggcgcgagaccgcggggacgcgaagcagcgaggtctcggctttccgcctgctttaagccacgcggaaactgctgcacccttgactgcactcgttcagctgttcaggcgtcgcgattcgtaaatataagaaatttcccgctctcttccacggcttcccagaacgctgtgtcgctaacaaccagtgaagacccaagggctagggtgcagttctggtagccgggcaggaaaccagggccagatttgctcaccctaaaaacgaagtgtgagggcttccagtggctggctctgcttggagcccagagacattttcatccaatctgtattttagcgcctcgtatcagccaggctaaaggctgaaaagagatttgctactgaacctctcttaagtctccctgcatcgcctcgtacataatacaagtgaggtgtactggggactgcggtaactttcttgcctctgtcaccccgtctttgctgacacccagttccatcagttctttgctttcagatggtaatgttgattcctaattccctgtgaacctgcagagataatcgccttaggtcttacttctgtagttctaggtaaatccattcgatggcttgtttaccttgattttgtgaatgagtagaagtcactacccatatatatttttttgattggagatagtgttttactgatttaaattggtagccccataatcctcaagtctgctctctggattgtgaaatactcaggttctcacgtgactgtgggtgatttcctggtgactaaatacagccttacctttcccaggccactcccccaggctctaggtgtcacgtcttaggtcatgatttcacttgtatttctccctgtataatggacacaattactagcattgcgcattggatgccacagaatctctgctgtcaacagctgatcattatagagaaataaaaagtgaaaggaagggccggcgcggtggctcacgcctgtaatcccagcactttgggaggccgaggcgggcggatcacctgaggtcaggagt

SEQ ID NO: 50588 - DNA, 1854 bp, Homo sapiens
gccacggcgcccggccacagacgttatttctgaaggataaattcctagaaatggatttgctagggcacgtaggaggaattccaatttacactcacttgtatgtgtgaggaaactttcagactctactgtaacgacaggaggtattaccgctgtttgtccatgtgataggcaaacgtttctgttaattttaatactgtttggatagctagtaccggctcagtttttttaacccacaccatgttactgtcttgattctggactttcgcagtgtgtcagtgtagaagcagctaacgcttccgatgtacacaacctagacgttccatgacccagctgacttcgatgctgcaagcctccctttcggtttcccggagcaagcgcccgagtgcgtgttgggctcccggcagggctcctggccggccctcgacggacttccccgcctttgcccagtcctgcccctccgcggaggcttgccaaggtcttgtctgctgcgcttgatgtgtgcagctcagctttactgcgtctaggctaagccccacagtttcttttacagagcgattgtccaacttcaggcatctgggtccccgagtggcgggtctgggccggagctgggaatcagcctttccagcaaggtccctgcagatgccgcgggtctgaggactacgctttggaaggcctcgcagtgcgtctagatctgacagctgctctgcatgagcctggctccaggctgaagcaatagtcggtcaacacaaaatcgttctcccaagttagggaagcagaagccagacagggagactgggtaggtgcgcgctggtaccgccgcggcgttcgctccggcttcagtgcacggccggaggaggacgccagggggcagcagcgccacgctcacccgcccaggacgcgcttccgaacgcgcaagcgcagtaggcccagtgcgtgctggcccggggtggcaggagccgcagaggcttgggctgcaggtaggtgctgcggcgaggggtgagagggcgaaggggcgagggggcgtgcagctgggtttcccgggggaccctgtacgtggcctgggccgcaccccccgcagccccggccgcctgcccgcggcctgtccggaggctccctaggaggctgcgctgggcctgagcggccgtgtccaccgcgcccagcccctatctccgcgtccacccctgcgcggtagcgggacgttaaagaaccagagaagggcccggcgaggtggctccagcctgtaatcccagcgctttgggaggccgaggcgggaggatcgcgtgagctcaggcgagagcagcctgggcaacatggcggaacttctgtctccgtaaaaaagcacttagccgggcgcggtggcgccgcctatagtcttatctactccggaggctgaggcgggagaatgcttgaacccggcgggggcggaggtttcagtgagccgaaatcgcgccactgcacttcagcctgggggccagagtgagaggctgtttctattattattactttatcattattattattatttgagacggagtctcgctctgtcgcccaggctggagtgtagtggcgcggtcttggctcctgggattacaggcgtccgccaccacgcccggctaatttttgtatttttagtagaaacggggtttccccatgttggtcaggctggtctcgaacgcctgacctcaggtgatccgcccgcctctgcctcccaaagtgctgggattacaggcgtgagctactgggtccggcagaggctgtctctgtttaaaaaaacaaaaaccaaaccaaaccaaaacaaaacaaaaaacaaaaaaaccagaaaggaccgaggactctgtctcagctctttgcctt

SEQ ID NO: 50589 - DNA, 624 bp, Homo sapiens
tatggtggcgtgaagcaaagatacaggggcagaacaaaggcagctaatcaaactgtgacaggttcatgagccaggattacatatgacccttgctgtgcagctcacatggctgttatctaggcttgctcaaaagagccttgcatgggcttatctcataacgttcgctatggcacccagactgccgcagcccaggcctgctcaggcatgtcttacaaccttcactgtgctgcttagttaaaacagagtacttgaagttactggttacagaaaaccggaatctataaactcatatgtttactcataagggaaaggaaaatttgtttttttctccctatgttgaggaagtgctgggagagtctccagagcacattcctttgagcctttgcttatttgataatgttatcgagactttgtctgggtccaggctttgactgttaactgcctttgggatgagtcagcctaatatagaaagcttgtttttctttttttaattttatttttctttctttactttcctgcctcagtatggctttctcttccagatgtaggattcccttaagcatttcttgtcgggctgatctggttgtgatgatttccctgttttttctttttttttgagatgga

SEQ ID NO: 50590 - DNA, 2762 bp, Homo sapiens
caaattgtctgcgagcctaatctttcctggcgtgtgacaaggacctccaccgtctttagctgaactaaggaaaagtcccgcaacattttcatgtgtgcctttgtatttttattacatatatggatgtccctaaacaacatacattattgttttgctttatatattaaaaaggcattctgcaatttgcattttccccagccttgtgttttgagatttatccatgtggatgcgggaagctgtagagcacttcccctgctgtggggcagtttgttttctcgctggcggacattcagcttgttgacaaggttttgcaattacaagcacctctgctataggtattactgtacctgtcccttatacctgcgatagtgtctcccggcatacagccaagaatgggtgtgcacactcctcgacctgctcccttccacttcgtcagcctggccgggggctctttcaagaggtggggccgcttggtggcttctaagtcgtgcctctccctctgggtaataaacgccttgggggcagggactttgcagtcttgcttattgaggcgttttccaaaacagggaccgagggctctaacacccgtgcggagggtggccggcgggggcgggagtttggcagaatgcggctggagaaggtggggcgagggaagaaggctcctggcctgcaggggcctctcttccggctgtttttcctcccgaagacaaacactcccaacgcaggggcgcagagcctcggcttctttcctggccagctccctcaaggcagggcctagcatggcccggcccagcccctaggttcccccgcccgcggctcccgggcgcctccgcctcccgcggtgactcaggcggcggtgacggcagcggagggggcgatgacgggcgcgcgggcgtccgcggcggagcagcgcagggcggggcgcagcgggcaggcaagggcggccgagcgggcggcgggcatgagcggggcgggcagggcgctggccgcgctgctgctggccgcgtccgtgctgagcgccgcgctgctggcccccggcggctcttcggggcgcgatgcccaggccgcgccgccacgaggtgagtgcacacctcctaccgccgcccggccggctacgagcgcagcgtctcctctccgcggcgccgcccctatctccgtgcgcggcgccgagcgctaggccgggccggaaccgcccccgtggcctgggctgttgctgcgacttcgcggtcccgcgccccagaccggaggccggacttcggggtgctgcggccgggccccgcggaggcgggggagggggcggttcggaccgcggcggagtggaacctgggcgcccaggcggcgcccaccccagcggagcctgcgtcctggcgccttccgtctaaacagaggccgcggatcgggacgccgggaccccacaaactggcagccaggaggcgggccagccgaggatcgggggggctcggactccccctgcacccagtccactgttcggagggacttagagcagggtcccttccctgagggcctcgcccccgaggacgtggcgccggagccgtgcgacccattggcttcagcgggtgggaagcctggggccgggacgcgcgttcgccccgcgctggggttgaacctgcgtggatgtgcggcgggtgaggaaccgcggagaaggcggtgggggcgcggcctgcagcccggtcccgggcgagccctccgcgcgtctcccctcggcgcgttttccctccagggtgactgggaagccgccgccgccgccgccgccgcctgggaggggccgggctgggcgcttttgccccgggccccggaccccgggcgtttgtccggtgcgctggcttaagaggcgctcagctcataccgtgattgcacaactggcttgctctccgaactcggtggggaaaacggtgacaaatacagattccaggtctccatctagacccctgcaccggggagccccaggccctaggtccttcgcacacgcccctcccagaggggtcgggcaagcatcgcaaacccctttgggtaggagggacggtgggagtcacctgtctttcccctctcgcgcccttttcttggtcagaatacgaagttttagtgtctgtgtatggagttcaaacgacccctcctctccaagcagaagctggaggagaaaggcgttgtgaattttggaaaagcggctcagaggattacattttgtgcgatccttgatccacccaaccttcatctcctgcgctcccctcctttaaaattgcaaggaccccggggaggttatgtaatctgcctgatcacaatttgtcagggactgatcccgccgaacactctttgcattttagcgccagtattagcttatcaaagggcacttacttttagagagaggtggtttgtaaatagtaatcacacgtagtgaggggaagccgcgttgggaccgcaaggctttccctgtcacctggagcccatgtttgggccgcacagctttcctactaaaaacgtcatcatcttccttctttttgaaaattcagcatttgcttgaagaaaaaaaaaagtagactatgtctttaaaaatatgcccagcaaagataactcacgagcagagagctagaccagaaattaaatatttggaaaggaaataaaggtgtaatacacaagcagcacatttatccccgcaccattggaaggtgactttatttggtaatttgcccaccaagacgaggtagaccagaggagagagaaggaaataattgttcttttgtctg

SEQ ID NO: 50591 - DNA, 539 bp, Homo sapiens
tgtatgtgtacaagtttttgtgtgaacatatgttttcagttctcttgggtataggaatagaattgtctgctgatttcttttgaatgggtgttttgctgtgagatttcatggagagggaacatctggagaacctaacgtagtcagtaagtttttgtattactgccaaaaaggccaagaaatgagtcaccgggaatttcctaaagacatgtgcttagttcccttctatttgcatttagttcacccgtgttttatttttctgcccccactcaggagaggagctgcctttctcttcgagacatcacgtccagctggccccagtggctgctcatcctggtgctggaaggcctgtggctgggcttgacattcctcctgccagtccctgggtgccctacgtaagcgaacccctgggggtcatcccttgtgcatgtcctgttctgcccagtcagaggttctgggctttcacaggtctcgagtcagaggaattctctttccctcttccttctcctttgaggcctgctttgcatggggagaggagattg

SEQ ID NO: 50592 - DNA, 1060 bp, Homo sapiens
agccttttcctctttcgcttgctgtctccccttcccctccttctttctccaaatggagggagttctttttttcttcttccatctcatctactcaataacggagccgctgcagccgctgcacgctgcacacacacggcacagtccctgggtccgggagccagagcagcgccactcggagacgggatggttccgtgggttgtgtaggagcacaggaaagcggaggccgggccacacagcaccgcgaacccagcagcccaagcccagcggaccaagcagccacccccgggagccgccactgcctggagcagtcaccggcgggagcctccatttccaggagccgccaccgctgggagctgccacagccgggagccgccaccgccagaagcctccatctcccgggagccgccatcgctgggagccgccacctccaggagccgccacggccaccgggagccgtcaccgcagggaacctccatctcctggagccaccaccgctgggagctgccacctcaggagcagcggcagcactgggacccgccgggccccctcgcacccagcggctctgcaggtgccctacacccgggaggggccgagggagcccacgccgccggcgggaccgcagggatttgctggctctttctgcgctgaggggtcgcggcgcggggcggaggtcgggtggggaaagctggagccgcagggaacgcgcaggacaggctcgctgggtgtcgactctagccctctgtcagagaccttgggacccgcgcaatgtggcagtggaaggcgcagggtctgaccccggccgcggccgccgcagcagctgatctgtcaaccccggccagagccgagccgcctgaggcctgcagtgttctccatcaccactgtgatggcatccgcttccgtgactgtcactgtgcaccctccgcctgtcctgggcccacgcaggacccccaagcggggctctgcacaggccaggagggctacccagggactgaccacgggttgttcatgggtcctcacctgcttttccaggtccagggtgagaggacgaatttgaaggtag

SEQ ID NO: 50593 - DNA, 1367 bp, Homo sapiens
agttacacttgtggccttccccggcttctgctgggccggctatggtcgacgccgcaccgtctcaggcccacttctcctgcgggagcggcggccccagcggagcccctgtgcgccacggcgaacgtgataggaatgcaatcttccgccccttcagactctggcaccccgtagcctttcctcaggctccacgagttctcccggtgatgtgatgaccgacatggcgtctgggctctgaacacagactttactccttccccccggccccgaaacatggggaaaccacaccctctctgctccagtcaccagcagccactcccattccttaagtatccattattgcatgtgtagcctattgcatgtgtagcctacttctggttttcatttttatttaaggtcagttgttgcctgacaacacagacgacagtaacttaattcgaaagacaatacttggaggcggcccccgctccaggcaccagcccagcagctcccccgaactccccaggagctcgcgggcgagcaacgccacagcccagagcgagctccgcggaacccccagccccggggaaggaagctcgactctccgcggggcactccttccgggctccgggcccgactaggccatccgggaggccctggagcgccggggccggagaagccctgccccccgccgaagccccgccctgcgcccgagcgcccgccaatggcagggcgcggtgcggcgcgccgaggtgggacggcggcgcgctgaggaggcggtgcgctcaggcggcgctcccggagatgccccgcggcagccgcgctcggggctctaaggtaggctctggggcgggagtgggcgccgcgccgtttcccgcgttgcggggaagcggcgggccggcgcggggctggccccgttgtgctggggtgagagagggtgggcgttgggggtgaagggctaggtggtggcgggtcccgtctgcgcgcgtggagcaagcccgcgcagtggggtaccgcccccaggtccggctccggtccaggcgtgcgggccgggccctcagcggcggtacggaaagcgaggggtgggaccgccgagggacgcagcgggcgggagcatatgtccgcctcgggggtacttggccttactcttgtctctttttgattctggtgtaatgtaccaaaccgcagggaatcctggcgtggttttacccgtctccgcggataatccactgtcaactctgtctctcttcctgccgcactcggaggggactgtgcggctgactgcccaatccgtgggcaccgcgctgcctcgggttccagaacgggagcgggtgcctaggaatcgttgcttgaatggtgtttgattgcacctgtatccgcgagtgcatcct

SEQ ID NO: 50594 - DNA, 956 bp, Homo sapiens
gtaaaaatacagaaaattatacatatgcacattaaatttagaaatgtttttaaaggtttgtcagatcactttctgcaagattataatacactcccatgtagtacaaaattttgtttattcctgtttttttaaacttttccgtaattccatcttctatgagttactgaatcattttttctacccttactgataagaatacaaacaaaatatctgtttcataaaaatgaatccgtatttcaaatttgaaagccacatttacttttcctttaaaactacatgaactactttcagatctcttatctgtgccagccagcttgttgtttaccttctcacaaatgtgcctgagtctcactcacattactttacactgattatgtctattagcctgtatttgcataggagtcactacataaagtatataagaatgacataacaaagttcacctaaatccaatttccttcacacttcctgaaaaattaggttatgagaattcactgctatgtctctgctgccctctgtaggtatggtgtcttagtccactttgctttgctttaacagaataccacaagataggtaacttacaaagaaaagaagtttatttctcatagttatggaggctgaaaattccaatatcaaggtgctggctcctggtgaggacctttgtcctacaccttcccatggcagaaagcagaacgacaagtgagggtgagagcaagggacagaaaatttttataacaacacattcttgtggtaacaaacccactactgtgataatgatattaatctattcatgagggcaaggccctcatggcctaatcctaatacaggaaccattaaaaggttcttttaatatataccattcttttaatgtataccattctcacattggtataaagatatacctgagactgggtaatttataaaagacgaggtttaactggctcacagttctgcag

SEQ ID NO: 50595 - DNA, 1097 bp, Homo sapiens
ctttatggctacgagttcccaaggggagatataaccgtgggactcgaagtttaagttcggtttctggctttttctcaacacgtacaataaacgtgaataggccaggtgcagtggctcatgcttgtaatcccagcactttgggaggccgaggtgggtagatcacttgaggtcaggagtttgagatgaggctggctaacatggcgaaaccccgtctctactaaaaatacaaaaactgtctggacatggtggcaccctgtagtctcagctactcaggagtctgaggtgggagaatcacttgaacccaggaggcgaaggttgcagtgagccgacattgcgccactgcactccagtctgggtgacagagtgagaccgtgtgtgaaaaaacaaaacaacaacaaccaaaaaaaccccaaaaatccttggagtgtctttgttgcgtaattaggtggagatctctgaaggttcatcactagaaataccaaacacatgtttagaaggctgggccttcagccacctgaactctagggaggtcactgatgtaatcaatcattcctgcataatgaaacttaaaattctggatactaaagctcagtggctcttcctggttagcaaacacatcagtgtctggagactgatgcatcctggctccacatcatggagttaggagaggttatggaagctctgtgtctgggaccttcccaaacctcaccctgtgtgtatcttttatagttaaactagttgtaagtgtagcacttttcctgagttctatgagttgtagtgaattattaaacctgaatggactgtgggagcccctctgtagccagtcagcttgggggggatgcccgttcctgagactgacatatcagaagtgagggcagccttgtggaggactttacccttcacctgtggggtctgtgctaactcaggtagttaatgtcagaattgaattgcagtacactcagttggcattagaaaaattggagttgaaacagtgtactgatagataacctttcctgacatatttgtctatgccatttaattttcacagcaaggctatgaggtagtatgatattccctttccatatgtaagaatatgt

SEQ ID NO: 50596 - DNA, 2635 bp, Homo sapiens
gtctaggctgtaaaatataaacattacagttaaaggctttatatgtctatgtgtcttagcctagacattggatatgtgttgctatgggatgagagatctgatttattttagccactagcagtaaatgtggtgaaaaattaagactgaaaactacaatgttgaggggtgaaaggaagggctaaacatttttcattgtggtggattctgccagcgtagactgctaaatgtttgtggtttggatcttgttcactctgaacgctttaggccttgtgtaggttttccccagagtatgaggtggttgtgaactgcttttgctaatggtgagaatgaactatcatgatgttatataacaaggatggcattctgggagacgcaaaatttaaagtaggggaaaaggaggatggcaaaaactaagtaaagtaacttgaaaagttattctttctgccaggcgtggtggctcacgcctgtaatctcaatgctttggtaggccgagtcgatgaggttgagagatcgagaccatcctggccaacgtggtgaaaccccatctctactaaaaatacaaaaattagctgggcgtggtggcatgcacttgtagtcccagctacttgggaggctgaggcaggagaattgcttgaacccaggaggcaaaggttgcagtgagccaagatcatgccactgcactccagccaggcgacagagcgggactctatctcaaaaaaaaaaaaaaaaaaaaaaagttattctttccaaatatgatacaattttgttcaacttaattttgttaaatttttattcaaaaagttaagttctaaatagcatcaaacatggtgggagtcaaaataattaaaatcgtattttttctgaaagtgtgtagactgcctgcatacttatatatacgccagattgtattttacttaccttctcatttgcatcttacccttgtggccgaattagcaggacctgtgtgagaatgacataacttcaccgcctcttacctgctccagctgcaacgcgtgagagtgctgaactgtggcctagatttttctctagggctttccacggaagtgagtcaacacattgtttctggcttttcttgctgtccctccctaatatgcaagcttaggttgctttggaattttccaggtacagtgttggagaagttgtaacacaggaggaggccagagcgtaggtttagtgtggtggggagagggttggagcaattgttcaagggaagattgaaagtgaccaaaatggcatgagggtaaaaatgttacctgaattaaatatgtaccaaacactgaaaatcccttattatattttagtatcttttatcattgtattttaaaattgatttaaatctatactgagattttttttttttttttagtgtggatttcaacacattttttgtgcttttgccaagaacacagtgttctgttaagtcattcagtgacgaagattgctggattgctgccagcccgggtcaagttcattcacataagtttcagtgtagattctgactgagtgaggaatgttcctcttgtctttgcatgttaggtgggtctgggaaatcagttgttttaaaacaagcttattaatacttttgtttttttcagggttatggggtttttttgcttttaaggcttcatatacagacaacgctttgatactagtatcacattcttgtctatttactgattttccatgcctgatttggtgaaataacagctctcctaaccataccagattagaatctaccgtataacgtattgactctgctgtatcattttaaggtattattttatatctttaaagaaaatatattcacaaagtgcctttctcaatcatatatgtgaattaaaaagttgggaaaggtgacttagaagctacaaaaatatagtgtttgataaggtgtatatacctatgaagatatattcatgtttatgtattttattccttcactcatagttcttcctcagtttctttatttcgtttgccatcttttttttttttcagccacagaagtgcatttttttgcattaaaaatgcaaccagtatacaaaaagctaaggattggagcttattgatcactcatttggcacttatcagttttgcctgagaattacgcatatttaaataattttttttaaaaaatttgatttctgagtgaacaaacatattctgccttacaactagcttacaagacgttcagatgctaatgttttttctgttcattgtagtatttaaccaaggtaataaatttatgtttatactgatgactgttttcatttatttattttaaattttttatttttttttagaaacagggtctcactctgttgcccaggctgaagtgcagtgatgcagtcatagcacactgcagtcttgaattcttgggctcaggtgatcctcctgcctcagcctcttgagtagctgggactgtaggcacgtaccaccatgcctggctaattttgaaattttttgtagagatggtggtcttgctgtgttgcccaggctgctctcaaactcctggactcaaatgatcctcctgcctcggcctcccagagtgttgggattacaggcatgagctaccacaccaagccctaatgaaggttttttgtttttcttttcttga

SEQ ID NO: 50597 - DNA, 1295 bp, Homo sapiens
tctgagtttggcctgttttcctgaggtgtcagaagacaggatctaacactagattttaagattaaggtttgaggctaagatctctctacagctttcccacaacaatcttgtgaagaagaaatgatgaactcaagccatgtcatttctccctgttgctatttctaaacatggcatggcattggcttggattgtctcattaaaatttgttttgcagttcaattgcattatctgatccctatattacttcagtagcagaattttaaacattttatgtccattttctgcttttatgggctttagtcctgcccattggtatttacatttaggaagttaggacgtaggatacatatatacagacatactcctcccacccattgcagcacaaataaatctcaattgatttttctctctattaataaaataacctgtgatcacataaatttctggtagtctctaggtggaggcaattggagttaacatttttgtacagtttgttttcatgttaagacactaactctagcatgactaggatttcagagacatctgtttataggattgagcacagagatctgattccctcccaccagttaaaaaaattgttaaaaaaaaaagtttttttttacgggcgcctgtagtcccagctactcgggaggctgaggcaggagaatggcgtgaacccgggaagcggagcttgcagtgagccgagattgcgccactgcagtccgcagtccggcctgggcgacagagcgagactccgtctcaaaaaaaaaaaaaaaagtttttttttaacaaattttgtatagtgttgttttataatatccaccttggcacattcgatgaaagtttcaaacttcgaacttctcttttttggaaagcaccatgggtcaagggccctgtttgtttaggagtcctgggtcccctttgtgtgtcagagcatgcaaaggaacctggaacagcctttcttctgggctgtcctcaaaggggcaaaaaggaaaaaagagttgatgaatgcaagatagtgattttatgagtcaccttttctgcagtgacatgcatgggtagaggatgaatttgtttaaattcttttttcccatatttctagaaaatcaattaactacaggtagatgttaaatgagattttgatcactcagcattgtgccctatagagtttgtgattattctatagcgggtagagagcatcctgtctctgaagaaagtatagtccttgtttctgtgtgttatgattgttttttgactcaagaatatatcataattagtggttttcattttggaat

SEQ ID NO: 50598 - DNA, 1016 bp, Homo sapiens
ggtgagtgagagtgttcttcccctctgtccctttcagttggtatcattatcaggtattttttcagaaaaggtttctgcaaggagtaagagaggcagcttctaacaacaaaggttacacagacatgatttaccttttgtggactagctttaccccaaattgcattgttaaagttttgaatttataattaatgacagcgtggactacttagtattttaactgtatttgagaccacaagtagtttcttcaatattttctcaagcccttgagacacttaattctccctcttgacttcctcttcatcttagaaactgcaatttcctttgtaggaacaacttcctgctgggtactgccctctttggccacttctgtcttgggtgcctatgtttttatctaaagccataagtgcattgcaacactagccatttcatcatcatgtgaattgagaaagtctagcaggaagtcacaagttgattgtccccaatacaagcccaaatgtttcttggttgctgtgtcataataggcagttggtgttctgaatggcagttatgaagaggatactttgtagaaaggacttcttttctagagatatatttaagagcctgatcattggagaacaaaatgcatgcggaaaggaaatattttaaccacagtctaaaaaagatcttatggtccagtgctgttttcccttatagtcctattaaattcattaatttccaatggtgactttcttggtttgtctggatttttttttgttttttaagggttccctaccccccattttaagggagagtcttttcctttaacacaatgtaaagaaatctcttttttttttttcatcttccattttctttattttctgcactgtaagtctcttctgttagtttcatctttcttttcaggacctggcttcatgattgtctccgaaaaagatggtcttgtaggcacaacgataggtcagcagtaattaacctatgaagtgagtggtgattacaaatgtggtcgtggactctggagt

SEQ ID NO: 50599 - DNA, 850 bp, Homo sapiens
agtcgccttcttgctgtgtgctcacagagcctttcccgtgtgtgtgcatggaaagaacaagtcctccagtctcttacaaggagactaagcctgtcagatcaggctacccttatgacctcatttaacctcaattacttccttggagcccccatctccaaatacaaccagactgaaggttaggacttcaacataggaattttgaggggacaccaacattcaatctgtaacacacccctgttgtttggcttaacttcgcttagggatctgttgcttttctagagcctttgtatgctttattctcacgtggaatttcttttaaaattggacatttcattgcccactcaccttccgaacaagctattcctacggaatgagtcacagcgacatgcctagtgggaggtggggtcactgtgacactgtgaccctggaggcggaggtgctcagctaggctttgactgctctcgtcactggggattgtgaaaactttttgatcgcctggtcagtcttgtctacttttttgtttttgggttttttttaagagttgggtttcagatttctgtttcatgcttagaataattgtggcttttggagaagaatattttaaactggtgaaaaggcaaaaaatgtggaatcaagaagtgaaagcacaattgtttacagtttagtaagcagttgtggtaaagaaatgtgtctattcatcattgccagatgacttaaaattttatgggggagcataaattttaaacaaaaatgaattgtgctcttcataggataaatgtgtgaatttctccagaatttgtttttttagatattataatcaggatctcctgcttacagctttatgaatttt

SEQ ID NO: 50600 - DNA, 1266 bp, Homo sapiens
gttcactgtatgccggtacattgcccaattcctgaatctcctttaaccttgcagtaaccctcagagtttttctgtatcttccccattttctatacagtctccctgaaagtagtaaatgctgcacaggaaggctgcagtcaaggccttgctgtgttgaacaaagctgtagcttgttgcagacgtccctgtgctagtctgctgctctggggctaacccctccttcacattgtctcctaggagagattgggatgatggctgtcaccctgcaaggtctgatcatgtaactcaagaagtcttggtagagagcttgtgtctgactgacctgaagggtggacactctgttgagaccactgatgaggtggccacagagggagaagtgatgaccagcgttccaggagagtgttctgggttaaggggccagtgggtcacaggagaaattcttcagagaattgtaacataatattttgcaaagtattacaggtgttcaagggtcaagtaaaacactgctgatatcacacatgtagtgtaaactaagtgaagtcatagaggtgagatgtgctattttgtttctgaaagaatgtgagttattgagaggatactgtactttttctatctagagcacagtttatttacttcagagaagctagacatcactgacctcaaaataagtaattttcatgcaacaacccaagtaattacctgtcagagatataagatagttttgatctagctttgaagccctggttaaggactttatagttagagcaataaacttatggttaaatattaaacattattgaatgaatggaatgcttcatatctaatgcagcctctcaatgggtccatttttattctttatcacaaaggtaaagactggaaaagcaaacaatttcactgcttaagaaaatctttcctttctggccgtggtcttctgggggtcgggtgttaaccagcacacccatgagtttactggcctcagtacaacctgcgattgcctggatggtcaggctgtgccagcccctgcactctctccagggctgccgcctggaagaacacaccacttagcacactcatgcttttggacacataacacacccgtcaggttaattatatacatgaacaaaatattttataatttaatacagatttattctagcttacagggtcttggaagcaagcatattctctgtcttctgtgagttcacagcttagaagcataacgtgttatacccacacatgtcccagctagaatgaagaaggttttcc

SEQ ID NO: 50601 - DNA, 1686 bp, Homo sapiens
tcttttctgaattgactataacatcaatacaaacataatgtcaagaattaactgtaactttcaatgttgaaacaaagaaaaagaccgatgtgtgttttcttataagactggaggacagatgatgcctctctctctctgtctctctttctctcccttgttttggcagtgataggccaaagggaagcacattgttggccagttgatctaaaagttcctttgcatcattctggtaatgagcaacaaaggcacttattggcaaacgttccatcttgaataactgaggtcagcagtttctttatcaaagcaacccaggttaaatatgctcttttatgatctaacacactgtaataatcaaatcaccatttttaaaagcaacccagaacattattgaaaaatagcttttttgttttaaaataaagcagtaatacaaaacaatgcttaagttatgagttacaatgaatgctttcagtgtttatgaccttcccagatagtctctaggaagattgtctgtattctgactataaaaataggaccaggatgaagtttttttgactgttactgctggtatatcctagatactctgtgctattttctgggcttttcctttgctgcctaagggagagaatatcacatctatcaggtcaagacttgtacatttgccacaccaacttagacctaacatgtttgcatttatgttcaaccagtccatagtgtatgatatactccattgtctttgctataaaagaaaggcataatgttaagaatatcttttatatctatattgagtaattgccgtgcccttacttagctggttcattttgatcccaaattcagtgtttcttcatttagctttttgatgacgtactgaataaacagtgtcgcaatatgtacctattttgctcatttaagaaaatatttgtaatcactaccacgagggtttttcattaccatctagaagcaaagacctctgttttccttcagttaactttcagtatcagaaattctaactgtttagcaaaagaaaccataaaaaccatttatgtggatcagtgagcctttactgctgtctgcccaggaggaactcaataaatgcctcttgactgatggaaaattgctttggtaatactaagcagagaaaatatgaagagtacgtaacacattgcttgatgcatggttcttggctgtactgcactgacatgtaactaatgacagaagttcatgcaaagtctatgactgtcagacttttagaatatagactggtatcatccaaatgacggatgtatgtttgcaccagtgttggctcagacagtttcttagagctttggggtttcctctaaaatatagttccaccccaggctctctcctgtcaagcagacttgaatccctggaatggctctagaaccactttggcttcattaaaacatttgaactacttgtggacaattgagcaccatgactttcagaagtagagaccatcaaatgatacggcagcatttctttttttttttttttacccttgatttttgttgttttattttgtttactagactcatttagccatctgtggaaaatttttccaggaacacagccataattttttttattatacttttaagttttagggtacatgtgcacaacgtgcaggttagttacatatgtatacatgtgccatgtcggtatgctaca

SEQ ID NO: 50602 - DNA, 3463 bp, Homo sapiens
tggtcttggtgtactggtctctccaggtctgttggtcactcgctccacagctacagctccatgctctttggcacctttaaagagatcatccaccagctcattggaacttttctttctgggagggccaacaatctgctgtccacttctctctgaggccccggcataaaacctctggccttcctcctcttcctcatcctcatcttggtcatgagtgagatctctaaaggatgtcactctattatcactaggggctgtgcctctggacactgaactgggggttgcctgtgaaatggttatgatgtcttcttcccctctgtcctcataaaagctcgctagcgcaatctgcaagtcccaggtagccgactcgaggaagaagcaggcccggtcctgctcagtgcccatcaccaccacgaactctctcagcgtcttctgttgctccgctgccgtcttcatcccatgcgcctccccacatccactactttcttatcatttctaaagcatccttgagtgggacttttgtctttctcctgagagggagcttagcgactgggttgttgaggatggtttaatagagggggatgtgctagctgaaacccaaactcttgtgttgttcgtctcaccctgtctacacactgttgcctatggtgattggtccactgaggattgttgttaatcagtttttacttgtttttctcctcccccaagtccaaaagtgttttgaagataaacagtaaatatggcttataaagccagctctgttccccctctctctgttttgggaggaagacattgtgcatttttagagcataacatgaaggaggttttagtataatatgatttagtgcaggcctcagctgctatctctcccagtggttttgctggaggctggagcttcccgacagccctgaccacggagaggtggaatgtggcgctgacgtcacggctgctcctgggaatgttttgcattcctcttcctggcagtggtcaggtggcttccagcaagaatgaaggacagcagcttccaaagaagaaaaaaagagaggaggaaaaggacagtttataatcaaagtattgcgggggaggcacttttattctgagccaaaattgaaattagaaacagatgtcttgcattccgatgcggcacgaatgttaaataaatttattaatgactgtaataactaagctatttggctttttactgaacttaagtcttgaaactctgtaagaattatggaaaaacgacttcttgtagttgacattttaactatgaaagcagctttctgactgtaaaagcaaggaccctgatgaaataaccctctagttaatctacaggctgttttaaggtctgttaatattctgaaaggtcacttctgaaacataaaatctctgtaatctattaacataatttgtgctgttcaaacaaatttaagccaatcattgagagaggtaaactctattttagcatctgctgcagaatgtcttttctcaaaatatttacacttccaatgttatttctgtacattactgctcaaaccagatattcaaaacaaaacagattcttaacaaacaggttttgcccaagtcttacaactctgcaataatatgtgtaatagaaaaatagacagtaattgaaaagtttgtgtttttcttgtcttccagccactaaagtacctctgttcaaaatcactatacgggtttagctaattacaatctatacgtctgtattttaaaataaaatgttatactttttaaaaaaacaacttgatgtctttcagtagatttggactcattttgatataacagcagttacattaacaacagttctccagtttaggtgaaatctgtttgaatacttcctgttatacattgaaatggaaagttggcttcctcttgtaggtcatgttgctggtgaggaatttccagaaatctggagaagtgctgactcatagtatacagtggactgatccagcaacagtaggacttgagggggttttttgagctattggctgaggcaagcaaaatatgtggctgtaatgtttcattttatttttagatataagggtgagggaggaggagagactattgcttggcatgggatctatgttaatagctttaaaatggctacaagttctagggttagaggtgtgtctaaatgtgtgttttcctacagtctattattagaatttggaaaacaggttgtttttgctatagtcaccctactgttgttctctctgcctcttgcccacaggtgaaccatgtgccttcttgggctgtggttggtgactcaccatgggttctataatgtgaaagtcacatagtacttgcattcaggagagtgctgcagaaaaaggtccatggcattgcaccttttgtatctgatcaaaagtccgtgaatctaataataacaatttaagtattagctgacaggagtacagagaaaaactagcatttgttgcctttaatatgcctgcttgtgtcctgtatattttacattcgttaaattgtctgactctgaagttactgattgaggtttttttcattcatttggtatagaaatgactgctagattgggtttggtacagggatttctaaaacaaaaactcatcacctaaactcatccctggtctcataaagttaatatatcccaaatgcacttgtctatcaattctacaaacatgcactcactgctctgtgttggtgctgatgacatggagaaaaggaaaatgtgctccttgttacctgtttgaggggagggaggcgctgggagcccactgcaggggatgtgtctacagaaatatgtatagtgttacttttcagttactatggtagaaatctaaagaaacagtgaggcataaaagaggggtatgctcaaatctgtgctaaagtctgtggaagtggttttttggatgtgattctgaggctgtcagagttactgattgaaagtaatttgaataggcaatgttaggagagacataaaaaatagaaatcagaatatgatgagggagataagggaaatataagtatttaggtgactgatattaagatatctgaaaaggaaaaacaaataaacaatatactacaagttatatttgtatgtgctttgaggccaacacccaaaacagcacacatggtttcacaagcacctctgactgctttcaaaggctgtaaaaggctatgcttttcaaagacattcattctacccttatgtttctgaggtttatatttttcatcatttctgaggaatttgaatggctatttgttaatcataaggattcacaaaatcatagaaattattttaaacacgatttcctgttttctttaaagttcagcaaaaggaagagcatatgtcctccttttgaacagaggtcccagggcagggtaggggatggaaatgggaggctgggccacactgtgctgtggaggcttaacctccacatctgacccccactagccttcaactgat

SEQ ID NO: 50603 - DNA, 3719 bp, Homo sapiens
gggtcagcctctcctcctgtgcgccactcttcccaatggagcatgtgctttgactctggggtttctgcagcatccacaataaatatgtaactgtattttgtatttacccacatgtgttttccctcccatggtgtctttccctaaatctgtgaagaaaataactgttttaaaattcatttattttctccatttggttgtcagcagcaggaaaggctgctgaaggatccgagccagtgtggaaatgggaagggcctgtgagctcagagggaaagaggaagtctctatgtcccggttaccagcatgaccccaggtcaaatgactccctcaccctctcctcctgccaaggttggttagggttcaaatgtgttcctacccaaaatcacacaatgtcactgtgtgggatgcacaatattccattgctttgctctgttaaaaaagacagttaaaagtaagaagtatttgttgcaatttttaaaaacatggtttttaaagctatcttattagtttttaatgctaaaagcattttatttactgaagattcttggttttggataggttttattttttcattaggtggtagtactctgtttctgagaaagctctttattatgcattatttgtgaaatctctagtaacctgatgatgtttctgtcacattgttttgaaaggaatagtttaaagatttaaagtgatctttttttgttgtatgtgtgtgtgtggtttgctttctttctttctattttttatttatttattttattttattttattttttgagcgagggtctcaccctgtcccccaggctggagtacagtgtcacaatctcagctcactgcagcctcgacctcccaggctcaggcaatcctcccacctcgaattgttgggactacaggcatagcgagccaccatgcatggcttttcttttttaatgcaagtatttcttttggaatttgaactttaatactactttggtgtgttttcacctaaattccattttgtgagcttcttagtatttgattgaaaacctatttcgttttacttgaccctaactagatcaacaagataaggatattacccaaaggtcatttctagtaggattgtggccacaaacgtcaattctgtagccaagtatggactaatgtggactgagaacttggcttagaggaaagacgcatttccacctgttcagggaggtttgaagattatccatgttttgagggaaaaggccagctgaatgtggagagtgcaaaggtgtaactgtcacttgagcttttcagaagtccttcgatgtagctgccaacttaaaccacctcaagtccagccagtacagcagctctgctttatcttcagtgtgagtctgtctccctgccggctggtgatgggggtcaggctggatcatggatgcgaccaccctgcacccaggcctgcctctcttttccctgttacatagtgctgggcagcctctgggggcctcacagatttttgttttttagtggtaataacagcatgatcaggccgcagccttctcaataagaagtgctaacttcctcaggaaaacagaagtgtggtatgcaccattacataacccagtttctctggtgatacaattttactttttgagagctgttttgaagtcttcccacagaactgcaggcctctctgttttcccgtatgaggtgaggagatggcagttttgtccacacacctatgaaaaaacacaatgacagattaagtgtcctgaagtgtcggaaggatacctggtgtggtagcttctaaaataccaccaaaagttattttagagatgaattaattagaattgacatctgagttaggttaccaaatgaaataaagggtgccaggtaaatgtaaactttagataaactatcaggcacatgtatgctaaaaaaattattcattgtttatctgaaatttacatttacctgggcatcctgtattttattaggtaaatcaggcgactctccacctgaaactagattatgcaaactaagaattaacataaaaagtactgtcattgtgtggatgagaaatctcctcctcctcttctcctaaaccagtttaggaagcctgtgcttcgtcatttctcatatactctcctcccatgtacatccagattaaaatgtgtgtatttggcatgtggctcactgtttcacatgcctaactgcagcccctctgggatcctatagtcgcagcactattttggtaggtcagccatgggcagcaggtcctgtactctcctgaccacccccgaggaactgcaggctctcagcatttgcgtgtgtccctcctcagagccgtgggacaaccccagccagctagaggcagagagacaggcacgtaaacctcctggcacgtcttgcgggtgcctgggccaaagtatgcgactgtcctgattctctgaaggtctcaaagcattttcatattaagttattcaagtgacccagagaacaagaaaggagttgctactgcatgatgtcagagaacactcagaggttggaagggaattgggagaactaagtaattattaataaattctaaaagtttaatactcagtattcaaaggagaaagagtggagctaacactttgtaccaagggtgctggtcttgggaattaagatatctcctgcaagagatttctgatacaatttagtaaaatgtagtttttaggggagatcttttacagaaggaagcttttatttccaaaggacttcatgaaaggtgtaaaggccacactatgaattagggatgacacaccctgttttgaattggatttcctgctagttctgatccgaggcattcttcccggactagggtgaattcagttccagtgtttgcttgaaaactgaatctggtcattgtatttgcagtttggcttcctgcctgctgttaaagtacagagcaaacttcagctagttactccctatgattctgtgtcctcctaaagagcagggaaagaagagggaaaaacccagggggtgactgagttcatttacatgttgtgccaaagggcagctgcttgctgccttgtcgtcacaagattctgtggagaatcctgatagtccatttaccagaataggagcctggaaaacaaaaggaaaaaaagtatctttctttctatggttctagctttggcattactaactgaataacctactttctttttctttaaccaacataggtgaaaacttagaaaattttatgttctccctctttccaaagttttctgtatgaagaaagaacttataaaaagaggtcacagctgggcgcggtggctcacgcctgtaatcccagcattttgggaggccagggtgggcggatcacctgaggtcaggagttcgagaccagcctggccaacatggtgaaaccccatctctaccaaaaatacaaaaattagccagacgtggtggcatacgcctttagtctcaactactcaggcagctcaggcaggagaatcgcttgagcccagaagccactgcactccaccctgggtagacagagtgagaccctgcctcaaaaaaaaaaaaaaaaaaatcacaaggcacggtggtagcactgctggctagttggacctggctgtgcctactgagttgtcctgagagaacaccaggttgtgtacatgctgtctggatttgtgggaagtgtggggggcttaccccttttccctgcagttgtagaaaatgtgatgcaatctgctcagtgta

SEQ ID NO: 50604 - DNA, 1035 bp, Homo sapiens
tgtggatcagaaggaatccagaagcatatagtggcaccagcctatgtgtccttacgaatcttgtattcccctgagttaaacttagagcctctgaatttgcggaagggacagaaaggaaagatgttctgttgtggggctgttcccaggctcagcttcctcacactgaggcagtgcatccagtactgaaataaggaacattgcaatgatgcctggggtcagcaagtggccttgctgacatcacaacatgtgcatttctcactgttcttggttatttaattctggtctggtccattggattagagccagattaaacatcaataaattttgagtttactattaacaaagagcagagtcctgctaccttactgttactttgctaggtgctaagagagaaatcagaaaatttaaggcatggattttggtcacagggagcaaaatctagtcttcattggctaagaagccttaaaaaccatgtaactgtcacatagtggcagaccacgagcaaaaagaaaaaaaatgaaccctgcttcttcttggctgttttatggagatggtgcattcagctgcctggtgtttagaggaaccaaatgtacagaaatgaaaccgttcaggagattcccagagctaactgcagggtgctgcagggatgtggcaactgaacatccaggaactgtaacaagacagtgtttaaataggtcaaaatgaagcagtccaaagcaggagttctgacttctggtttctagtctggcatataaggcaggtggaagttgtcattcctgtcttcacaataagaaaaagttgaacaaactaaaaatcaatggtttttagcttcatcagagaattgtcacagaacaaacagctgccccccaaattggagcaaatgacaggcaaataaacagagaatcacagcttcccagagcaaaagacctgaaggggacgtatccagcagaactcagaagcagcctaagaaaacttcaattaattcacacattgccagaggctcggtgtggacaagcttgcaagttacactccagg

SEQ ID NO: 50605 - DNA, 1372 bp, Homo sapiens
ctttgaggtaagaacagctgagcaaccaacttttaaagtaatcgttttttagttccattggtctttttagctttatttatgagaacttacaacttagtttaggaacaatatcaatgtcaaaaatgggatactatgctgtcatctaaaattaaggaatgtgaacagtctgtgttaatatggaatgatcacaaggattattataataaatgaacaaggtccaaaacaagcacaaaagtgtgttaccatttggttaaaacaaagtgccataggcactaatgttctttctatgcatgaaatatctttggaagatacacaagaagctggcaactttaattgccccatgggagaatgaggcagttaggaatagaagggagaagtttgaattttgaactatgtgaatgggttacctgtgttaaaaattagccttttgtaatgaataatctaaaacagagtcctggccagctttaagatttgttaatgattaagttggttttagtcatggagttgatcttgtgtgctctgagatataattctacacaatgaatctctgcatatgtctttttaggtggtaggattattcagctttaaataatttagatgtttggggtcttggtttaaatgtctttttggtgttaacagaatcatggaatcttaagagttcaattggcccttaaatactagttacaaattattgatttactacttcgtctcagctgcacatttgagcacctcccatggtggcacattgctctactgcagcccctgtgcagctccctttcctagaaggctctctcctatcttgagcttgaacctctctccctggatcttctgccccttggaactgacgcttcctctcagggtcatgtagggtcacataggatcagtctgtttgctttttctacatgatactctgaatatgcatatatgtatattacccttttttttttttttaagggatggggtctcactctgttgcctaggcccagtcatggctcactgcagcctcatcaacctcctgggctcaagtgattttcctgcttcagcctcttgagtagctggaaccacaagtgctaagtctttatagtgctgagcttcacattcttttctcctctggctctttaatgtctttaagagcaactctattaatattagttacaaaataattttagccacctgctcagcacatgtattctatttcccccaccgtgctgcctttaaggtggtgtagttaaatgaaaaaaggaataaggaggaaaggaaggaagagaagaaagtttatgctaaagattgaccagagaattctatatcatgtctgtgctgaaggagcccactatcttttcaggaagatagagaggatgtattcatacacatg

SEQ ID NO: 50606 - DNA, 983 bp, Homo sapiens
ggaaagactttcattcctgccctcatgaaatagaaattcagctatatttgatcatgactgtagaatattactagagattgggttttttatgttatgttttgttcaagtagatacacctttttgaggtcattcatatagttagtgacatgtaaatgctttttaactacactgtttaaacagtatcaacagaggcttcgagtgtgatgtttacatttctggaacttacgggctgtaccctcagtctgtcctggaacctctgcattccaccctcagtctatcctggctgctgtgaagatggagtgctggtggctggtcgttagcagtcactccacctcacacccaagtttagccacatggccaagccagtcctgtggtgtttatcaaggaagaagggccctggagattgcaggctccactttctgcctccccagccatccctttacttgcatacctggcaggaagggttaggtaggacagccaagcacagcataaatctgaacggaagctgatgtcaggtctctctccttcttagctgtgccccacagctgtgccccactatcacgcaagttgtttcatgtggcacattctgtgatgatgacgtaatcgtgttaccttcatttactgagtgcttgctaggcattacaaaattatgaagcacctcctcgtgttgggtttaggaatatagagcaatgaacaaaacagacaaggggccggctctccagaataaagtaaataagatcattttcaattggtttgtagccaggtaaccttggacaaattaccttatactttacttttctcatttgtaaaatggaggttatgatggtatctccttatgtgattgatatattaatgagataatactcaaaaagcacttagaacaggtcctagtacatggtgaatgctaagtgctcaaaaagcactcccaattattatgagacataatactgtgtgccatgatatggagtaacctggataggagc

SEQ ID NO: 50607 - DNA, 2182 bp, Homo sapiens
aaatactgtatgttctcacttacaaatgggagctaagctgccagcacacagaggcatacaaagtgatataatgcactacagagacttagatgggggagagtgggagagggtgaagaataaaagactacatattgggtacactgtacactactcgggtgatgggtgcactaaaacctcaaaatctcagacttcaacactatacaattcatctgtgtaaccaaaaatcgcttgtacccccaaaagctattgaaatttttaaaaaataaataagggtcagaaattaaataaaaactttttaaaatgatcagaaaagtgagtaggaggcaatcaaatggaaatgtgaggcccacactttctcaaaggttggcaggaaggttggcaggaaagagagagtgacatacgctcccagcagagactgcactgagcatttggagccaatgtgcagagagagaagagatacacctaggctaggtggtgagcactgcaaagcaaagtcctagaggccgtgttttgctgggcacccaggtccagtggaaagggcaggctgggcaggcagcaggaggatgtcagctgggcacggcaggcagctccaaggtgggcgggctggaaacaaaactaattcctacctgggaaccttccttctctctgagaaatagagttgtcttctaaaagtggccattgtctgctgtcttaagtacagtaaactgaatatggttcgtcttcaaatttgaaattacttcactgaaaaatgtatcaaaacaatttaatatttctcagtgatattgtttctaaaacaggttttcttaggattgcagaatttacaaaattaccattgatatttgaaaaagaagaaagccttgtatgtatgcatttgccaaggcagtttgatttttttatttggtagggtcagagcaggtagaacatgtatgcatacttcacaaaaaacaggtgatttataagccattgcattagacaggactggtttccaagccagtcagtcagcttagaatgtgaaaccctgattcagaagcgaatcacctaaggatgattcaacactgtgtttcctgttgtgctagtaggcccactacagtagcagtttacccccacctcacccagttcattagactctaatctagtcccatactggaactacagagcctgaagactatataagcaactgtcttctcattctccttagactgtccatgactgatgccactcaccaggcacaggagggatgctaatccattccatggaatggagcctcagggtttacaggctttattccctccaagaaccctgcctctgaaagcctgtgtgactcttgcgtgggccaacatgccctttgatggctcaggggaagctgtaggacactaacttacccatggcaccaccaaaacttgcatccccaggcctgtgtcttgttccttactctatacccagttacaaatccttggcctctcaggtttcagtgatgaataggcatgggaaagtaggaataccaaatggcctctcatttggtagtcggttggggaatgcatgagagaaaataagaccacagtgtgcccagggatgctgagctgatggcacattttgagcagtaaactttcttagtgtagatccctccttcctcgctccctcttttccttcattgttcttgtcctaatttacaacttcactaagttcttcctttcccacttgtatactttgtagcaatatatgttttggtttgtgaactacctcacattgtccccaagggcaggaactatgtcttatgtcccttttccccaggagggctgaataaatgcctgttgattaactcaacttggtgtaacaaacatatattatctataatgcataagtctctgagctaagggctctgacatgtacatacggaataagaaataagattcctgccttcaagaaacttccaggagagagaaaagagctcctcaagttattataatacatagtaaatgtgatgagaactaaaagacaaaaaaaaaacaaaccacttttaatgcaaaggaaaaaaaggaaaaagaattgtttacactatgggaataagagaagtcttcatataagacatggagtttcagtttgactttgaaaaatgatacttagatgagtgggagtggcaaggactatcagattccatgaggggaacaggcgggagccaaga

SEQ ID NO: 50608 - DNA, 2842 bp, Homo sapiens
aacatggagaaaccctgtctctactaaaaatgcaaaatcagctgggcatagtggcacatgcttgtagtcccagctactcgggaggctgaggtaggagaatcgcttgaacccaggaggcagaggttgcagtgagccgagattgcgccattgcactccagcctgggcaacaagagagaaactccatctcaaaaaaaaaaaaatagttcgatattcaccggcaataaacaaatcaaagtccagactggcaccagttgtgtcagcggttttatttgtgtcttccttaaagaccaagcttgcagcagggttttgttactgttgttgttgttgttgttgttgttgttgttgttgttgttgttaatctcagcagcacaatgtttttctacaataaagatggtgtgtgagtatggaaaaggcctttctcggccagacttggtggctcacgcctgtaatcccagcactttgggaggtcgaggccagtggatcgcctgaggtcaggagttcgagaccagcctggccaacgtagcgaaaccccatctctactaaaaatacaaaaaattagcagggcgtggtggcaggcacctgtaatcccagctactcaggaggctaaggcaggagaatcgcttggaccggcgaggtggagattgcagtgagccaagatagcgcaattgcattccagcctgatcaacaagagcaaaactccatctccatctcaaaaaaaaaaaaaaaaaagaaaagactcttctcagcgccgcacagtggcttacacttacagtcccagcacattgggaggctgaggctggtggatcacttgagtccaggagtttgagaccagcctgggcaacatggcctagccccgtctctaccaaaaatacaaaaattagctgggcgaggtggtgagtgcgcctgtggtcccagctactctggaggctgaggtgggaggaccagttgagcccaggagttgaggctgcagggagccgagatgacagcacggtactccagcctgggagacggagggtggccttgtctcagaaggggaaaaaggctgaggtttttttccctcttcttttggttgtcacttttagcaaagtaagattgttattcctttcggttcattgatatttaaaagtttacatgtcacatttttatttcagcaaagagaaaatatgatttttaaatgaataaaaaacatttctgtgcagtagaagtcgtgctaacatctcatgttaaaaagataaacaacaggattaactgtttactttgggagcgcagaggctggttgttttttgagaagaagaacacaatgtcctgctgtctctggtttcccggtcggccctcctcccaggcggctacaggagtgggcgaggcccccgcccccaatgcgtccccgcccccaccccgccccgccctcgctctggcccttctcgcccccgccttttctcagcggctcccttgcgctcaggttccagccctcttctgtccccatgctccctttttttctctctctcttcttatcacttcatcctctgatttcttggtttttttccttgggttgaagcttcgtaagagattataaagtggagggcaggtctttgttgatctttagaggctgcttaagttgacagtgacctagaatgaaacagccgggcctgactccgattccgggaattcttggtggactgctaagaactgctcccataactcacgtaaacatcccacatagccacttaatctgccctctcagcacatgcgtgcgcaggcacacacgtttgctgtgctctcgctgtccttcattcgtgtagctatgaaactgagccagtgaatgaaagaaagggaaaacacgtagctttggaaaggaggaagggacagttaaaacttttttaaaagagaaattaaattgtactcccacaacttcccctacaaaattaagagttttatttttttattccttgtgatttgttctgttgcctttacagataaacaagacgtatttttacagtttttgaaatactctttaattggcataatggacattaagttggtaagaaaaggaaaaaaaaattcttaaagacaaatattcacttcataatggacttttatacttccaacgtgaacagggaacctcttatctgtattattttatgttgctgggaatgcactgtggaatgtggtttcatctggcaccagttttaatcggctcttccaacatggtccaggcctcaccctcatggctcagaaatgcacagaatcaaagtcctgcggaatggcagctgatggctgaaacaggtgattctgctgctaccctgttcccctggaaccactttctgactgctgccttgttttcccagttgagaggggtgaagtgtgggtggctaggggcagggacccgctgtagacatggtattctaatggttatgtattgctttacccacagtggagctttaccttacaaagcaaaacagctgtagctgaatgatgaggtcaccgtcataaggccgcatctatgtgaaatggtataccctgtgccactctcaagcaccttcctgtgagccccttcccatgagattaggccttttataaaaatgcagacacctggcttcaggacttaggagagctggcccttaatgagagggaaccctattttcttgtcagttaactgcatgtgtaacaatgcgcatttgtctggtaggtgaaggaaaccaagattttgagcacagaagagatgcaggcacttaactgggtgtgaaacaaattcacataatctggattgtgcaggtacccaaactcctagtgtccgtgtccattcgtgtcatgtggtgcctgctcccctgcaccaccgtcttat

SEQ ID NO: 50609 - DNA, 1327 bp, Homo sapiens
tagtatgaaaaataaaattaaagaccaatatcattaatagacctagagacaaaatttctaaataagacatagcaaataggatcttggctttacatcaaaagtgaaaaactactttaatactcagaaagaatttgaaattgtcatttgccacattaacgtgttaaagggggaagcaattatttaaattaatacagataaagcatttgataagctccaacatccattcatgatttaaaaaaaaaaaaaattccttgacaaactaggactccctaactgggtgaaggacatctacaaaaaaccaaaaatgaaaaactaccaacaataaaagcaaacattagtgactataaaacattcaagactttttctttaaagctggaacaaaataaggatgcccagtcactggcttctccagcattgccctgaaggtcctaaaaggcagccataaaagaaaataagaagcaaaattggaattatgaaatgattgcatgaaagtacactaaacggattacaaatagtaattgatggattacaaaagttcaatatacaaggccattgtatttctacacaccagcaacacacaacaacaaacaaaacaccatttaaaatagaacacaaaaccatagacagtctaggcgtagatctaacaaaacatgtacaagagctatatggagaaacttacaaaattttattataaaaattgacctaagtaccccaccaagaaaagatttatctaccagtcactctaccatgccctaaatcactatatcatgtgaatgacttcaatgctcacaacagccctctgaattagattctcttattttgtgttaaaaatgagtaagttcaagctcatacagataagcaacttttgcaagatccaaagttattaacataatgctgccccccgggaagccatttgtgttccattgaatatgataaaatttatggtaaatacctggcagttcaggaaaaacaagtaagtcatggggacacttttctgctcagacctgtcacactagcactgattttaggagatagcgtttcactgggcagaaagcattgacaagtgggtggaattcagcgcaggctgctgataagctgacgctggtctgggcagtctgtggaatgccacagttccaatccagtcgaaccaggggggtgatgactccacctcgggcctgagccagcctgcctctgagctgcagctgtgtgagcaaaacagagtgggagagcatgtgtggtgggtgtgaataccaggagaagaagagtgataactcgtctctagggcaaaagaatagacagaagcacccttccttgttatttgagacaa

SEQ ID NO: 50610 - DNA, 5078 bp, Homo sapiens
cgtggaacatcacttggtgtcccttccaccgcactgtgttcatgagaagccagacactgaggccagctcaaactcagggaaaggcagtgagactcacacctttgaagggaagggcaccaaggagccacattctacctgctttggccacgttgtctggcttctccagcctcagtctctttggccatgacaccataacgatgggaggggtgagttaatagacaccaaacagaactgctgtagcaactgccaaatgccttgcacagaggaggagtgtggggtgcccatgatattactctgcaagtgacattgccttctagggctttaatctcccagaaagccagagatggaatatctcagtgcttctgagcctttattttcagccctacccgcaacagcattctgcagcttgatctataatggggtgcaccacaccctctcagcctggtcagggatgggggccaaggactccctgtacctgtctcatctggagacgaaactcacctgggactaaccaaaaagaattagaagaaaaagcgaagtctcattacaaaaacacagaggattttagcccagtataactctagaagaaatggaatcctattaaggaaggaagtttggggcaaagcaccaggaaatccctcaaccggaagtgttgctagattgaggaagtgtcctaaaggaagtgggagacagctgtgggcactgtgtgcccagccccggccttcccagcagagtctgtgtgcatcgtgtcccaagtaaaaacaattcagttaccagaatggggtagttccttcacttgctaaaataaatgggtgtgtgggtgtgtgtgtgtgtgggtgtgtgtgtgtgtgtgtgtgtgtagtggctcttcatttgtttctccttcctaccactgttctcagccatttgaggagtggaaggtcgtggactggggaaagggccttccactctggctctctggttttccgtgttgttgggaacagtacgtcccaggctgtttgctttaaccagcgtgccttttatcactgcagagctacgaagtgaagagtgtcctcggaaaggaagtggggttgttaaattgttttgtccagtccgtaaccgcccacccgaccagctgcattggattggaggaaatcgagcttctgagtgcaggaggggcctctgcagaacactagcggttgccgcaggatctgtgaactttgcaatgtggctgcaagggtggtggtggtggtggtgatttggggtagttatttgttaactatggacacagtgaacgtagtttacgatcttgaaatgaaacttagatttttctggggaaatgttcagatacagttttgtgaactgtaaatcaaaatacctttttctacagtttatcttttattttctgcaaatttaggaacatatttactcgttttcacattgaatcttaagtttaagctcttcatttggtatttaggcaatatatgagaaaaaaattttttttgttcatttgtaattttaacaagttgaacattttaccatgattgaacatgtttttattacagtatttaacattcccccaaagaataccctgcaaagtgtaaacctttgtcccatactgtgatattactgttctgctacaataaatgtcaaacctaagcactttgcagttcactacttttgggaaaatgttctagggaactgtatcacaggtgaaactgttacccataaagtgtagctctctgaactggtgtgatcgtgtctctgctgaatggtggtggggatagctggctccaccacacacacctgttttaattaggctgggtaatgtgcacggagagcaaagatcacagactaaggagcagtcagtcggatatttgctttgctggcaaagatttaaaccaagaattaattatctttggacactataaagattttgttcccttccttatagcaatataatcatgacaggccatggttaactacatcagatacacgtagcagccgtgaccaagacatggtgccctaataccaagtgttcttgggttaaaggcaggcggctttttaattaaatcttaaagcactgcaattactggcaagacagctggtcttaagcagttttgtgactgcccttttcatccactacatgactattccggcctttctggagcacttttgaaaatctacttgactctgtccacaagactgaggaaagtgaaagcaaagtcccgggaaagcgggagatgattcagcccggggttctgcccctcgcccctccagcagcctctacagttagggagctcttgaactgttctcagcaggggcccccaaaaagtcaacccttccccaggtctgcgttcttcgggagaacaccttctgctggaaagctgctagcttacctgagctcagccgtgctccacctagcttaggcaagttaaataaggccaggagagagcctttaatgcgttttaaaagcgacagaccctctctcctgagtagctcgggcctgcgccccatccccccgccccccccacacacacacctggcgcccgggctccctggtgctcgctggctgcgggtccggaacgcacccttcccgagccgggtcctgcgccaccggcgggcgggcgggagtcactgcgaatataggaagcaggggcgatttcaaatgctgctttattcttacaaatactgtaaaaattaatataaaaaagtgagcatgctcagtcttttcctcttatctacaatacaaagggtttgtctgaaaagtctggttttttttctttttacaaatgtaccttagctgcatcaacaggagtaagatgtagaaaaagctaccattacaaaaataatttaagggaaaataaacacgtttagcttctctcgcagtttagtggtggtaagtccaggctgtagcttctttgcgctcctatgtcccaagaaactgcagcgggcacccggcggctctggctgcgccagggcagggcgcgctccgctccgggccgtcgggtctgaggtatgggtcgttgctgagtctctcccgccccggccgcgcgttaccggcagtctgctgtcccggcggccggcaggaagggcgggctgggcagctgcttgaagaactgccggaggccggccaggtcccgcgtgagctgctccacgcgctggtgcagcttctcgttctcagccgacagctccaccaacttctgctgcatctcctggttgcgccgcttggccttgtcgcggctcttgcgcacggcgatgttgttgcgctcgcgccgctgccggtactcggggctgccgcggtccgggcccctcttgccggcgctcttctcccgggcggggccgggcgcgggggtctgcctggggctgctgcgcggcggctccggcgacgtgggcggggtgggctgccctgcggccgccaagctcaccacggtctgtgcgcacgcggccacctgcgcgggcaacagcgagccgggcgcgtcgccgtcgccccagtcgggctcgcgcttgagcaggcggggagcggcagggcccgggcccaaggggcgcgcggggccgccgggaagaagctccaggggccccgcgccgcccgccttgtgattgctgttgaagaggtcggcgaagagctcgtcgtggcacagctccagggtgggcacggcggccatggagtcgatgtaggcgctgaagtcgatggcgctctcgtcgtcgtacatggcgggggcggcggcgcctggctcgcctagggcccctggctcggccccgcggcccggcttgcccgcccggcccggttcgtagaagggcgcaggctccgcaggccagggcgcgccgcgcgccgggccgtccaggctgaagagcgcggcgctcatggcggcgtcgggccgggctctgcgtccaagcgaggctgtcacctcgctgggcccagccccgccgccttttctagccccggctgacgtgcacgccccgccccgactccggcaccgcgggggcgccccggggccgcgggggaaggggcgggggcgccctgggagccccccggagccgccccgagccttcccggggcgcgccccctctcagttcctccccggggccccctccccggccctggggacccccagcccacgttgcaggagggtgcccgcgctgctgctccctccccggcccgggccggcctgcgctgcgctgctgggaatgacactccctctgccagcactccagggccttctcttcttcctgtttgtgggcttggaacctcctcgctcctcggggttgggagtgaaatcaaaaccaggacttggccgcagcgcgcgcgtcccaggccggctcctgtcgccggagggcggggggtggagacccgtgggagaggacccgcgcgtccaaggacgccccccgaccgtgggcacgcgcgtgaggccctcgccccgcgcctccaccgtgggaccagatgcgggaagaggcgtgggggaccagacgtggggacagcggcggcctggcaggcggggagggctgcccgcaccgcactcgggcgcctcggggaatccgggccggttctcgctgctctcctcggaggtcccgggtccggccggccctgggggtcgaggcccagagacgcggctgctgcgtcctggccgaaaggccgacgggacgctgtcgccaaaagcagagcagatgggggagacgcggtcacgacaccgcgtcctccgccggctcctcgaggtgcgggctctccggccggacgctactccccgaccccgcagacccgggcgtccgccgccagctcccgcgcccgcgtttcttccaggtctacggaagcagtgccatcgtgtggcggcatcttgcgttagacctgtttttagttccaggctctttccctgttaaatattccaaaaaagtgccttgaacctaaagtagttgggtcctttttgggaaacaggtaagatctaccagtagctatagcagggtgcagatgggcctcgactcacgatggggttacatcccggtagacccatcgcacactgaaaatgtcttaagtaagaatgggctttgtcatgtgtcctgcaatttgaggcaggcatttctggtcagacccatttattatttta

SEQ ID NO: 50611 - DNA, 1099 bp, Homo sapiens
cgaggtcaggagttcgagaccagcctgaccaacatggtgaaaccccatctctactaaaaatacaaaaaaattagccgggcgtggtggcgcgcgcctgtaatcccagctactcggggggctgaggcaggagaatagcttgaacccgggaggcggaggttgcagtgagccgagatcgcgccacttcactccagcctgggcgacagagcgagactccgtctcaaaaaaaaaaaaaattatttctcttgccctgccccccactctgcatagcaatgattgccatattaggggtcgttttcaccaactttggctttaaaatatctttcctctaatactagggggtaaaaagcagtatgacaaatccctttatacacatacacagaaattcccccaagaatctaattgctgtacttcaaaataccgtcatctaaacacagagaagcgccgggctgcccggctccagaacgactcgggaagccaggacccacccgcggcccagctcgggccggtacccacccagcaccgcggggctgctgctcaggacgcattcctgccccaggccgcggatcagttgatgaccggccagggcagcaccgcagcggtccgcagcggacaaggtctcctgcagccgcagcagggagcaacgcacaccggctccggagcccgccatgccgccgagtcccgctcccgcgcgtgcgcccgctcggcccggacccggaaatgcccctacgcgcggaggcggggctgcggggcgcggcggcaggaactttcccggggacccctgcgggaaggcctggccagtaagcgcgcctctttggcccgaatcaacatggaaacctaaggaaaaacgtctgacctgcggaggtagtttgggtggctacttggtgttggacttggctaaataaataccagaggcagataaaacaagcgaggggcctaggtcaagagttccaagtttgttcctcgataaaaaacgacaaacgcggtcgggggcggtgatgcccgcctgcagtcccaacactttaggaagctgaggcggggggatcgcaggagttcgagaccagtctgggcaacataatgagaccatccccaccacctcccg

SEQ ID NO: 50612 - DNA, 1021 bp, Homo sapiens
aggacccagttttcccgcgaaaacgctgccgcgcagggggtcagaccatctggaccaaggggggccgagcgaggcctacttctggtttacgcacgggcgctgaaagaagcggcactgtccccccctgccgatgcgcagtggcgcctcccggaggcggagccacgtacgagcgccgctgtgattggtgaggccccgccaggggcggagacgaccttgccgccggcgggaactctgggtctcgcggtttgggagcgctactcgccaggtggactcggagtccgcgagcgtcgtcggcaagcggccgcctttccacggtaaccgcgcgccggcggggagggcgtggcgcggagccgacgggaacgtccgcgctgcggagcagggcagggaagccgggaggcgggcccggcccgagcttgtccttgtcgcgcaggtactccgagcactatgtcgtccccggcgtcgaccccgagccgccgcggcagccggcgtggaagggccacccccgcccagacgcgtgagtcccccgagccgggcccactacagcccccggcgccgccccgtctgccctctcgccgcagctggcagcgctgggtgggtgcgcgggacccgggcgctcagcctcgggctgggcgctgccgcttggtgcgcacagacacccacagcaggctgtggcctgggtgctgcttaattcgattgccatttgcctctgtttggtttggttcagtggtgagtcataatgccccaaggaaaagacaaatccaggaaggccggccctgaaagttaatggctgtcttttctgttttgtgtgacacaagctcggagtgaggatgccaggtcatctccctctcagagacgtagaggcgaggattccacctccacgggggagttgcagccgatgccaacctcgcctggagtggacctgcagagccctgctgcgcaggacgtgctgttttccagccctccccaaatgcattcttcaggtgcgtgtctgaagatcttggttttgctgtgcttgatacac

SEQ ID NO: 50613 - DNA, 706 bp, Homo sapiens
taactaggcagtccccctggaggaaggttccttgttgcagtaataaggccttctcagtaggggagtattgaggttggattgcaggggtaatgaggaggagggaggcaggagcggaagaaagggaggcttcttttgctgcctcatcagcctctatgttccctcctgagattttatctgtcccatttgatgtccctgacagtgtataactcctgcctcagttgggagatgtaagcctagtaagtctgagtaatcctagtggcctgaaggagttggtaaataagggagccgttagtgataggggtccctttggcagtgagaaatcccgtctcttgccagatggtggcgtgggaatgaagaatgtgataggcatatttggagtctgtgtaaatattgactcgtctgcctttggaaacggttagggctctgttgagagctatgagttcagctttttgagaggaggttcctggaggtaggggcttagcttcagttacttggtcaagggaaacaactgcatacccagcaattttgggggagcaagtgggacaggaagaggagccatctataaatagctggtcgtcagggttggtgagaggcttggaggaaatgttgggaaagtatggctgcaggtgatcttggatgtcagtgcaagaatgagtaggaggggaagaagatacagggagtaaggatgctgggtgaggtgagcact

SEQ ID NO: 50614 - DNA, 1698 bp, Homo sapiens
agtcttgggttcaagccatcctcctgcctcagcctcccaaagtgttaggattacagaagtgagcttcggcgcccagcctgtattactttcctttttctttctttcttttttttttttgaaatggagtctccctctgttgcccaggctggagtgcagcgatttctgctcactgcagcctcacctcttgggctcacgtgaccctcccacctcagcatccctagctgttcaaatttattgtccaactcttttgaatcgtttatcaacgcaaatctgtcaatgcccacttatttttatttatttttttgaggcggagtctcgctctgttgtccaggctggagtgcagtggcgcaatcgcggctcattgcccctccgcctccccggttcaaacgattctcgtgcctcagcctcccaaatagctgggattacaggcgcgcgccaccacgtccggctaatttttgtatttttagtagagacggggtttcgccatgttggccaggctggtttcgaactcctgacctcgggtgatccgatcgcctcggcctcccaaagtgctgggattacagacgtgagccaccgcgcccggccctcatgaacttattctttagcgtttcattttgagagcgggattcacaagggaattgcggaaacagcagcgaggccccgcgacccctcggcccacgtgcgcgctgtccctcgggtcgccccgcgcccgccgggggcggagtccgctgtgacgcgtgcagggcggcgcgctcccggaagtgacgcgcgacggttcgtgcgtgcgtgcgggcggctgcgtcgggctgcaggagaagatggcggtctccacaggtcggttcccgggccgggctgcgtgattttccgctccgacccggctctgcccctccgtctgctgctggcgcccgagcgctgaccgtgcgggagaagcccgagtgcgctgtctcgaatgccgcgctctccgcagagcgtagcctgggaccgggtgggaccggcgccgaggccccggcggccgtcgggttggcgggtcgtgctcgcgcgtcggccgcgcgccggcgggctgggggcggggtggctcccgcgcgggcgcccccgtaggttccggcgggcgcgggtccgagttgtaggctgaaggctctacgggagggaggcgaggaggcccaaggtgggcgggtgtcaacctccggcaccgaagatgggtcaggccaaccggcaccgaagatgggtcaggccaagaggtgtcctggatcagagtaggggtcccattcctttggactctccttgacatgggttggggagtagaggacgattgctccttaaaataagagcgagaggatctttcttacctgactgaatacgtgtgatctttttattatttatgaggaaaactgcagtgcaaacaaaataaaagaccagagcaagatgaaagctaattgaagaacaagtggtttcttagataagctgttcaactcctctttcctactgaatacaatgtttggtttcctgtgagcacacaagtattaacgttgaggttttagacattagaccatttcagaaatgttaaaaacgttaagctttagtttacatttaaaaatgttaacccgtgtgatctgcctttttcttttcttttctttttttttttttttttgagtcagaggctcaccctgttgcccagttggaatgcagtggtgtgatctc

SEQ ID NO: 50615 - DNA, 589 bp, Homo sapiens
cctcatctggcacctcctatctggtagagtgtaactacccattagcataatgttgtaagcggaactggatagtaatatggataagtgaagccattggcatgatattctaaaccgaactggatagtaatattgtgaaatgaagccattagcataatgttctaagcttaactggacagtaatatggataaatgaagcaattatcacaatgttctaagctgtactggacagtaatatggataaatgaagccattagcatgatgttctaagccgaactggatagtactattgataaatgaagagcagtccagaggaatctactgcaaatcctagggaaaacacctattttgccctttgccctgcgactgtgggcagttagccctgtaaccttcagtttattctgtaaaggttgtgcttgcctctgagttgtcatttaatgaaataacatgaataggtttaatcacggtctgatgcagagtgattgatcaataaatggtagcatttcttaatgttattaatctaagaatgcttagtctatgttaagatttgcatttgtggccgggcatggtggctcacgcctgtaatcccagca

SEQ ID NO: 50616 - DNA, 841 bp, Homo sapiens
ctagaaccaaagatgggaatagtttcattacgagcagcctttgtgttgaaaataatttcatcactgagaagtatgtttttgtcaacagatgtactgctttttggaactgttttctctaggcaaacagtaaaggtacaaataatcccccacgatgactcagaacattttttgtcagctcaggttctaaatatttatgttgtagcctggaatgaaattttcatgagttctgtataatttgaaaaacattttgcaaagcagtgtgggagacacccactgttggcctctttgctttcatctgagaggtggacattgattagtggcccctgagggcagatgtgtgtgatatgggagagaggggatgctgtgggccataattccccaagtgagggtgaaagcagtctgagaggacaagctggcccacagagacagacgtggggttggacagaggggaaggtgctgtgactcagggctggctcctgtggtttctgaagcccagctccatgcatgccctttccatggtcacgtgagctatgagtaggtttatgattgccttgcttttctgtcctaatacaagctgtagatggaatctggaagtgttgttcatggtgtagtttattcatgcttcagtcagtctttatcaagtgcttactggggcccaggtattggcacatgccctgctggttggtgcggcccaccagaaatatagacctttcagtctccagggtaaccatgtaggggctagacaggtcctctttggatgtgtcagatgcaccctggacatgtggaggtagagcatataggggaagccagtccacctttaagttaacttcatatgaaacgc

SEQ ID NO: 50617 - DNA, 1076 bp, Homo sapiens
ccaaaaccccgcccccacaaaaccaaacaaggctaataagggcacatcccaaagccctctaaccctgcaggtggcaagggcacatcctccctgaagcaggagcaactctgcttccaggattctctgaagactgccctttgcacccagagcttcttgatgtcatggaggaaacaaaagctccttctgtgatcctgaggtgccagtttggccagcaaagacaaagggacattttaataaagtctccagacatttacttagcctcaaaattacttctccaaatttgcacattgtgcaacattgtagatcttcaaatgtatttctgtgactgggaactggctccaatatgccttatgttgtaacttttctttttgtcatggggagggagtagaaaagggattagttgtctttttcccccttccagagaactgccaaaataatttcgactgtcccagatgaagtaagttttaaaattgtggttctcctgaggttcatttggaaaaagacggagcaattctgagaaaccagcagtaggggctgccaagacactcatttccctggccatggcttctgtttccttgcactggggttggcacgggattgccagtgtgcaggcttggagggtcccattcagacacttgcccttgcttgcccaaaagccggctaccgggctcagtaccttcacttttcattgctgattgtaatccagatataagagaactgttctgtagactcctttgcaccacccgccctggggttatgctgccttttgtgccagtgggggaggctttcctcctgttgggtggcgcctgggcaagcttggctcaggctggttttagaggtgctatttccgggaactagagattgcaacaccccagtgttgtatctcttctgccgcatcccagggtttggagatagacagggaaggggcgtggtgaaggattggaaaggattactcaggggctataggaaccctagaatgtcagagctgcacgttgcttttagacagagttgtggagtagagggacggaagtgatggaggccgactgacatggaggctgactgacagagatggggca

SEQ ID NO: 50618 - DNA, 2844 bp, Homo sapiens
cgccaggcacctgatgctggctccacacaatgccatcttcctggtgtgctaagaccatgtgggaaaacgaagttcagaagtggtgatgagtaatatcctcactgcacactttggggattgccaagaactctcatattgagcgtggaagttaagaacacagactccagaatcagattttctgagcttgagtcctgactcggccgcttcctcgctgtgtggtgttgggaaagttactgaactcccgaagctccattaggtcatttgtacaagggtaaaaatagtgtctatttcaagggatgggatgagataacacttggaaagttcctagaagtgtcgactagcacagaataaggaaatcattaacgctagccattgttgttattatattcattatttctttggatccttactctgtacagccagataggcagggtaggtggtgttgctctcgtgttgtcggtggccatggccatatgacttgctcaaggtcacggagctaaaaaagaggatcacagtctcctgagccccattttagtgcctcacatattttggtgtttaatatctctaaagacaggaaatagttggtgcgtaaccccacaaaggtaaaattaaacccaaagggtgagggttgcatttcctcctctaccacgaatgcctgaccacaccattcctgggctgtgaatcctgtggagaggtctggtttctcccaggctacatacactttctgctcatcaatttgtctttttccaccagactcagttatgaaactagttccctaagttattccatgaaaataaatggtattgtggtcaaatcagtttgggagatagagctacaagatttctgtttagaaattcacgatgcatattggtatatcagaggttaaaaagtcatgtagaactttgttgaacccagggcctctcttagttatttgtccacaagacaaagtccacattacatctgttattattccaccaaactagtgctgagaggaggacactctgggaaacacggtgaagctgatttatctcctgtgctagaacctagatgtgcagattccctcatctgtctgctcattctgtagatagtcatggaatccccaccttgcgccaggctttgtgctgggcacggggaattctgtggtgagccctgcagtcacatggtctagcactagggcagctgcaccctcatgggctctgcaggcattcatcaagtaatctaataaaataaatatacaattagaaaccaagagagaactatttagaaaactattctgtagtatccctcagtgaaagagatggatgtgtccggggaagtgagggggaggagcggcggggagagagcctgctgcagggagagaggaacaggtgcagaggcaggggaccgggagggccactgaagaggggagtggaggccaatgtgacaggcacacagacgacagggatggcagtatcctgggtgagtgacagacaggtgggaccagttcccgcagtggaccctcatttgtgtggttaagaaccatgggaagccaatgaactggtcagggctgggattatggtggggtgagtgacagacttgcctgaggcacaaatttaaggatccccctcaaaactcaataatcaagataagcaatacaatattaaaaaaatcagtattagtgccaaaaaatccaggatgaacaaaatatcaaacttctaggcaaagagaggatcccacagtaccgtgacaggcctgtggcaaaagggaagatgtagccccaagtacgttcccccttatctgtggctttttgccttctgctgtttcagttacctgcagtcaaccacagtctgaaaatattaaatggaaaattccagaaataagcaacttacatgttttaatttgcatgtcattctgagtagcatgatgaaatctcagactgtcctgtgttgggatgtgaatcatctctttacccagagtatgcaccgctgtacacgctatctactcattagtcattgagctcatctgctccttgacagccaatcattatggcttgatgacccaggatcgcctggagcaggtgagtctcctcaaggatggccagaaggtcagaggtagcctaatgctaggtcctaatacccacaccattcccctagcttcatctcaccatgtaggcattttatcatcacaagaaaagagaggaacacactacaagaagataattagagagagaacacattcactttacttttattacagtatattgttagtgttctctttctttttttttttcttgagatggaatcttgctgtgttgtccaggctggagtgcagtggcatgatctcggcttactgcaacctctgcctcctgggttcaagcgattctcctgcctcagcctcccatgtagctgggactacaggcatgtaccaacatgcccagctaatttttgtatttttagtagagatggggtttcaccatgttggccaagttggtctcgaactcctgacctcagatgatccgcccgcctcagcctcccaaagtgttaggattacagacatgagccactgcgcccagcttgtttgagttgttctatttcattatcagttaccatgcctaatttatacattaaactttatcataggtatgtatgtatggataaaagcagaatatacagaagttggtactatccatgttttcaggtatccactgggggtcttggaatgtatcctcatggataagggggctactgcatacctttttgatagttacctttctgcagaatactaaagtagaagatgtagattttgaagacattattaatgagttagcatccattaaagctagaaacgtaaaattcacttctggtt

SEQ ID NO: 50619 - DNA, 1457 bp, Homo sapiens
gtttgcaaccagtaagctatatttatttttagcttttgaaacagccaaatagtttgccctcaattttcagaggaaaaaaattccttctgggctaaagccttgtgtgctgagcatcttaatgctggaccattcccatctgaacccaaatagtggaaaacaaaggtttctagtgattcactcttaataacagtttggctggtgtcattgcttattaaatgctaggttcttaaattataatgaaggacgtagttataggctgagtagatttagtcaagcacatgaaaccaggaggcattaccacactgtgagcaattaggcgggggcagggctgagcccgctgggtcagagcctgagataagctttccgatgcgagattatgtggcttcgggttgaccttggatatgggaacttgagccaaagaaatgatcaatctgatttcagatctggttgagtggaggaaaaggggcatatgtcccaagccttgtgttctagacatgctatctcctttaatctgatttaattggcaggtaccagtattctctccttgttggaccatgaggtcccacaggctgaggggcaagtcacctgcctggggtgtcgcagctttggtcagcagcagtgccgggactcagacttggcctgcccagccgtagggctcccgcccttccatggctgcatgctgtctgtataaagcagtagtttgataagtttttgaaaagttttgctatgttttgaatgtagatggatttagttctagttggctgtagagttagcaaagtaggtgtgtgtatatttttaaacaactcaaaactttgcttttgttatggctgagtggaagtgggcattgacctttggcctgtcctcatgcatttacccaatttcagattcttgctatgttaggtcacaggccaggtctccctggtttcacccagtgtggccagcacaggtcacccctggacgccctggtgctggaagaagatcacagggacgtcctctctcttcatgtcctggagtggcttttatttcagtctgtaccagaaaatttccaggacaaaactgtgatcagaaccaaggagtaagcagccccattttgatgtagttgggtgctgggtgagtttgcaagtgtgaatgggctgcgggaattcgccggtgtgtgctgtcttcccttccttacccttcctgccgtgtaatgttgtttttacccgtgaaatctgcagccttgtcaatctctccatgcaaacttcagggaagagggtgtcatgccacattctggtagagtgagaacatgggtttgagcatccgatgctcctggctttgaattctaactctgtggcttcccggctgtgtgacttggggcagctactctgagcctttgttttctcttctgtaaaaggtaataatcgtaacccctgcctcctaggattgctgtgaaaaagaaaatgtttgtaaggctctaa

SEQ ID NO: 50620 - DNA, 660 bp, Homo sapiens
ctacaaactgaagccgatggcctctggtacacagctcggaggccaaggctaacaaaaaagtttgtgaaaaaatattccaaccttgctgctggtggaaacaaggagtgtatacccaggaagcaggttccctatggcgttcctccacgggactctccctgggagcctcgtccgggaggtcagggcgccctagtcagtgggaggtcggccaagccaccaggcctgcccgcaacaaagctccgacggccaggcctcagatttgacctgttttgctccctcagttacaccgcctgcctcatcgccaagtaaggccccctgccaccatcacggccaggtggcggcgaggggcatcagagagcagctgtgcgccttatgcacacctgtgcagaaggaagaaccttagctcactgcagcgccacgccggggacggccacccctgccttcggtcccatcagggctcctccaccagccgttcccctgccttgagtccgggggcacatccccagccctgcctttcccggccacaggtcaggtcggcggacaatatacgtcctgtccccctccgcttcacgcactgctctgccttcccctgcccgggtgtgacccctctccccctccccctcaactactcggaggcccaggacaagtctgccactcccacct

SEQ ID NO: 50621 - DNA, 454 bp, Homo sapiens
caaaatccatttttatgtgtttaatgcattgagcttttatttcaattttatttgaaagtttcttagtttttccaataataaacaaatttgaaaactcttctctttccttttgccctgtcttttcacttgattcttgtaatcacaaatgagacgtgttaaaaattataggatgatcacttcctttgtcttgggccaagcttgctcagcatgagtcattgcattgtttgaggcagaggtcactggcagatagctgaagatataggaacacagacacaagcaggtcatcctatgaaactgccaatcaggcatgaactggctgactgaattaggatagctagggtaagacgtatcaatgtgaattgaagagaatagagagcaacataaacaaaagtagaaaagaaaaaaaacaacaacaaagacatcaacaacaatgattaagtctttgtaaaattat

SEQ ID NO: 50622 - DNA, 1671 bp, Homo sapiens
cccagagccctgtgagggtagtcctgtgtgaatccagtggcctccagcatctttgcctcctttggccaggatcttggccatggctgacatttccaagcctgccatctcctgcagtatattcagcacataagatgagccagatgcgcactatacaacactgttgcataacctggcctttcctctgcctgtgacccccgtgtccccaccatgaggtcctggagttggttcaattaattgtagacagcatactataaattgtatgagatgctcattggcagacactgtgaaggttttctttggggttgctatttatttgcgtgaacatgctggaggtataaaactgcctgtgtgtgcacactgtgtgagcgaggccagggccgccactctctggggctccttctggttctggataggtccttgttgggactctcagcaagctcatctggcccagcccacacagttccagtaacatgacgagcagcctcctggccaaattcctcctgtgccacaaggaacagttacctcctctcagtaccccaccccctcttgtaaaagtaggtccagaggcagttgtgtgaggagtgctataaagagcctgggttgtatcctgcaggcagcaacatcgcggttcaggaaggtattttatgcggaggatggctccctccaggaccaggagaactggtggagggagagagacccccaggcagctggccccctggtgaagccccaagcttcccccgcccccgcagacacccggcgcccttcagtctcaggcggagcggacccgggtgtctgactcgggcgggggcggggtgctgacgtcagcccgcgcgcatgagctctggccagcggctgggcggagccaggtgggcggggcggctcctgctccggggtgctagccgctaggcggctagtgatggatagctgggcttgagccccgccaggccgccgagtccaccctggcgtccgggggctggcaggccggccctccacaaacagcggcctcccgcccaggccggccacccgccaccggcctggtctgctcacgtcccctggacccgcgggccagccaaggagccgctgcccttggcacctgttctccgtgcctgcaaacagacaaggccctgcacttttctcctcacgtgtttcagggactggtctgtctcctaattctcccagctctggttctcccaattaattgcaaacagtgtattgaaaaaggcatgctgggactgccgagcagggttttccgcggagggaggagcggttccctgctggcgatgcccgcggaggccagcccctcccggaggctcgggaggagggttttggggaggagcgccatgcagacgcagccaggactgagaacggcttccgggccttcattcccaccagcatcgccttctctccacgcatctgttttcattttcttagtatttaaacttgattccgcccccacctccgtgtcctcccaccactcccatgaaagacagaagatggatttcatctgtgtcctgaaagagggcagagaacacgcagtgactggataccctagggaatgcgaagtgcaaactgtcgcctgggctgtctctggagaaaagtaaaggaatgtaacaagttttcattaagaatccaactgaaagcatcatcatttttccccgcttaaacacgctt

SEQ ID NO: 50623 - DNA, 1514 bp, Homo sapiens
ccaccatgagttgaagtagcacggggccctcaccagattggctgcctaatcttggacttcccagcctgcagaaccatgagctaaataaacctctttgctttatgatttatccagttgcatgttggtataagttccataagagcagatgaaggctttacccaaaatgtgaaccatgcctagaaagttcatttaaaatcaccctttttcttgtttcatttcttatttttaaaagtaaactttcaactttagaatagttttacatgtatagaaagttgcaaatatagtacagagaaatccaatatactccatacccaatttcccctattattaacatcttacatttgtgtggtacatttagtataattaaagaaccaatattgacacattcctattaacaagtctatatagatttccttgtttttgccttatgggctctttctgtcccggtacctatgttacatttagtcattttgtctccctaggctcccatttgccatgacaattcctcagactttgcttgtttttgatgagcttagcaactttgaagaaagctggtcaggtattttgtagaatgtcctgctattgggatttgtcaaatgtttttctcatgattcgatcggtgttgtgggttttctgcacagagataaactgccacttccatcacatcatgcaaaggttacataccatgaacatgattcatcactgctgatgtggaccttggtcacctggctgtggtagtgctggtcaggtgtttcctctgtgaagctacccactcccctcccatgctctttggaatgaggtgactgtgtacagcccacatttaaggagtggggagttaggctcacctccttcagggtgaaatgactgcataaattatttagaattattttgcacatatttgtctcttctctctcatgatccagtattattttattttgttgctcgactttattccaactttgtctagtggatacatctggcagcacctttcacattccctgttccagtctttgaattagtttctccagcgagttctgattcctttccttgggcaatagtgctaaaaaccaagatctgggtgctgggtgtgcttattgctattgtggtgcctttgcttctgggtcttctcagcctacagagcaagaagatacgtgtgtgtactgtaaccactgtatatacacttatctatacataattgtatgtctgttatctatctatctatctaataaatatgtatttaatgaaacaggagtttcttcatccagatgtctccactttcatccattaccccgtggacatttctagccttgtccctttgcttacttgtaacctctcccctccaacagtgaaaaacaggttcccaccatctgacatgcatttgtttcattgttcagttcctgtgtacctctatacagtatcagaattgttagcacacgaccccatgggaacaatgttattaatcaaagtaaagtgcttatggacaatttattttgcctttacacttacaaacttca

SEQ ID NO: 50624 - DNA, 955 bp, Homo sapiens
ttaatcttttgtccatgagtctgtgggtaaaggctccagtggctttgctttctgaagaacagacacagtgtactaggacttgtgttttactgctgtgtttttttacagggaacaaggacaccgtgtagacttgtgaagcctgtaaaataccaaattgcatttggcagcatgcaatcctgaagatgggagtataacctttctttatcccagggggaatttccacaacttgtgatgatttatatagctggggtcttctgtgcttaatgtaaaggattttgcccactctgaagctcctctgtagcctgaggtgcggcctgtaaggggagagccggaggccagctgtgggctcagttccctgaggcccccgagcaggtggtttgaattctactgacaggtgttatctacttcctgtgtcaaggacagcaagcttgctctctgttgcacagatactggaaacaaaatatttctttttaaggaaaacttttcaaagccaagcagatttatttctaccacaatctggaggctaattccctgtgtgatgtttgttacagccttaattacacaatatcaaaagtgctagctctgcacctcacaatgtgcctgtggaatcacttgatttgttttggcccaactcttctcgcttgctcaataatatgaatcttggcaaagaaaagggagccagagtccaagttcatatgacttggagtttgcaacccaaggatatgtgaggtctctgtgtatgtgcatgtgtgtgcatgtgtacatatgcatgtgcgtgcccgctcacttaccacctttcaaacagctctggaagttgggttacaaaaatatttaatttgtatatattggggaagaaaaagaaaggaacaagatggtgaagcagtgaccaggtgtctacactggctgcaaagggtgcttgccgagggctgtagctcgagcaaccccaagcccaggc

SEQ ID NO: 50625 - DNA, 971 bp, Homo sapiens
acgtagccaaagctacagctgggccccgcccatcggctcagcgactgctcgcgctgggttctcggtgcgcggtgccgccggcagggtcccagctggccgccttgagggctgtattctgactgttgacgttggagtttaaatgttcagttgttgctggcttttgagttcgcagcctctttgcttgattgcagtgtaaatcattaaaatctgaaatgtggtgtgcacgctgtatgagaggtgtttcgggtcgtgagcgtcacgcctcaagggaaggcccaagatcttggacatcttgggggctggagcagcgtcacaaaatagcaaggtgctgtccagaggacgatcttgccgggcctcccgtcagagggctagaagcttgctctttgggcggagccactgcttaggttttcagtcttggtgaggtaacaggaggcagtctgtcacctgaggtcttcgagcttttagttgtgtttctgagagcaaggggaaattggaatacagccacgggttgcctaaggagcgggacgcgttccgaggtcactaggagatttcatcactgtgtgcacatcacggtgcaccgacacaaacctagatggccttgcctactgcacgccaggctgtatggtacaacccattgcttctgggctgcacccctgcacagcaggtcacagcgcggaatgctgcaggcagctaaaacagagtgctaagcactctggggaaggtgcagtgttccagtacagtgttacatcttatgggaccactgtcctaatgttgtctgatgttgacttaaatggcgctatgtggcttgtgactgtagtttttttcttttcccactgccctcatctcacttccaaaagatggaggttgtctgtggaatctgaggaaagccacgaggaatttttatactgcttaaataggcattccccccaatgaaaacgggctgacaacaccacttgggtgtggggtacagc

SEQ ID NO: 50626 - DNA, 842 bp, Homo sapiens
tagagacggggttcactgtgttatccaggatagtctccatctcctgacctcatgatccgcctacctctgcctcccaaagtgctgggattacaggcatgagccaccgcacccggcccgaatccatgtagaatttcacacctgagtgacctgtgcttcagagcctgtcaaagtccaggtgacagacctttgacaactcaccccaggggagcttacctgcactttctctgtggcactgaagtgtttgtcctgggaccctgcctgctggtttccagcagtgtttgcgtggcctgtttttctgtggtgacacgcatggacgtatgatttatacttgtggatcactcctgctgcacagcaggtgctatccagccagctgcagctctgctacttctgctcagaagcacgtgggaacacactggagaggagagtgagtttaccacagggagaactgcatactttctaatttacagaacttggcgattctctactacttaacaaagttaacaaataacttttggcacacctcacagagaggtgacatgcagtgacccttgattgctctgcctgcactgtggcaaacacggaaccagagccactgcgctgcgggaaggcagagttcaaggggtggagggcgggggttagaaaaagccctaggtgagccctccctgcttcctcctgcttcagctggccaggaaggtgactgaagccatcaaagcctctgtttcctcatctgtaaagtgggaatacatgacccccaacctcattagacttttgtgattatgcaatgaaatgaccagcttaaagcatttagcgtggtgcctggcacagagtgaatagctgatata

SEQ ID NO: 50627 - DNA, 2838 bp, Homo sapiens
gtgggttgcttgtgtgtgtactcattccctctttgtagaacctaagctttccgagaggcgtctgagtcttgattgtttttgttggaaaagtgcaatgtctggtatacagtaaacatgcaacaaaatcttcaatgaaggaaggaaggaaggaaggaaaacagtactcaccagaggacaacaaaactttcagaaaaactgtggtgttttgtcctgggtgtaagaaggggtgtgtgtgtgtgtgtgtgtgtgtgtctcgtgttcctcttctgcatccactttgacatcttgggaggatgggatttgccaacacacattcactgtgacctgggagtacagcagggattccctgtcccagtggagctggctccctcccagcccagttcagggaatatgggagtggactgagatggatttacaagagggtcttcttcacctgaagcaccaggagctctggcatgtcactggccattctcatgaggtgtgggaggagctccagggctcctctggccacagtgacagtggcagactctatggcaaacccatggggctagtttgttgtgaactttgcccagaattcaacacaacaccgactttatgtgtagctgtggaaagggcctggcatctccttggtggggagaaaggcagtgatgaccatgggccagcttctgggcacctcagggagcagctggtggggactgaccaggtaaggaggttagcgtgcacctggcagcaaactaggccagcaactcaccagtgccagtgaagcccagggaaagacaatttagcagctttagaagctttgactaccctttcatgtcgtctgttagattgaacgatataaattgaggatatttgtccatttttgacttaccaaaatatcagtttcatatacttcaatctaatctttattttttagtacctgctgtgtttaaagtttaaggtgcatacatcccagaaagaaataaaaagaaataccgagaaatgaaagaaagagaaagagaaaagaaataaaaagaaagaaattgtaaaatcaaaagtaccattttcccctttttttgcaggtgacttagggacagttatgagcatgagacaggaaacatttatggtggggaagttaaaacatcatttctgagaattctaagtgtggctctttttctcctcctgggcaccccagcaggtccctcctttgtatggaaatggtttctacttttcttccagccttaatgtgactgcatggcagccatggtgcagagctgggagtggtcagagtgagaggttcagccgaggagagacctgttagtcaccgtgtgctggctggaggttggagtgtgccggtgtccacttgactggcttccaagggaaaggtagacagctgcatgacagacaggcctggtcacagcaggttacgatgcactgtgtcatccggcacaccaggcaatttcctttttgagtcacttttcagctaagaatgaatcatgctccaccctccttttcagccctttatgcttgccggctctgcagccaagatgggagggaggccatttcctctctgctgagagcaggtcagcaaggaagctcctgagagtgcagccctttccctgctgggcggaatctgcaggagaatgcctggtccccttgtaaggtggcccctccaggagcggggtggccagccccagagccttctaccacctggaggcaaaccctgaacctggaaagtgagaggcggggccaggccatttgctagtagagaaatgtaggaaagttccttttctgtgtgtgttttctcttgactttaaaaaatcataagcttgcccatggagcttttgtgagaggagagatttgaccagctctgtgcctgccccctgggtccttagctggtcgctttgtgctttgtcactagaaaaggaagatgtatctaaatcactatcactagatttggccaatggaatttttgaaaacgttttccattttctcatggttttgaaaagtctatacttaccaagaatttggctttaagttgttgttttgttgttggcaactttcttttgttctctgtttcgtttatcaacctatagaaacaggtcaaaaattaaatgactccttatacaaggcaattaaagacatgaatgtgggtgacggactctgagcagagagcctttgcgattctctggcaggaaggaagaagccgcgggtgtggcggaggtgaggtggccgggcccctgctccctcgcgctgggctgcgtgctctggatggggtggtgtcagggctctgcgcctccgcccggcggccttccagacctgacgccttattcggagcagcgaaatggaatcctgaagcctgagaaaaagacaggactcatcaggggatctaaaagctggtgccttgctttcaggccaggtccagggttgggggattcccggggaggcgccaactctgagaagcaggcttggtgcgcgcctttgccttcgccttctcctccaggcctcttccattccctcctggagggctcccttccagcggcggaggcatgccttttggattttcagggttttttcaagagtcttcaatttaaaacgagtttctttagaaaaagattcctactttgcttcaggacggatgctgtgggtagagtggatggcggaataaggggtaggcgccaggccccaagtggaaacaagctcccaggggcaaagcactcctagttcctgaccctttgcctcccagccacaccttaggtctgactgtcacacacccaggagtatcctgagcacagcaccccttgctcagactccttcagtcatcatccgctgctggagaaacagcgtccaaactcatca

SEQ ID NO: 50628 - DNA, 726 bp, Homo sapiens
gcagtgagccgagatcgtgccactgcgctccagcctgggcgtcagagcaagaatttgtctcaaaaaataagtaaataaaataaaaaaagtgatgttttcccttctgcttgattacaagagaccaggcccctgtcattttgttcactgggtttgtgcccatacctggcaaagtgcatggcatgtgataggaatgtgacaaatatttgttgaatgaatacacaaaagaaggaatggaataatttatttgtaataagatcagttatatacttctgcaatgacggaggattgtcgggtagactaagagctgggagaccaccatgattcatgaaggcttcagagttctcagtctgttctccaacagggcagtgacctccccaagaggaggccacctgggtgtgtccagacagcatggctctggccagcaggagaggagctgcgatggtcacaacacgggtggccactgcgttctcatgagctgcgttgcttcccccttctttgctgttgcttcctttccaaagacaagttacagagagcccttccaagagctgggagagcttgtgggctccgacagcctggagaggagagcttcagggctgctcagccctgactagcacgatttatcagcatagcactatttgttttaacctttaggggaaaatgggatatgatgagacctaaagaaacatcatttcccaaaggtggatttcatttctttaaccgtttata

SEQ ID NO: 50629 - DNA, 2679 bp, Homo sapiens
tagagccactgcactcctgggtgacagagcgagactctgtctcaaaaaaaaaaaaaaaaagataaagccatgtgtttactctttatcaaagatgccaaagagtatagcctctgattacatggtttttaaaaaattagagtatggaaatagtgcttagtattatgtcagtaaattcaatgttttcatacattttttttgctctaaattggaaacgggggcaatcccctgaaatgtatgtattttattttaaaataatcctagcccctgtatttaatccttttcctgtctctctcctcactcatctttgctccttacacctctgcccagcagggcttctttcttcttttcccccttctttttctttctctatagagcatcaagccagcttcttcctcaccagcctcaccatccgagtttctcgtgggcagcttctcagtgaacacaggaaggcctagaccccactctgggagctctgaggaccacggtgtgcacaggcaggttggtgcccaacactctacaacatttacatactcttgttttcagaggacatcaaatatccagtagttttgcatttgggcctgagccatgactctgacgttggagattagacactgtgacaaagggagagaattgtagggggaacagactccgggtttctaagcagatggagtgaacagctgactgagaagctcaagcctgaagcaggtggcggattctcttagcagcaccaaatcaccctgtcaggcagcccagccagggcagctcaggagtgggccacagagcaggacctgccaggacgtccagagagtgtgggtggaagctgcttcccagtggagcctggccagggggcgactgccagacagtgaggcggatgagtcagccctgaaagcgatcctggccatgacctagtgggagaggagagaacagaaggggcagtcaggaactgacaggtgggctgtgcaacaggaaggggtcacagacccagcaggtggcagggcagatggaggagatcaagggatgtgtgatagtgggggggcacccacctgggtgtggggggtgcaggttggggtgggtggctgtggggcagggagcagggcaccaaacggggtggtgggttgaggggacacggggcaggtgggcaggacaccagccaggggatgcggggtgggggatgggcaggcgggagcccttctgacccctgtggctgcacgtgctgtttggagcacacagaggccagaggtgccaaggtgcaacctgttctttcaggttattgatctgtttttaaaggaaatggcttgggatggctggaacaatattcacttttaaatgaacagctttggactctttcgttgtgtgatctcaaagtgccaaagggaaccaaagaggaccaaattattccaaagaattatagcagcccagttgttagggatacaatgaagctcggcttcccttactgaggcgttttgagtggaatgaaatgcttcatttagcatttaatgagattatagtggcagagataaacatgctatgataaggtggaaagatcacctggtcagagccagattcctggaggtgatccaagctctgggaacctgctgctgagccgggcagtcaccaccccctgcttggttctcaaatctgtccaggcagcctgccgctgggatgtctgcaggggtgcatctgggaagagggggttgttattggtatgtgctctgctcactcggggagggctgggctcgggccccggagccacccagtcctgagtgttgctttccgcctcagcataagagccgcttttcttactgtgtggggaagagccagtctaaggaatattcctgcatttgtacagtgcctgccacctgcagtgtgcgtcccaattcgtgttattcttccatttcgatgctaactctgggagagaggaggcactggtgttagtggaggcactttccaggtgcagaatcttctgcacagagggaggcaacaaaggccggcagctgggaggctgggcccaggtcaggccaggatcttggtccagaccccacttgtcacctgtgcgttagtgcgctggccctcaggggcttccccagcccctctgctcgcctgattgtgactggagggctttgtaccctggagagaggagctatggagctaggaaggcaggaaagctggccctggactctgggagaagaaagggccagaaaggggcataggaaaaaagggaatgaacatttaccaaaagtctctgttcttggtgttttccgtacaacgtatttaatcccacaaggtccagtgagtttgtgttagtccagtttcacacatgtggaaaccgaggcctgtcacagagttgggcagagctggactccagcatcaggcctcgctgctgaaaggactggaggaaactccaggccagagcagaaggtaggcagttttcagaggaactctgagaccttggtgagtagcagaggctggagttggggatgtcagaaatagcaactagcaaccagagacatccagggagctctgagcataggcacagaggacgtgcaggcactgcagggcgtggcatgaggacacagccccagggctcagccaaggtggagagcagcacaggggcctggcagggaggagcactaacggattagtgccagtcctgggatggcttcttccccaggactctag

SEQ ID NO: 50630 - DNA, 936 bp, Homo sapiens
ctggagacaagaccacgtacagatttcatgcaaggacaatttgaagagttccgagggttgtatagactggtttgggacatataaacctggagtgtatgctttttgggtggggtgggtaagactttatcatcattctcaaactccatgaatacctggagtcctgccagggctgggtcgctggtgcagcataccacccagctgcagtccctgagatcagggtgctgtgggacagtgtgcagggaaggacaggagggtgcaggtgcttgccttgtcaactcagtaaaatacaccttccaagtatcccagggaagggtgaccagcactgcacgtgatggcaaagggtagagaggggtcagggcagattccttctcttgagacaggttactgagtcacttctaaattaagcctgtgactatatttggtaatgcaagatgtagggctgaagaacatgcaatttactttatgcaaacagatgaccatctgatgtatacagttgggctcttgctgctttggggctttgggtggaaaagaacaagccagtctgggttttgtggggtgctgaagccaggctccccaatttcctcatgtatgttttcaagcaaactaaaatcctaggtcaaacactgcattcctaaactttttcaaggttgcttgctttcagagaattgtaaaagaccctctgttagatcaccagggcaatttgatgttaaaatgctggaaccagaaccagcagcggggcttctttctctctgcgggcagctctgctaaagggagtgaaagaagagcctcccagaaaacaacgtgtgcattgtaagcaggcctccctcgggcctctggctggacagtgggagcgtgaagcctgctcacaggatggtaatttcattggttccactcgccggtcacagtggcacgtgctggtcaatgactctccactca

SEQ ID NO: 50631 - DNA, 1470 bp, Homo sapiens
cgtgtggttgaaataacaatggtagaacctcccatgtggtacatctttttatttgcttttaaaatcgggattttagtgtgtttatctctggctcatacactattttttttcaaggataagaaatatttctcaaatttaaatattcactaatcggtctatttctagtttttaaaaggtttcaaattccttatatatacacatatatggaatgtgtatgtgtgtatgtgtgtgtatgtatacacgcactttacttcttaattttttactttctaaaaaataaaagtctgatgggaagaagaaaaggtgaactacactttcaccatttgcctctgagcaaaacctttggtgcataattctattttccttagaaatatatgccctgggagtgctccttcctcctgcagccccggatggcccctcaccctcaggctcaccatcctccctagctttgtgctgtggcacagggcaggagccgagcgcagagaccgcaggcaggtgtcagcctcactccctgtccttggtggtttcccagactccacagggtacagaagtccaggaaatgagaaatcagccacccaagttgagtggaaaatttcagcatgttacagaacatgggacagctgatgtctgaggtcgcagttcagaaggatttgtaggtttacctgcttactcagtgcatttcactgattccttacaaagattacaaataaactcacaaaaaggcaaaaaaatcagttgttaattcatgttgacaggcagggtaacgggtatcattttgtttaatttcatatgtttagcaccatctgtaggagctacataacagaactctctggagttgttttgtttttaactcatttctcacaaatcattgaagggtacatatttgtaaggagagttcagctatcgtagaagtagagatgagtgatggtgaatgttgggatgcagctgagaagtgtactttttgtcactggggaggagacacccaccctttggttgagatgctgtgttgctctgctgagagtgtcagaagatggccctctacaggatgttctgcctccatagagcgaaagagaggggatgacatttactctgattgatgctgttgttggaaacgtggcccaacacgcacgctggtccctgtattctctaaattctccattcctcccaacacaggccactgagttgctcacattcctcccatcttcccagtttgactcagcgcccttctccccacagaaagaaacaaaaggtcagatgaatgtttcccctcaaagcttcccgcagtgactgagttttagagaaacttactctaaatgagaaatgagaaatgggaaatgagaggggctggtagtttacagaatttagggccatgcagtgaccttgcggattccatggggtgttcacagagacccaaggataatgagactgaattccccattataatcatttcccagagcctttcgacatgct

SEQ ID NO: 50632 - DNA, 4135 bp, Homo sapiens
aatactgttcttttcagttgaaatgatttggcagcaatgtaaatctttgcatttttttaggaagaaaagatgcaatgtgcttttcattttatctttgaagagaaaggttactgtcttttattctctcaatctagccatcagcaaatatatagtaattttaaacttcacatggaaaggattatctttaaacacatgaattccatgctcttgcagctctctctctgtgggtgtgtgtgtgtgtgtgtgcatatgtgtgtgtgtctatacatattatttggttggtcagcacaggagaaaatgcctttggactttatttgtcatttggcttcggagtgaagaaatgcattctgttcgagtaaacattgattgcgtcactcagtgtgctacacagcagccagattcctcatgtttgtgcaggagagacattctggagaaggttttggagcagtttttgcactggtatttctttacatcagaatgggtctgcagatgagccctcagatttgacctgtctgcaaatgctctgttgcagtgagggcaagaaaaaggcttctcccctgggggtggagtgggagaaaaaaagaaagacagtcagtgtttttagaggaaacataaagtaaaatcatgttaacaaaagtcaatcacattttgcttaaataatgagaagcagcaaaacctgattaaaatccctcataatagacacttttaaaaatacctgaatttttaagataaacttgaatattgcatttaaaaatcatacacgaatattattactgctgccaatcatacagaaataatttacgtagttcttggactttcacttcttaaagctttctgctttagcagatgcagctaatgttgagcacctcccaacatttcccaatatttccccttttccctctttctgtactatgattaaggtggtctaagtgccatgataccctgcagaataattctgtgatacgaataagaaattaaggagcaaaaaatccccaaacaaagcaagagaggcaaagtaaatttagtttcaactatccaagtcacccacgggtgacaaatatcagagcaagaatgtaactaacagaaaactgtaggaaaagccttcatctattaaccaaatcaattgattaagatagcaacatttgtatttgctgattactgggggcagtttcacagaacacacattcaagcacatctttcctgattttctaactgatctttgagaccaaaccttctgaatctactttccaaagtctacatgctgtttgcagtccctggagcagaggttgttagcaagaaatggagcactttgtgccctaacaactttttgagtagtcaggaagtagctatcaatgactgtccatcattaaaagcactatgtcacaacttcatgcaaatccaacagccagcccagggcttcattgtatctcagagtaacattcctgcctatggtttttctcttacccgtgtgagttctaatgtgtccttgaagcaaccagggtctggaaaacgccttgccgcagatcttgcaaacacaaggtaatgtgtgggtccgaatatgcatcttcagggcgcccaggctcacatattccttgtcacagtatttacagctgaaagattttctagactgggcatcgcagtgcagctgcttatgtttggccagcccagaaaaagttgaataggtcttattgcataaattgcactgaaacttttcagcttcaatggcatgggggtctgaaagcttggactgtagtctttcctcttcatcactaatggggctttctgagccactgtggtccttggaggaggtgtcagatggaggagggggactcactcgccccaaagatgaggagtatccggaaagaggagagaggccattgggtagctgggcgtggaatggagcagcggtagtccacacagtgatggggctgtatgctcctgagctgaggatctctggttgtggtatgacaggcatggagtaactctcatagagatacggggaaataatcactgggaaagaaaagggagggagagaagattaaggcaaaaataattaaaaataaatccacacgcaagtatacacacactggaaagatatttagcaacacacacgtgattttcttaggaagaagatagacccatttaggagggcatacacactggtaaaatgtttcatttccaccctggcacctacggagttactgtacttaatgcacacataggctgacagctgcacggagctataggtgctctgaagtcagacagtgcagccaagccagtgccttcgccgtccccattgaggaaggagagcctcaacattatttttaaacatacagaaaagttgttttccatgttacgtatgggctatttaggtgtattacgaccgtgagtacaaagatatgcctgcatcaagccgccttctaaaggaaaggagacttagtgcatgaaaaacgcagtaattcaatccttatgttgctcatctttcacatactcattatgcatgtatacacaggctttagcaaacgaagctgcgagatttgaatgaaatgttccttgttagtcaagaattttaaaagttttgaattaaaacgaaccctaaatgatcaaaagaatgtaagctccctttcaggacactgttaaaaaggaaaacagttgaatctttggctcttttgtaatggtatttgaagggtaatacgtagattcatatttgcaaagctctagatacgtagttctagatatatttttctctttttacctgtatgtgtgtccagttcgctgtagtttggctttttggaggcgttgaaatgcttcttgaccaggaaggagcgcggcatcttgccagcgggtctggcgggcgcccggcgcggataacggtccggcgggaggacacggcggtccctacagcatcgcggcgggccaggctcgggcaggggccgtgctcaggtgcggcagacggacgggccggcgcctctgaagtcacccggctcctttacgaactgagcccgttttggctgggagggtttttttttcctctcttttgcaagaaagatccaatcacagctgagaggttcagatttcagctcctccctctgggacagctgtgaacagaggaagaatctgttgtcagactaaattattctggttcaaaatgggctgttttttgagatttcagtggagaggaaaaaaagtgtttaagtattttcaagagaggtaacctcgctcggtgagccccgcccgcgatccacgctctctgggagctaggaggggcgcaggagccggggtctctgccctgcccgcctggcttccagatgtggtgcagcgccagcgcgcggggacacagtgtccgccaggagaaggaagggccgccctgcaccacaccaggccagcctctggtgttaatgagagcctatatttggaagtggcatctggagaggtttgccttgcacaaagaccaaataattacctcttggcttttgaaaaaggaagggggaagcgggaagacaaaggcgcctgtgagcgcggaggacgctctcctgggactctggcctggagcgggactgcagccttgcgtgcggcgagggcgctgcgctactcagggcttccgcgaagccaggggcagcgcggccgcgtgcaaattaagtactcatgtcaccgtgttagctatggtggcttgaaagaaatgctttgtagccctctaaaggcaggctgatcggaagaactggaagattgcaaagataaaaaggaactctggcagagaaggggggcaagaggtaactgtcatttggaaccaccggacattctctcacacttttgacaagagatcttatcttttcatgtattacagtgcatctttttttttatgggaaaaagggttgtatgggtctttagagacaattatttttatttctaatattcccctgcttttatgtggtgctattttcatcagtataaagccattaaaatccatctcagtatctaccagtttcctgtataatgctaaaaaagaaattgaaggatattattatgaatatagattgattaaagttttaagaacccagtctagtaactgcaaaaacacctttattttgtgtatggtcttcaatctaaaaatactttcaggtggtttattttaaat

SEQ ID NO: 50633 - DNA, 621 bp, Homo sapiens
aacttcaaggaagaatgtggctggagacgaccagacttcaggagaagattaccttcccgtcctgtccccttttcagctctccttgctgctgagagccacttttattggcaataaaatcactgcatttaccatttttcaattcattcatgtgaactcgtttctcctggatgccagacaagagcttgggagccacgagtacagatgcaaaaggctgtcacacttgccttttgcccttgctggcagaaggcaaccgctcgctgcacatgaaaaggtagaaggcccactgagttgttaatatttaagccatcttcagatggccgagctaaaagagtactttaacatgccctatggcacttcagggatcatgggcaccccccaagttgctgccgcaaggcccacacggagtttgctcctaccagcacccagaagttctcgccctggctcctgcacctgttcatgtgtgtgctcccccttacaaggggtggaatgcagcgggtctgagtgagtggagtttgcccctgcctcaccaaagcaatcagctggttccagcatgcatgcactctagttcccacctcatttgcttacatgctccctcccaagaggagttgaaagctgtgggct

SEQ ID NO: 50634 - DNA, 900 bp, Homo sapiens
aaagggaaacttcatttaccataaccttaagcaacgttttcacatggactgaaaagcaaaagacccccttaaaaattagcctcaagcagcagatactctctttttaggtttgtgtgtctccgtgaggtcagatggattccccaaacacggttttagagagaatcacaacctttaatagatcctctgttaaaaaagactgttagagaaagttgaccaagggcttcgttccacggcgaccgtttcctgcgtgtgcagctccacacagcgaccgcggcctgcaatgtgcggagcacagcgcggccccttccagccggagctcgcgagccgcggtggcggctggtggccaccccagggaaataaagccgttgctgctgcagcaaaatggctcaaagtccaaccaaagtctggccttttcctgtgagtaaatacgcggcctgtttggttttccgtcccgagtgattcccggctcagtaacgtttctcctccagggagcccactggaactccactggctgtgccgcctcctcgcccgtcccccgcgcgcgccgcaggccggtgcttggagagcgcaatgtccccgggagggaagatcccctacctggaatggatggttccagaccagcgggaacgcgctctaatccttgatggaagcaagcgtgggaggaaagcacaacgtctaggacttccctgtagtgtcagaacaggaagaagaacctgagaagtcgccggggaagggaggccaggagcaggcgtccggccccttcccacagcccgggagaaattagtgttgcgccccgcccctcccggacccccgtccccaccacacacaccagcgcccctcaccagtctttctcgaatttcctctcatgtctatcaataacctccttgtgcagaaatctac

SEQ ID NO: 50635 - DNA, 594 bp, Homo sapiens
tttatatgtggaatgtaagaactcatagaaacagagagcagaaaggtgttttgccaggggataggagggtgagggaaatggagggactttggttaaagggtatgaaattttagttacaagatgagtaagttaattcagtcttttaagacagcatgctaaaaagctctaacaaaagtagcatagtcagtaacctaacccagttctagaagcacatcattaagatggtgcttctgcacccctaactggtgttcatgtggggatcctgaagaactgtatgggtcttgtctcattctcacagtttccagcagacagccatgttttgtaaaaaagattgggaagagcaacatcagcaaaatgccattcccctgagctaattttagctatgacagtcctacatagagtatatttcttctcattccaatgaaatgaattcattttctaaatgtattattaactacagttgttgtttatctttatgttcctttacttcattattgctgtactttgtgtgaagtagtttaagcacttgaagttggtctagcctcatgtaggggggtaagtgtgtcatgattagtgtgtctccacacaccagat

SEQ ID NO: 50636 - DNA, 1725 bp, Homo sapiens
acagtattcgctcaatgtatttgacagacacactcatattgtcagggtaaaaggaggcagcagcttctttgaaatgcagggacagagcaagtgacaaggaaaaaaccacacagcaggtatgtccacattgttgtgcaaccaatctccagagctctttgatcttgcaaaactgagacagcgtacctattacacatcaaactcctcgttcccagttctcctccagcgcctggcagccactattctactttctttctctatgaattacattactctggatatctcttccaatttttattatagcctgcttgacgttgtaaagaaatcaaatgtttggcccagtagccattctcctctctgcttgctccatcacgctgaaaatcaactggtagcttcagctgtagcagacggagccctgagctctcctgacttgtacatgcgcttgtaagtacacaaaatgccctgctccctagtttctgcctgcacgagttcctccatatccctgccccagggcttcctgctttactttctcctcacatcccttcctgtagactccttcgcaaaaaaaaaaaaaaaaaaaaaaaaaaaaaattatgtttgcctcatgagctcccagggcacagctttgctgcctctcagctgcccagccgactccactcgcaagaacagtgtgttcctgaatttttttaataaaataaaataaattgtacttttatattatacattataattgagtgtggtagaaataaaatttaatttcaggtacttttgataatgtggctctggggtttttactgaaaaagtaaaaattcaataaaaagtattctttagggaaatgtgtttttaagccttttagacacttaaagctaacttttattaggggttcattcacagactgtacacttttatgatttctattcatatttttctcacttttgcttaaaaaaatcttttcttagagaagaactgtttttccaataaaaatggaatgaattcccatacattagtctcttctctgtaagtgcccttctgagccccatgcacacagaagagagtgaagaccagtgaagctctttagggagctaaataatagatgcagatgagtgtctaacatctatacagactaggttcctgataaacattgaattgaatctcctggcaggccagggtattaatctggggagaaggaaagccatgtgagttaaaaggggaagtatcacagaacagaagcaaacaatagtacctgaagtaaccttagcaataatagcctaatagcaaatgaagaaaaggagagacgggaaaaaataaactggcaccagagacccctgggaaagactcataatcagaggtaccaataaaggcaaatgtaaatacagagcctcagtcttctaaggcctcaggctcagaaattttacccatggttgctagaccatggaagtcactgtttcctttatcttggaggcaggctagactgaaatgataaagaaagaatctggactctgacatttagatttacagtagtgcactattgtttgtaagggcattattgattagagtagggcaaaaagatgggccaacataatttgttttagtctatcctgtattatggttacttgtttgtctgccaccaactatgaaatgtgactttaggaaagcaaatatggctatcattacatcttgttataataaatgaataaaagtgaatcattttatcattttcaggtggtc

SEQ ID NO: 50637 - DNA, 461 bp, Homo sapiens
gaattatttcaattttattcaaagattatcactgttttaatgtcaatggggaggaatatattttgttaaaccatcctttatttctcatagtgaacactggacacgttggtgggagttgttctgtgctgagagcatagcaatgaatacagagacagcagacctgccttcacaggttgtatgttctgatgcaagtggcaacaacttgaatgtcaatgaactttagtgctttctttgatgggcaaagggcagagctataaatgctatcacctttttttcctttatatttggaaacatcccatggcccacaaaacattcctcaagtttgtctttgggtagagtgaattcagctttttgcacatttagaagccacattaaatatgtctgtggcaaaaagtttggtgaagttggcaagagatgagtaattattttcacacacatgttaatttcaattttaaaaagtg

SEQ ID NO: 50638 - DNA, 613 bp, Homo sapiens
tgaaaacttaaaagactagaaagacacatcatttgatgtgttatagtatgccctactctgggagattgagcaaggaaaagaagaaagagccctctacatttatgggactctagaattatcttaatgcactccacggttgggccatttgaagaaacagctaattatctttcatgtgcccactgtgcacattccccagatacctggcaagattgcaaagcaccagagccaagagtgagtcactggaatttaaaggagatgagaacatttgcagaaagattcacagtgactcttagtgatgagtaaactcagatagctcagtaatgtagttcagtttagaatagtcttgccaaattcagttgatgtctgaagcttttcacatgtcactagcgagctttgtgtttctgttttatattgcaaagaaaacaatgcaaaaattaaaataagtgctggagtaaatggccgcgaaacttgcaatgtcatgaagataatatattgttctgtaaggtcccagtttatttgataaaaaataatcaatcaaccaataagcactgatgaggcaaatctttgttctgtgtgatgctggaaatcaagaagtgtgagacagaaatctaac

SEQ ID NO: 50639 - DNA, 690 bp, Homo sapiens
cagtccctgttattttaacaagtaaccctttgatttaaaagtcaaagactatttattacaagatgtggaggcactatcccagcacagaagagttctcttttgttttaaagagcaaaagcaaaacccagaagaaaaccaaaaaaacaacaaaaaatggtgtgtaagtatagtattaggaaacactaaccattcttaaaaatcctgtctttcaggaaagaacggtgaccatcagaagacaaacagtaggaggatttggattaagcataaaggtagcctgcctttctagtctatccttacaaaggccatgccataagagctgaactttggtgcatttcaatgtttgctgattaataattagacaaggatggctatagcaaactccttaatatttggacggggatgtaaattaggtaggttctcacagaattcctgcaaactcttaccatttgatttagaaagtttagcaaagaatatgggaatttaccttatgattgaatttaactcattaactttctttgtctggtttttctgaaatgttaaatatgatgtcgtgtgcatatctttctttaaccaactggagtaggaaatgatgatctgcagtaaatagaacaataacaagtttcacactaataaagcccaatagtaagtgagatattgtattctgttcatcttgtttatttttcattttta

SEQ ID NO: 50640 - DNA, 594 bp, Homo sapiens
gcagctccagctattagcgtttcagcagccgtggaactatgaccctgcacaggggccaccccatagcataccaacgctgctatctccttcagtgcctagggctggagttagcatggccttcatcacacccaaagagaccgaagctaactccctgggacctgcctcctgtcccgggctcaagagaacacagcaggaatgtggggtaattgatccccaggtgacatactttgtccagtgaaagaccagggcaaagaaacagcctgctgataaatttgctcactcttgctcaatagacgagctgtttggatttgggagtgcagtgatggcacaggccccagagccaaagcacacttaatgaagcagtgcttcactgagaagctgaggccagttcagggatctgagaactcccacttcatatttgttttctgctggcctgccttgctggccttcacctatgaccctaagttccttaggctcaaatatcttccctaatcaattgttaacatgtgagactttgcctcacactctatttctacagaagcaggactaaggaaacaactttcacctctaaatgttcattgcagagtactgaat

SEQ ID NO: 50641 - DNA, 1101 bp, Homo sapiens
ccattaagtctatcttcataaaaataaagaagtgaaaaatgtgacaagggacaaagaacttacttagtttcaaagtacctcctcagaaataacttactgtaattataaaagaataaaggagaactttacagagcacaaaagtgacagcattgccttaacaaattgatcaaagtgaacacttcattaaagcaacacatcaaaaattatgcatgtctgatagggagacagactataataattagcaaaatagcaggttcatgacattcccactaaagctgggtacaaatgaaatctaactaggaggaaacatctatctaatgtaatgtaaaggagaaaaccaatgtaatctaaccaaatctaatgtgatttaacctattctagtcctgagaaaatctccaacaaacccaagtgagacacatttcatataaaatgaatgtcctattttcttcaatagtgtcaaagtcattaaagttaggaaaagatcaaggcatttttctcactgaaggcaagtagcatcacagaacaaccacatgcagcagaggattctgaactggtgagtcatgaatgaagcccaaggactagaccacatcagagtccttgctttgatgattgcattgtgtttatgtaggtgaatgccctaatgttcttgtttgtagaaggtacacacacactgaagtatgagggtgggaggtaatgaagtatcacattggtagttaacaaacagttcagaaaataagtatttgtaattcacttgcaaatgttctttaaatctgattgtattaaaaattattccatgtcaggagtttctatataaatagaaatgcaaaacaagcaaacaagaaaaagtgaacctgcctcatatagagacaacacagtaaattattatagaaatccctaaaggctaccaggcttgtacaacattctaagacagtgctaaaactgtgctcaaattaagaatagctaagaagaaatactaacaaaaataagtagaataaacaaaggcataaatagaaaaaataactttttaaaattaaaataatggaataattacatcttcaataaataatgtgtcaatttatttataacccttatattttgata

SEQ ID NO: 50642 - DNA, 3305 bp, Homo sapiens
taccaatttgctttgtatttacataagattggaattatgcaggttacatgcttatgtttttttgatgttgaaatattaactaatacattgaacattatagaggatatagtttttttttaaatgtcatttatggaagagaattacatacaaaaggagagagggatgtgttttattacatatataaataatggctctgagatacaccatgctcaatcattttcataatccatttttccagtaatgttaagtaaataaaaacatatttcattagggtatatgtacacatcgcataattttatatagtttaaaactattcattgttatttgtagttcttatacataatacataacctgtttactatttaactgaaatgtgtaaaactgacaacaatgctatttttggattgtgagaagaaatttatttttgaagtattttttgagtgttgtactattttgtaaaacaacgagagaggaggaccgaaagcctcagaatgagccagcaatgctaagaattctttgtcaaaactcactttttaggaattcccaacctatttccaactgccttgcattaaatgccatttatatgccaatgattctaaatttattcagagctctcccttgcatttcaaacaaatacttttagtgccttctggatgattccatgtggatgcctaatgaatacctcaaatacaaccaacacaacatgtcctctgactctgcagacacacacctcagtcaagagatgttctgacttttcagttgctcttgcccaagaccttggagtcactcctgaaatgttttatcatgacccatatctgacacatcagcaaaacatatctggaaccactgttgtgacactggtgttagaaacaaatgcttgttccttggtaccaaaaagaagaaatagcacttgaacataaatttaattttctcggcaagacaatctttacttctatagaagggtgtgacttgcagatggagtaaaggtgagggcacacatggacagggagggtaaggggttcttattcctgatgtaggtagtccctactgctgtgtcattcccctattggctagggttggaccccacagtgtaagctaattcttattggctattttaaagagagcagggatacaagctggagtggcggggtgggtagtttggtgggaagggcagttacagaacaggtgactcaggatgattcaggtcagagcaggtgaccagaggtgactcaggtcaaagcaggtgaccaggggaacagatgtgaactactgattagagctggtgggaaagttgtgaaactagaagcaaggggtcaaagaggacaaggaagttaaactttaaaatagagaatcaaagaataagagagctgaacatactgacacactgattccttgaagagaaacttggagttcactatatctaacactggttatcctcagccctcaactgtgtcagtctcacatttcccacctggttcccactttgacctttgcctcctatcagtttccagtttgactccaagtaaaatacaaagttctcagggccctctgtaagatctgtcccccaacaccctcaggcatgccctatctgctctagtcttttgctacccacccaataactcagaccaattccactgttctgtttaggcatacacaagcctgaggtcctttgaatttgttgccttcctctccaaatagcttaaatagtttactcttttacttcacgcctattttcaaatgtcacctcctgaagatcatttttcctattatgctttataaatggcaatgccccaaaggatagtactccctactgcatttaaccagttttatcattgcctgacatattatgattaagcattttcttatttgctttatggtttgtcttggtcccactcaaaccaaagctccacgagggagagatgtcatctgttttgcttagtgctatgtccccacactggaacagcgcctggcacacagcaggcttgcaatccattttttggttgaatgcctactatggatatttctgtagcccccaaataaaacactttctgaaatagtagtgagtagtgagaactttgcttgaaaatatttccccgttgaaagttatttgtatttgcttaaaagaaagaaataactataggcatgtatggggtgggggtaaggggaagacagtatctaatgggactgggatggaatgaacattctttagtcctgagtcattctttagaagaggactcagaagccaggccaaagatgatatcatccatattaatgagcactaattgaacagtttggccaaaaacttcccctttatctgacaaaatgtgcaggactaattgaacacattttatgagaggttttgctgccagataccatttcccacaaagatctgcaatttttacatctccctaggcaagatactaatacagtatactagggtatataaataggagagcaatttcaagtgacacaagtattccctttatatcccatggtggccagatccatatgagtccattctgctactttatggcttttactacttgagggatttaggaaaagtggaataagttgcagtggagggacactaagataattaaatagctaaaacgtagcacctgtgaggaaggtccagtcatttgcttcatttgattttataaagagaaagctgaaaggtgatttcataattgtcctcaaggatataaaaggttacttttcaaaaagtggtgaccacctgtttttaatcacaattgaagaaagattaggaaaaaaattggtataagctgctatgtgaggataaagttttcaaaaaggaagactggaacattgaagaacagattctacatacaaattattaaagattaagaactgtaatttcattcttagtagacatttaagtgtgggtttgtttgaattattttttggaggcagggccaaatgaccaaccataattcctactgtttgtgaccctctgatatccccacttacataaacaagtagtatttccccctcactggatagctatttctctggaaaaccacatgctctctgcctgtgtgttttctaaacatgaatttgagaacgttttttattatgatacaattagtctcagagatagaatattagagttcaaatctggaagatgaatcttagaactattaatcctggtttggattaatctcactaagcaattttgaaagtaatctattcaacaatattacaagaaattaattttgttttgtgtgtctcttgtttgtttgcttttctggttctaggaatgctaatttatggtagtaaagcttctt

SEQ ID NO: 50643 - DNA, 3699 bp, Homo sapiens
tttggcttaaaatttcaggctatgcatgtttagaaccagacgttgttcgtgattatcttcctcagttgttctttccctggaagctagcaccaagatgaacacagtacatttttaataaatacaagctagtgattaaatcaacaaagcctccagctcttctgcacacagaaatacagtatgcaatgggaatttcctagctttctgtcttacttaatagtaggcagtgtagtatcacccctccacttccagtttactccctatagcttacttaccaaaatatttaatccctgttgctttttttttcttgtctcaggctagggccactagctttctatctttcctaccttacctttccttcacatattagctacttcatgttaaagaaattacaagtgttcaactgaccatatggaattaaaatttacttagaaaaaaatgaaataaaaaaaaccaaaaagtaaactaattcagcaactttatgttttatggagtcatctagcctcatgtaaactaccattaagcaatacgtaaacatattaatctgcttaatacgaaagtaatgtcgtctggccgcagacattctgaaagttttgccacattgtttcaaaatattggcttgtagcccttttcaaagctactgattattgaaaacttggcgaccatgtttaacaatgaagaaaaggcttccccaagcctacgtagattggattctctaatacatagtaataatgttttttaaaataatgaggtgtgtaataaaatggaggaatatccatgatgcattgttggctaataaaacgatatactgtactatatatgatcccaatcttgtttctaaagcacactcattaaatgcacagaaaaaaaaaatcctgaataactacccaccacacttggagactggctaccctgggtagtaagaaggagaaatatggggggaagggcgcgagagagggcaggtttcctcattgtttggctgcttcatgtttttctcaaggagcaagcagtacttttgtaattaaaaaaataaataggggaaaaacactgctaaaagcatacttttttcctccgtagcaaattcttctgatttgtaatgttaaaaatatatctctggtttctcgattctaaaaagaggacacacgaaaacaaaattatagaagttccaaaaaatcttggatttgcaaaattactccctcgggttctgcccgtgggtcctccccatgccggtgtctgaaattccccaagcaaaacgcgggcactgcacttccccggaacggtagtagacgctcaaaaacacaaaaagaggccttggcgcctgctataacctctcagtcccctcccagcccccgagacttccccgagtctacgtagactggattctctgcctccaaaaccaaaacagaagtcactgggcggatccaaaacggccctaaggggcccgcgggcatctcaagacgccagcctcgggactctggtccccaagcccaggtcagagccgaggacgagccgaggacgggccgaggacgcggcgccccggcctccctcgggcccccgacctccccggccccagggaccccggctcccgacctccaggcttcgctgggcccctttcgactccccgacctcccaagtcctccgcccccggcccgtccttcccccaacctgccccgcagcgcctcagtttcctggcccccgacctgcccgcccttaagtccccctgcccccgactcttcggctgccgtccccctggccctctggcctccaagcgcatcccagtcgcccgcccggccctagcacgcgggactcgcacaccccacgaccccgagcccccactggcggcggcgttacctgtggcgcgggcagcggcgcgcaggccaggcgctaggactcggcggggtccgcagcagccagacgccgctaccaccacaataacaacacggacgccaccgccgagtggagaggcggggcccggacccgcgactggagcagccagagcctcccggactccggagccgccggggtccgggcatgcgcagagaaccacgggcacaggggcagctccccgcggacgccaaagtcaacaaggccgggagacgcccccatctggccccgcccccctcagggctcgctccgcccccaagcccaaacaacgcgaggccttgacaggccagaagacgatggcggtaggggagatcacgcgagagcatggcctccacctctcctccccaccgccatctccacgttctcgcaccggcgctggggtgcaggctttcagtggtctcagggctacggcttgtcggtgcctcgccgcacagtcccctttgcattgaaggacacggtcttacggtgtaggagcatttttgaggtgcattcctggatttggaggcgaacccccaatggttacctccacagaggctttgcgaagggcgctcactgacttaggtgaagagcgaaggctcaagactgtgccgctttatagtggccccttgacgtccagaagttccccccagcgccggtcataagcactcccgccgcctgggccccgccctgcctgccaggcgccctccagcctcagctcccggacgcccggcgtggccgctttctcgcgtcttgctgacccgggccgggggcgtgtgctcctcctgcagcggacggaagatgctgggccacgcaagtttccctgggcttggttaaccaccccaaagcccatttccagaaggaaagggtgttgaggaggagggatagaaagtcgagaagagggccgggtgagtggctcacgcctgtcatcccagcactttgggaggccgagacaggcggatcacctgaggtcaggacttagagaccagcctggcctacatggtgaaaccccgtctctactaaaaatacaaaaattagccgggtgtggtgccgtgcgcctgtagtcccagcaactcgggaggctgaggtaggagaatcgcttgaacccgggagtcggaggttgcagtgctgagatggcacctggcctgggcggcaagagcgaaactccatctcaaaaaaaaaaagaagaggaaatgaggcataggggcaggcgagccgggaaaatattgctactaaggatcctaagcagtgaacatgctgttaatacttgtaagactcctagcaaactgcatttaattttttaaattagttttagtgtacataaaggcatgtcttttccaaatactgtactttttgaagtgttctttgttgttcattaatctttgtgcgtttcccttcagtctctaatagtaggttgtagcatgatttgcttccatcgtgtgaattctgttcggttttgattttcaagtatgagagtgagcgtaagctacccttataggttacctaaggtaagttagaattagaacgtctttatgctagggttactactccccaccataaccaaccatctgcaaaagcgttcagaaagaacatgctagcaaggtcaaaagcttcaaatcacgaaataagaacttgaaaacgagcaaaattgctgctgaggcgctctgccatttaactcaaaggcttcactttatttaggtttaaagtatgagtgcatattcagtggacattgagctccgaactgttcaaaatctctattcatctgcattctggagtagagctgcgggtcacattattagctccatctttggatttctgcctggacccagggcactcctaacc

SEQ ID NO: 50644 - DNA, 1318 bp, Homo sapiens
tgtctgtgcccacatttcctcttcttgtaaggacaccagtcacattggagtagagcctaccctcatgacctcattttaactttacatctttaaagaccctgtctccaaatacagccccattctgagttactgggagttaagaatttcaacatatgaatttggtggctggggatgttgggggtgggtgagaggatataatacatcctgtaacaaggaaaaacatttcttctcctgtaactgaatgagaaagggttggggaaggcagcgctaggtgttcagattggcggtgaaagatagaaaggtgcctaatttcatggcttctagtctcaatgcgacaactatgggtaaaagattagaaaagaaaaaaagtttgaaacagttgcctggggaaatggcagcattatattactaaagaaacacagtaggattcctgggcagcaataagggcccatttcagttttgtggtcatgaagttaaagtgaaaccattcagctcggtttgtaatttcctgtagcaacacgcagctgctctggaaggcagaaggaagcagatgggattgtaccaggcaagcgtcactcaccactagaaattaaaatagtgtgcaattgtgagagaggtttaaaataacacaagcatttagatagaagctatcactctttttcccaaatattaactgttgccaattgcacctctgtctgtttctgttcctctctgagcttaaacaaatcaacttgcattaagtcttttcttagaatctgagactttctgcggtccatgtcacgtgtctgggtttcagactacctgaacctgataagcaggaccctctagactagagtcaggggtgtccacaagcaagccctgagggaggacaaaagtttgcctgaggccagaaggtcaaaccaaattcctccctggtgaagaacttgcgattcatttactttcacatttccttatagctggggagctaggaaaaggtcactactttttgtgttcacagcctaaagtgaacttttatttattcagtcagcaagtagtgttctgtgtgctcactgtgtgcaggtgccattctcttcagtgttagtgaacaagaaaatgtctgcatataaagtttggtagtggagatggaaaggatcacaaaactaaacaaaatcgtaattttgttttagacagggataatgctgtgaagaaacaaaagcatagtagaaagttagggaaggttgcataagctcatgagatagggtgattgcatgagctcatgaagggttgcatttgggcagagcatgatgaaagccagagaaaaacacactttagatctgga

SEQ ID NO: 50645 - DNA, 487 bp, Homo sapiens
ctttgcctcccaaatagacagaaacccttgaagggagtaactttaatttttaccatccatctccaagacctaacaaatacttcataactacttaaaaatatttacaaattaattggtttctatcaaaacaactgctcttacaacttattttaatacatactattaatattctaaactggccacaatatattttgccatcccccaaaagcaaagattcttggagtcgtctcataagtacaacatgttaactcatcgcgttaataattatcatacactgctgggcagattgcaccagatcctggaatgtcatcaattaatactgagcactgagtgttattagtatgtgttcttgttaatcaggactagaattctcccatctgaggccaacctgtgagtattttctcaaatttctccctgccttccgtccaaactggaaacactgtatttgaagcacattacaaacaatgcacaatgctcactaatcttg

SEQ ID NO: 50646 - DNA, 1621 bp, Homo sapiens
agccagccggagccgaggggcagtagagaaagcgatgccaggaaccagagaccgggtagtggcgctcagattaacagggaatgtttacaaggaaaatacagatacagctggctattgtgcatttttccgtatatttactccaacaacaacaacaacaacaacaacaaaaagtttaattaaacatttaaatatctggagagacatgctttaccactttcctctcttgtccaaatagaatgctgtcttctggttggctagagatgggtaccgggtggccagtatgtgattctagaaagaggaaaccaatggctctaagacagggccgtttcccatgcgagcatgctgctttgcagagaagcagggaaagtggggagcagattgtttgaactctgatgtggagtcaatgtcttcgggctgacacagcttcagagtggcacacctcccttcctcccttcccgttatctccctgtctgctaggcaaacattgactttgtgctgatctaaagtctgacttggcaatctgttaggatgaaaagcaatgaagccagcaggtaaatctctgtaaaaaagtccaaagtgcactatttacacgcacatcactctgtctctcaagacaaaaaagcaaggcttccctctcatattagtggacaagatgcatttaaactttctttacaagaaggaccacaacagaatcaggaaatattttcttaaaataatagttataaaaaaagagactgaaaagttgtagaaatatgtccgattccgacatttgaggtgaatgtccccatccccttgatttgcttgcattgagcactgtattttgagggacggtgacctggcaagaaagagaaatgatgggcaataagtggacccaactgcacagggctagactccgaggacagcagctgaacaatggctgcagacgtgggcttctccccacacacatgcccactgggcccgtgccacagcgacggtggcatggagcactacagaaggaaagtacccactaaatggtgcaaacacggcctggcccatctgtcataaacattaggtccaaaggccacaggtgcagacggcactaaaaagtaaaaattacactcgggcagaggccacttggtaaaacaggaagaagagaaatctaggattggtttccaatcaataaatggataacaacagtctattcatctttggcacctgttgtttcttcctctctctggtttgccatgaataaagctgttttatttgtaaaagatgctgtgtgtacccaggaccagcctctgtctattgtgcactcggcaaagtttgtctttggtgctctccatggccagctggcccacgctgcttcctccctgtcctaccaggtgtcagcgcctctgctctttcaccccctttccctggtgcgaacccacccccagagccttctctcattctcctgggtaaatactgtttgatttcacaaatgtatctttgcttgctacctagtagcaagcaaagcactgtgccagaccagaaagaaggtgttgaagggctgtgaacccagccaccacccaggtagctgacaggccagcgagggtgcagacattcacacaggtcagcagagagcagacactacaagtgggct

SEQ ID NO: 50647 - DNA, 954 bp, Homo sapiens
ttatttattaagttaccctacaaatacttagtgattacctaacaaccatgtggcaggcactgttttggctaaatgccaaaagctaataacttaaaatggggagatgggaaatggggcctctatgaggcagtatttttggagctcctctctctctagtctctgaaagaacattaatgaacggcccattgacatgacatacagctggtaaagacagataccactaagccctttcaaatcactgagagaagctgaaattttaatgagacatgaaaagtcagaatcacagatatctgacaaccaaaaatgtggtcaacaaatttagaaatttagaaataaaatacaagaagttaaataaagggtcttaactttcacaaccttcctgtcaggataaaaggctgaacactattcataagttgctaacaatgcttttattattccagagctccatttaaataaccaaagctaaagaaaaattttaactatggggtaatacagtgcaggaaaattattaaaccattcaattgataaattctgtaaaccaaaaataaaatttgaagcccccccaaccaaccatctgaatgaacttcctcctctaggccagtgccctataaatttaacctgaaagaccggttcaggccatgacaaaaggcaggggttggacttgcctcatcatgtcctcttccctcttagaattcaggaaaagtcaacaagaatttaacactaacacagaggttaagcctgataagaaacatttacaaactattatctgtcaagcctgctacctggaggcttcatctgcatgacaaaactttggtctccacaacctcttatcttaacctagacattcctttctactgacagctctttcaaccaactgccaatcagaaaactttaaaaatctacctatactttggaagctaccctcccagctttcatttgtcccacctttctgga

SEQ ID NO: 50648 - DNA, 2692 bp, Homo sapiens
gcacatgtttacctatgtaacaaacccatatatcccgcacatgtaccctttaacttaaaatttaagaaaagaaaaggtgatcttggcatgtagcagagagaaatttttccatacctggtcatcctggcagtgtggaattctctagaaatgtgcatactgaacacttcacagctaaagaaacatatagaggagaacctacctatcgtagccaagaacagagctgagtgtttaacacagacagctacccctttgcatcctcacacacttcactcccaggacacacactggggccaccttcaaatagggaactccaccctactgctggcaactgcaggacagtgaggagtataatcttggctctagagtggaagactcaacaggtcacgtggtctcccaccaggctttcaggaagaagaggagggtgattcaggatctgctctcaaagcagaaaataacatggtgttggcctctactcccaggctcatcccccccgggtagtcccctgtggatccggagacagtctcgaactgatgccaactgggcacaaaacatgcccaccatcctggatggctcatcccggacaaacgggacgcagcaggagttttctctcttattacattaaacatctatacatcatagcctcaattttgcctcttggagagtaaagcctaaaatacttaactatctggtcctttagagagaaagtgtgtgcctcttcctccaaagcttaagcaactacagccacttcagtgagagctgcacatactttagttaataccaggcatctactagtgaaggactgaacctcctggtaagcagcacttccatcatatggaagtgacagcaacaatacaaagaagtcctgcccagagacaagcccaatttcccagttttctttctaacagatgatagacccaggactgatcacacaatgactggtattctagtttagtgggagaggaaagggtagaaaaccaaaaagaagaagatattttccatacctgccacccatcatttaattcaaatatccaaagatgtgattactggtgaaaatgacaataacaagtgactaaggattactattagctttttagtaggagttcctataaattaataagaaaatcacaaagactcacaatagataaataggcaaagggcatgagtaggttatcaagtggttaacaaatgtggaaaatatttgaggcctcttcagtaatcaaagaattacaaatctaaaaagaagacagtatttttctcctactaagcaagcaagattttcgacctaagattccaaggttttcaacccaagagaaaagaaataaaatgtataaagaagtaaaaagtactttagaaatactagtataaacaagaatttttctctttccataaaacatttattccatagctccattgaaaagaaggcattgacagacctagagccagaagtacccacagcacaacaggcagtgaaaaattaacattaaccaaagaaaggtctggcctttgcccttcgctactgggaggtgatctctaggcccctgtaatatcctgacagatagaactgtgtttgtttgccttagggcttcagtcacgtcagtgtagcaacgtgactcatgtatcagttaagttctgacctccagaggaactactgactaaagacattggtctgacctccagaaagggctagagactaaaggtgagtcatgtggacagtacaggatcaagccataataaaaactctggacaccaaagactcaggtgagcttccctagtgagcaatactctgtgtatactgtcacgcgttgtggccaagagaaggtaacactgtctatgactccaccagcaatgatggccagaagctctgagtttggaccccttccagattctgctctctgccattgcctgattttaatttttgtatccttctcttataataaaagtgtaattgtgagtatagtgctttccttcgttccctgacctgttccagtgaattctccaaagagagggtggatatggggaacctgtgagtttgtagtcagctggtttgaagtgagggtgggttctgggcaccgccaaacttgccactagtacctgaaatgagggcagttttgtgggactgttccttctaactgtagagttggctaacctcattacacactcatactatggtttttttgtttttcagacggagtcttgctcttgtcgcccagactggagtgcaatggcacaatctcggctcactgcaacctctgtctcctgggttcaagcgattctcctgcctcagcctcccaagtagctgggattacaggcacccaccaccacgcccggctaatttttgtattttcagagagacagagtttctccatgttggccaggatggtctcgaactcctgacctcatgatccacccgcctcggcctcccaaagtgctgggattacaggtgtgagccaccacgcccggcctactttggtttctagaaagaacctttggagaagtggctaatgctaaatgtctaaagtagaaaatgtaccaatcacataagcctggaacatcttaatatgccataaagcaagacagctaacaaagactaaagagattaggtcaaaaaggcaaggaaaacaactttaaaaggcttctactggctatgatgggacagtctgaccatcaaaagaatgagtacaagtaactgaat

SEQ ID NO: 50649 - DNA, 2720 bp, Homo sapiens
gtctcttcctaaattgctaactgtccaaacttatgtataaatcatacaagcttcaccaaaacacaaaaacttaagaaactacacaataaaatagttagcaaataggtacactttaaatgtttgcagcagacttgagaacattcccatctggctgaatgtctcgtagtaacgtgactctttatcaacagtgagcacatgagtcttccttggcagccaagtctacactacttcaaggtatgaccacactttaaagagtcatgatggaaacgactagattacgaaaccataaacagtaaacacagcacatccaccaggcggtggaagaaactatagagatattccattcagaagctgctatttctactgttggttaatgtatttttgtttctaccaaggaagctgtgaaatccgcgtgcacacccatcccaaatctatccgtggggcgggcgcaggctgagtcattcctaggagtaactttataccgatcctcgcactctggggtcgggacaaagacatcatctctccgttcctcccattcggtgagcttcgttcggcctcggccaaactccactctcccgtttctcgagtccaacacagaattaagggctgatccctggcagcgatgagcacaagtcaagatgcgtcttgggaggttcggacgtccctcgccctcggccactccggcaactaggccgggtactaagcggcagcgcagagggagggatcccaaggctccggccgaggaagccgcaggcagccccgcagcacgagtccgacccacacctccggcagcctagtggagcatcgactcgaaccgcttttgtctccacaggggctgtcgcgccgggaaagcggccagtgggcaacacctgccggggcgggaggcgccggggccctcccgtgcacacacctgcgcgtgggccgggctcaggccgaccggaaccctggaccatgcgaccccggcccaccgtgccagggcccgccgcgcgaccgctgtgccagatgggggaaggggacgcgggcggcggcgacacttacccggcaacgcctcctccttcgccggcggcagcagcagagccagcgacccccggcaccatcttccgccgccgcctagtcctcggcagcggttaccaaccgcccattcggcaccgctaagccgacacaaccgccggcgtcccgggcgcccgcccgccgcggccccgaactctaggaggcagggaggggtccgggcggacaaggacgcgagcaggcccctcggctctgggtctggggccgggggacagaaggccgcggcctgtcagagccgaggggcccaggcgactgggggattctgaggcaacgccgagggctcggcagggccgcggacaccgccgcggcttggtttgttattgtcgactccgtctcttcctccgcggcgcatgccgggaaacggcctgccgggggaggggcgcgcctggaggcgcagagaggcgtctacgcaggtccggaagtcggcagcctgccgggaagggggcggccccgcctccggctctccggccggcaggttggctgtcctggcctgaccctgggagactccgctggggccgcctgttatggtgctagctgccgtcccggtgcgtactttcccaaggtgaatttgaccttctttgcgacagctaggccctgactaaggtcgacccaccaaacactggatcgtccccaggcgaaagagagcttgttcccctcagcctgtcgcggaggagcggagccaatcgagggtctggtgtccccgtcgcctctccaggggcaacctgcggactaggccaaggtctgtaacaggataacgtaccagcgcctggcccaggcgttcctgccgccacctccccgcatatccggaccgccgggactgcacgcagctggcaagcgtccccctgttaactctgcaagggtggggcggcaccatttctcagaccaggtaaggcaagaaaacatgcaagagagaagagagggaagcctaggccaatcggaatgaaaatgtaaacgccacaaccacgttttcagctttacaaatactgaatcttgtagtgggtctagtgggttaggggttagcatgagcaccctaatggttgggagacagtttcaggggactcttgcatttgtgaagatgatcagtcacaggcaatgacttgaagccacgaggcttgaatattaaaatctgatgagcagatgttacacgtagaataattacataatagttctcaaattcctgttatatccaggaatatctggtatgagtgaaaacttggaggtgccttctctaaagtcatcaggaattctgagttgtgtttgtaaaaataggaggcacaagagggcaccaaactgaacaaaatgttaggtggaaactgaaaaacgttggttagcatgaacaatttcagttttcagtcacactgaccagtatctgtaagttaggattgagatgggcttgttttatttatttacttttaaatttgtgctgctacatatcccaaacaaatgtggtctttatcatcactggcaagccattttacttattggttaagctggaattttattacaccaccccagcaagatagaggagaaaagcgaaaattaagtagtaaatggttattatgccttaagggaaggtgtgaactggcaagacaaaagagccaaatttagtagtaaagcatagtcatcagcacacagaaaataagtggtgagga

SEQ ID NO: 50650 - DNA, 1505 bp, Homo sapiens
aacccaagcactaggttccccactgccacagcaccctcttgtattagaagtcactggagatgccacagggatgaattggggtttgtggcaaaagcaaccaatggaaatggtagctgtagggcttggatctcaattatggaaaggagcagaatcttgctatacagttttagagcaacagctattggccatacatagaccattgcaacaagcggaggccatcaccagaaagcagaccatcacagtaaaaactgccactcattcaagagtgggtgaaaggcattctagctaagcctacctccagggtgacacagtcgcacctatctataataaaggggtgccgtgtcaggcctgtaagtcctttaagtcaggcactgcaggaggtgcttggacccatccactttaaacaagtagaggggactggcatagcaatggaaccacctaccaggccaaccactgtgtccgaagggacctgctgagaccctctagggcccggtacactgatgggtctagcaaaggcaccaacaccaatggtcaacagttgtgatgcaaatggagactgacaccatatggataaaatgggcatcagaacaaaacttagaccagaggtccacttaccatataacccaacaggcacaggcatcactacaaaaaagaatggcttgctgaaaacccaattacatgcactgtcccaattccatgcattgtttttaacccaagtacatacttaaatccctggactaagaatctccctgaagtcacacaaaggttagatgagtcacccactaccacacatggcatcatatcctgtgactggttggcacggactgtgaaacagacctcataaactctcagggttacctctgagtcactgagtcatgctcctgaagcaggtggtcagaccatgctcctgagagcaccaatggatctgctaaacataactggctatgtagatctgaagttgagctggacagtgcctccaaactggatcagttttatggcactggagggtgccatgaagactgctggaggggaggtggtcacagctgtgctccttgatggatatctgagagccttatgataccaacacgcagcagcaccaatatctgctggagtgctcacagggcaggcagtataggcaaggctggaaacttaccaattggctagtatgcttgctcctaaaagggaagccatgtgtggtacggtaagccaggcctgaagcccattgtgacctctctaataaggcccatgaaaaaaatatagtggtaataatgttacaagaagtggatacacccataagggtccctattaaatacctgtgttcacttccataggctgttgctcctactaaccatgacagttggtaatgccttcctggactgggctgattatagcagcagccagcaaccagtctgattgtagcatatatgcatacctccctgctgtcaaataataataatatgccttgaaatactctgcatttctcccaatggaactggagtgactga

SEQ ID NO: 50651 - DNA, 1458 bp, Homo sapiens
agctgaacaattataatagaatgggctgcgctgccacccatgcttttagatgtccagggtaaaaataatttcccctcaagcctaattttcgaattgtttgttttattttccccataaaatagggaagaactgtgtgactcaatttcaacattcctgtatttattatcaacatatttcacccactcctacctggcagggcatcaggtttgtgcaatcagtgactatcctgggtcttgtcaattgagctgttgtttggcgtgtggaaaccagagagattcacttcatgttacactctgggctatgtgcagtttattgctttctgcatgttaatgttgggtggagagaactttaaatgtgtcatagattggattttaatgagaaaaataaaatcaaaggaaagggagaaactgaatgcaacatcaggattttaaggaaaacatttcttgttctgatttgattttatttactgcaccaaatgcaccatgtgtcaagcatattctattcaaataagatttatgaagtactttttcttatttatttatttatttttggacagagtctcattctgtcacccaggctggagggcagtggtgcaatcatagctcactgcaaccttgaactcctgggctcaagcaatcctcttgcgtcagcctcctgaatagctgggactacaggtgtgaacgaccatgcctggctaattaaaacaaattttttttttttttttttttttttgtagaaacaagatctagctatgttgcccaggctggtcttgaactcctgggctcaagcaatcctcttgcctcagcctcccaaagtgctgggactataggcatgagccacgatgcttggcctgaattatgttttaatgaacggtgtcatgttggtgccttttccaaagcatttttgtttgatgtgttcaatgccatcattggcacttaacactcttcccaatagttttcatagatacaccatatttttgtggcacttattgcagcatttttttttgttacataaatatacagaaagtgtttagcaatacaagatagctgagttatgccattaaaaatgtatgcacagtccctgcatgcatccaaaggatgctgagcaaccagcatggctttcatgtgtcctgtttctgcccttagtatccgttatcttcctgtgtcctagaggccaaagtcccaatgctagacctagtggtccggagttcaccaggtcatccctcctggagccactctctcccacagcacccaattgctccaacataccttctctctctttgaaacagtttcacaacaagaaggtgctggaaaggaaactatgtatttctcacactgtgctgcttcgcacctctgtaactttgtctcaaaaaacccaacacagagtgttgttggtcattcagtgggaggcgccaatacttttctctcaagtttttaaaagatcactaagtaaagcatg

SEQ ID NO: 50652 - DNA, 578 bp, Homo sapiens
aggagtttgaggctacagtgagctataatcatgccgctgccctctagcctgggccacagagcaagaccccaaaaccacacaaaaaaacagtcatactgatatgatacctgtagttccttccaatccagcactccagggtttatgcttttctttctcagttccctgttttaactctggtcatatggaagagagaatgaagtcaacatacacaaaagcagaaaaaacctggacagaaatccctggtgctaacgtaaatccctctacacctgcctttctcaagggttttgaaaattccaggaaacccttctttttctaactagtctagttggattttagtcttttgcaactagatgattgttgactcatactgtgatgagggaaaatccagtgtcatcatggtccctttgacattcacctttacaaatagttttgcaatgataactcactaatttttacctttgtggtgttttactgtatctccctgcagaattgaggagactgacatttattacaatgctgtactgcaccatttaggcatgacataaaatttaatccttatgataatttgtagcattagt

SEQ ID NO: 50653 - DNA, 774 bp, Homo sapiens
tgggctcggggccacaccagcaaggcgcttgccgtcatccctctctctctcatcaaggcaggagcaaggaaaggagaccctcagagaagacgaggccaaaggctgatctgggaaggctagggtagcccccaactgcctaggcggcagcacagccgctggggacgcagctcccacccggcctcccctccgcagagctgggaccgtccccccaccccccatccttgctctgtgggcgccgcctgcactctctgaagcgcgaggctctgcacggtgtggggctggggcctttcgctccccttggctggctctctcctcctttgtcatttgcctttgtttgctgtgtgtgtctggttcaaagggcacgcctaccgagctggatagagtaaaggaagaatcagaaagagaaagcgctcagcgcgtgttgcttagcagcacagactcaaaacaggacaaagcaattagagaaaattatcacgggcggaaggggcggatcggtcccctgagattttcagatcatccagacagattacccattggaaatggcctagagacacacagaaaggggagggaataaaacggctgctggaaacacagccctggattctggggctgtatgaaaaaagaacatagatttatctcccggtgaaactcagattttccgcccagaacgctcacatttcttctgcgctggaagtgccagctggtattgatgatgttgtctgtttggttatacttcaatccaaaaactggcggggacattaggcactaatggat

SEQ ID NO: 50654 - DNA, 710 bp, Homo sapiens
tttcttggatcacacagctctttgagactcctgtggaaagcatgcgctcttctcctactgcatacaattgcagggagttaatccaaaacctccccagtgaagagctcctgttctacacacattttttcaggtaatctcatccccttccacgacttccactctcactccactgattactttaaatatgtcgctctagcttacatcttactcctgaactccaaacctatatttccagcttttgaatttctccttggctagaacgcagaaacataaaattcaatgtgtctaaaaaatgaactcctcagtgccaccccaatcctgttcctccatctacattcctgtgtgagtcaatggaacacatccagctgcagttcggaagccagactgccaatcttgatgtgactcattcgccaccagctccatgcaatcattaagtcctgtcacttccatatttttaataactaaaaaaactggtcttctttcctctgtccttgctatcaccattattacctagggaacaactgcctcatctctagagtgatctaagagttcccacctggtttccttgcctttgaacttgccacgcagcaggcagggtgacgtcaaacacaagccttctcacggtagccgcctgttcagtcctctaattgcttccattattccgggaaaatgtcctcactccttaatgtgacaaggaaggttcccctacc

SEQ ID NO: 50655 - DNA, 820 bp, Homo sapiens
attttgatttagtgtgaattagacaagtgagtgaccttttaccctttccttcttgtagtgtgagtgttgttttgtctcaaaaaataaaaataaaaaataagttagacagaaagtaagcccaccctgctaggaactatgttaaaaaatatacatatacaaaaaaataagaaaaaagtcatcaaaacatccaaaatttactctattaaagtgcacgttacagaaccttaaaaaaggttgtgcaggggattacagagttaagctaacccctcacaggtgagaactctctgtgaatgtaaattagaattgccctcttttggtgttggatggccaacagaaataactacagacagggaacaattggccatgtatttcaggtggtgacaggggtcagagccagtgtacccagaccaaattcctttagagtgactcatagttaaacataatatagacaaaaccagcatagatccagccctgtttaacagcttattgcaaaaaaaaaaaaagaaaaaaaaaagtaacagtaagagcagcttcgccagcagacagaattaaaagaagaaatcccagaaacaacaagagaaaccagttttgcaggagccgccagaggtaacagaaattctccctccatatgtcccagcctacccccgctttacagaggccagcagccccccaggaaccaggttcaggagctaacatgctccaggtctcacctcaaaggggaggatcagagccgcgagaggccagggaaggaagtcaagatagtcaagcaggcagtctcaaatctggccgtgctcgagctatgcaaatgcccctgacggag

SEQ ID NO: 50656 - DNA, 2075 bp, Homo sapiens
aaatttatacaattgtggttaacttttctcatagagaaacaataagaatatgaatagtacggataaggctagttttataaacatttactaagcatcattttgaagtggcacattaaaaattctaagtcctttcgaaaattactcaaattaaaatacacaaagtgggaacataatttcttagaagacagtgctttccttttcaaacaaaattcatagtatttgcaaaatcaaaattcggagagaaagttttagaacaaatacatattacaatttaggtaagccaacaatggcggtctggctggacgacaagaacctacaataatgaaattctatgtaattctcactcctaaacttccagatacaaacgactgattttaacacaaagcaaaatacaggttgccacttgcaaaacataaattcacggccatggccacaaagaagttaaaatcctacccaaaattatattccgggtttccaacgatcttaatcaatttggaacttaatctctgtatctgaagatttgctgtataaacaaccctgggcagcgcgaacgacagggcccaggaaaaaacaggcttcaactgggccaggctggaactctgcagccaaggaggctcagcctcagcggcccgtcctggcgtagctcaaggtgtctctagacaattacctaagtccctgaactactcgcacccccagcgatccagggccgtggcccagtcctggagaaggtatactttttacccctccccctccactctcctgcccgcccctgacgtttcttccccctgcgagaaaggctccagaatttcgcttaataaacctggttgaggcctggaagaaaagcaatctggcaaccgggggccgaagaacaggagaggaccaagcggcgagacaccagcacgcaccaggcaagctggagaaactgcaagagtcgcctgacctggtctgcagcctgagaccaaacaacgcgagggcggccttacctcgcgaatcctcgggaccccacaacgcacccaaagccggcagggagggtggtccggggcgccggggacacagccgggctggggcgccgcgtcagagccaagtaggcgtctcctgtcaggtccagaggtctgagcagtggagggagactccgggagccgaaagtgaagcgggtcccgcaccaaggagacgttgagggccgcacaggtagaaggaagccagggcggccgcagtagaatgacagaggcgccggtcacgtgatcggaggcacgtgactgctgcggaaggcggaagccgggagactccaaagcagcaagaggaggggcgggcgctgcggcggggcttgttcggtgcggacaactggattcccgagtccgtaacttgggccccggagcgacgcaagggtcgggccccagccagccagggcaggtgggaggcggcgagcgtggcgggcacgctaagacccgccgcccccagacctagtgcctcgcctaggggaggccgaggacctccgcccggaagcagctagcagaggccaaaacgctcttattgtaaccgtcattcttttgaaaagtttgatttcgcgctttcaaattaatttccatttggatttaacagctccatgaagcaggcgttcttattctgattttaaatagaaaactcgggctgagaagtgggtctgaaaagctctcttaacctagggttgcacatttagcaaataataaattccattgcagtatttacttttatactaaaaagttattcgttgtttatctaaaattcacatttacaggacgtctggtattttatccaacagtcccatctggagcccaaattttcccctagtccaggcctcagcaactgtctttgccttaaagtaagaatgtactgccctggaggtgaagtatatatgatagcatgttttccttaaaaagcaatgaaaggggccgggcgcggtggctcactcctgtaatcccagcactttgggaggccgaggccagtggatcacctgaggtctggagttcgagaccagctgaccaacatggtgaaaccccatctctactaaaaatacaaaaaattagctgggtgtggtg

SEQ ID NO: 50657 - DNA, 1297 bp, Homo sapiens
aaataagaaggatataaaattatcattaaaataatactctgtaggcttcaggtcttaaaatgaagaacacttccatttcaataataaaatgcaaataaatcaatttagaaatggtcaaaacatctgaacacacatctctccaaagatgtacaaatagctagtaaatgcatgaaaagatgttccacatcagtagtcattagcaagatgcaaatcaaaaccacaatgaaataccacttctcacccacttatgaagctagaataaaaaagacaacagtaactgttggcaaggacatggagaaattggatccctcaaatattaccatgtgaaatggtgcaattgccttgtaaaacagtttgggagttcctcaaaatgttaaaactcaagttaccatatgactcagcagttctactccgaggtttctacttgagagaaacacaaatatatgttcgcacgtacttgcacaggaatgtgcatagcagcatgattcatgcagccaaaatgtggaaacaacccgaatgtctatctgctgatgaatggacaaacgaaatgtgatgtgtctatccaaacaatgagatattattcaactggaaaaagaaatgaagtgccgatacatgctacggcatgggctaagtgcaaaaacattacgccaagtgaaaggagacagccagcaaagatcacatacggtatgctccacaacaggcaaatctatagagacaggaagcggattcgtgcttgcctagggccggtagagtggggagatacaggtgataagcagtgactgcttactggtggggtttcttttgggggtgatgacaatgttctggaattagatagtagggatggttgcacaactttgtgagtatactaaaaaccactgaattgtacactttaaacagataaacttgacggcatatgaatgatagctcaataaagtgattaagaaagtggccgggcacggtggctcatgcctgtaatcccagcactttgggaggtccaggtgggtggatcacttgaggttaggagtttgaaaccagcctggccaacatggtgaaaccaaatacaaaaagtagccgggcgtgttggcacatgcctgtagtcccagctactcaggagactgaggcacaagaatcgcttggttgcagtgagctgagattgcgccacagcactgcagcctgggcagcagagcaagacttggtctccaaaaaaaaaaaaatagcattcatattacaacaataaccagttacaagatgagataaaagtacaaattccatttacgataacaacaaaaatacttgg

SEQ ID NO: 50658 - DNA, 620 bp, Homo sapiens
actggttaagttgggaaattttaggttacatataaattctaccacaactactttttttaaaacttaaaaagagaactcagcaagaaaaaaagctaatatgatttttaaaaacttaatctatacaagattataaatttctgaagttctaaactgaagagaattaccagaatcaaaggtctcaaaaacagaaaggttatttctctgaatgaagatgacaaagcattattaaagttaaatgttattcttaagttgtggcaagaacctaaatactaataatgttgcagttagaataaggtatactgaaattccgtaagagatgataaaataccagtttatcaccacttcaaagatcaaaggttcatgacaccggtaaactattaacatgccttccaactcaaaggcccaaaggaagacaaagcagcaccatcctcagaacagcagcgttctactcacttaaggccttcagatgaaaatggtttgaaaactcctgctatactttatatatacttaattctgatatccagggccccaaaagtggacatgaatcttttgctctctgggaaaaattttaatctcctcttgggtacgtagtaatcaagagttacacttatttcttttac

SEQ ID NO: 50659 - DNA, 3573 bp, Homo sapiens
tgggtaacagagtgacactgtctcaaaaaaaaaaaaaaaaagttaactttttcataatataaaacattaaaaaagctgagagaaaaatctgaaaactaccgaaaaaaagagaaacacatataccataattctacaacccctaaaacacattttgttgaattactgaacacttaaaaagccatctgtaggctgatgatgcagttggggaaaagaggagtgtcattctgaccatttctctttctctgtatttcatcagcctgtttgaatttccagaggacaggcagggaaaatgctggggaaaacaaaagtacaagagccagtcagttttacctttctttttgggaggcaagttttcatactggaaaagttttgaactacctgaaaacttagatttgagaagaaaacttagatttgaggattatttgtggagtttattctcattctcttccagactcattacaaaagatctgaaaatttgttgacgatttgagaactgcagataaatatgaatttatcttctccacacctgcccactaaaaaattacttagaaacattattacaaggaaagaaacaaaatcaagcaaacatctaatgcattagatgattaaaggatacatattacagcctaagttggagagaacattacccaacaaatggctttttttccctgggagcttctactgtgcaagtctggggatctccagaccagagaaaaatcttccagtttaaacaaaataacgaaaatgttccaataaccagataacctatcaaataaccagaatttgaagtgggaaatgaagggccatatcaatggggaggaaaaatggcactggtaatatctagaacagaaaataaacaggaaatactttaaaaggccaaaatttgcaaatacagattaacagggtatgaaatgaaatacgaggcaatgcacctgttaaaggaaaaaggggaacagaggatgtttgaagtcttacgtatttagtgttaacactaattcctgatctagctgtcatgtggaaagcatgctgtccagaagaaaacctgggtcctggcttattccaaactacacagtacttaatttaagtagtagtacttaatctctctcagtgtcttaatctgtaaaatggataccctttatgtactcacagctctgtgtgagtcacaaaagaattttgagcagatgctttttaactccaaagtgctgtacaaatcagagcatcccttttctcttcacattagtttgacatggaatttacttcatagatggaagaaaaattatttcaggtacactgatgatgaaaatgtgccgaacgtggttaaacaaatttaggtgaggacaattatataagtttacctgagaggccaggcgcagtggcctcacgcctgtaatcccagcactttgggaggctgaggtgggcggatcacctgaggtcaggagttcgagaccagcctggttaagatggtgaaaccccgtttctactaaaaatacaaaaaaatagccaggcgtggtggcgcacgtctgtaatcccagctactcgggaggctgaggcaggagaatcacttgaacccgagaggcggaggttgcagtgagccgagatcaagccattgcactccagcttgtgcaacaagagttaaactccgtctcgaaaaaatatgtttagctaagaacagatgagtctgaagcaagggactgaaagtgccacacaaatgggcaagctgtagaaactggtcgtatgaggatttcttacaaaccacaaaagcatatgcttacatgaatattcatcaataacaaaaaaaatgccaccagtattaactgtaaaccacttagaaaatacccaacaatataatttgtccaaatccctctaccagcattccggtgagtgtgcgtgctgtagtcctaactcttctgtacattacgacaggacaaaacccgctttttataaaacgtttagcaactcgccaagaaactggcacactttacctttttaatcgctaagcaaacatgtagcacagttgagataaccaggcggacgttcagccctcttcaaaaataagacacagaagttttacattttaccagcccgatgtctaataccgatcacaagcctctatttgatgctctttctagatgttggccacggatcacggaagactccattctttcaagttctgaggactttctacgcttcaattcctaagctaaattgccaaggttttactagcacgaaagtttaaagtcaacggagagcgtgccctaatccctaaatcgattaggtttattacacggcaccagcgagcagggactggaaatacaagagcgagcgggtcctaacgcaggttgccgcgggacccgacgccccgggcccggacaccctccccggggacgcgggcgcggcgggcccggctcccagacgggaggctgcagggggaggggagggagaaggagggagggggcggccccctcgggccggaccgcggcccggcctccctcccggcccgcgccgctcgccgcgctcaccgcgttcttcttctgcaccatcttgtccatcttcttggcaaagcggaccacttcgtcctccatggctccggcaggtcttctccgcgcccaccccgctggcaaggggaagtgggcgaagctggagcggaagacacagcaggagcgacccccggcgcgcagcaacccccaccaccgcaggcccgggcctaggcccccttccttacgaacgaagcccgcggcggcggcggcggcggcggcggctccggctcctcctccccaggcagcgacaatcgaacaccgcgcgcgacgtgcaggcgctaccaactgactgcagatcgctggtgaggggcgagcccatgttcccgccaggcgggcgtcgggctagtgggcaggcgtggcttccggctagagggtcgtggaaggcgcccggttttgctgcgcgttcacctccggtcccgccccctcacggggcgggttttcggccccctattgcatcgggacatcccggagttttagaactcgcggaggcccaagtatctcgaaacgggggcagattccgagcatggaactttggcaggttttaaagtctgtgggaagccaagcactttctccataggagactgctacggggaaaaatggaacccgtgtcctctaagttaggttacggagttactcgttttaagagttcctttttttttgagacggagcctcgttctgtcgcctggctggagtacagtggcgcgatctccactcactgcaagctcccccccccgggttcaagcgattctcctgctttagtttcccgagtagctgggactacaggcgcccgccaccacgccctgctaattttttgtatttttagtagagacagggtttcaccatgttggccaggatggttttgatctcttgacctagtgatccgcccgcctcggcctcccaaagtgctgcgattacagacctgagccactgcacccggctaagcgttcctttttttaaaaaaaatcggccgggcgcggtggctcatgcctgtaatcccagcactttgggaggccgaggcgggcggatcaactgaggt

SEQ ID NO: 50660 - DNA, 2105 bp, Homo sapiens
atgctgcatgccttatgttgccactagttctcttatcaaaatcaactagttcttctcttcaatctgctctgaaattttaactgctctggaaagctctcaattgcacaccgtccctactaacattccacggatctctggtatccaatacccaaagcaactaatgaggaatttgaaattttaatatgttccagaaaccagagttaaaaaatcaataaactcacgatgataaggggaaaattctgagggttttcaaaacataaaatcaccgcactgtaagatacattaactggcaatcttaaaataccattttagcgcccttaaacattaaacctttgaacgcgtaaacaaaagttgcatgacccagtttcattactgttactattaataataatggtacctacccagtatctcccaatccatgcaggaaaatcacctataagagaagaggaaaattaataagcaatgcctaaataagcccacacaggattgttacacactagctttgcttaaggtggaaaacggaacgaaacctacgagagaattacacaacactatcttcggcgacttaatctttatcgacctcttttaaatggcaaaaattctgatcaacttctccctttatttcctgagataatgaatggggggggggtagcactgagaggtcccagttagacattgagtgcaaatgatcacattctaagaaaaacagtttatctctttcaagtgaaatcaggaacatctcacatatcctgtagaatttttccactgcaaaagcaagcttccggaggcaaaaataagtttgacttttcatacacgagttttctaaaaaacagtacgtctgaccttgtaggacactcaatcttcaaacttctttcattgaggataagagtgcgaggtgacaataaggcgatttcctggcggacttaggtttccctcacccacacaccaggcagaaacacgctgcagaggctgacgccgtgccctaggccggcccgcgggggtcccggggccacacttcctccgcaatgcagggaggagctggggactggccctcgcgccggctgtgaccccccggctgcccccgccccccgcggacccggccgcgcggaccattcgcaccccacccgggccgggaggagcgtcctcgtccgcaggccgccacgcgcccgcaacgcccaccccgcgcgaggggcaaccaccggtggccggcccagtggacccctccgagcccacgcctacgccactcaccgcagcggtggccttccgggcggcgggcacgatggcgggcagcggggttgacatgttattgccgcacatacaccgcctcagctcacagcgcaagcggaaggaagagcgggcgcccggccgcggcccaagggcgtgcgagcggcgagtcccggccggccccaccgggcgcacgctcaggcgcgtgcgcgccaacgcggccccgcgctaccttccgcgcgcgcccgcgcgtccagggtccgccctgccctgcccctcgcccgccgcccctccctcggcacctcacaatgtccgggcggctccctccctccgattggctgcggcggcagcgcggacctggctgcgctttcgccacaccacgcagcctgcgcatgctcagtgctggctagggaaaatgtgctctcaggtgcaggctgagggctggtctcttgggtcttggtttaggtttttgcttttctggcgctgtagtgaaaagaatgagccccagagccaattcacccaacccaaccccaggtgctccttggtttcctgcggccggggtctatccatttgtaaaagtctggatggactgggagacgttgatggagcttttgcagtatttccgtttggggctacagcagtatgtagatttgggttcaacttaccttctttaaactttagttggaaagggtaacatttgtcaccagaaatccactacttccctaacttgatcgacaacacttactgatgtacggatattgacacagtacaggtttaagtgagaggtaaagccagctggtcttctgggtcggttggggacttggagaacttttctgtcttacaagaggattgtaaaatgtaccaacagcactctgtagcta

SEQ ID NO: 50661 - DNA, 2426 bp, Homo sapiens
ttggaaactgttccctactagatttcaaacaacttgggaatgaaatcctatttgagttcatccatgtgtatttccaacaagttcagtgtcttacttataaatagtacttgaaggaatgaatacaactttttctttatgtagttattttacacttgatttaaaggaactttaaaaagacgcagttatacctagagacagacgccctccaaaaattgtctcaccttcattatttgtgattactagttagagctagcagaaaaaactccccagcaagtgaaatgtcaaaccactactaaaagaaagaaaaagaaaggaacagtcttttctatatttaagtcacttgagagaaaaaagaagagctggtatttttcgagtaataatgttcgtattttgtgatgcagatactcaattttacattctaaaaatactacttttatagtaggaagcagtgtacgtttgaatcctggctctgccgcttgttgcaagaagttggtcaagctatcggaccttgctaagccttccctgttgtaactgtaaaatgtagtaacaccatttacctctagaatggctgtaaatcgagtaaggcttatttaatacagcgtctggcatacaccaggcattcagtatggcgccagtcattaacaataggtggttactaactgcgattcactcaaaacaatacagatgcacacggatgagagttcacactttgagtcttattcaaagattggttattagccaggcattttgataggtgcactcagttttattttcgtacctcacggtgtataattacgcaagctcaaaagctaataattgacagctcactttgctttactctgggttctgcattgacctcagagaagacacggcctagacaaacaggcaaggcccaacactgactcaaaaaagatcctttatttaacgcagtgtttttagtgcatgctctcgtttggcgaaagagaaggttttacgttcagaatattaaaagggaccccgaggacaaagcaggatctcggaaaataagatcacatccccaaacaactaaaaggacaaccgagacaaggttgcagactcccacgcctctgcccgactcccgggcttgcgcgcgcggctgcagcgcgacaggggcggggccacggccacaaagcagcccccgagaccacgtggcctccgagcagctcagggcgcccttgaaagttcttggatctgcgggttatggccggtcccttgcagggcggtggggcccgggccctggacctactccggggcctgccgcgtgtgagcctggccaacttaaagccgaatcccggctccaagaaaccggtaaatgggtggtggcggtgcggggaagcgctggggacccgggcgatgaaagcggcccttctctccctgtcattaggagaactgccctttctaggagagtgttgggatgaaaataggattgcctcatgcctgttctcccttactgcccagaggggaatctttccacgtgcacccagttcttttttttttttttttttttttttccgagacggaggcttgctctgtcgcccagaagcaattctcctgcctcagcctcccgattagctgggattacaggcgcccgccatcacgcccggctaatttttgtatttttagtagagacgtggtttcaccgtgttggccaggctggttttgaactcctgagctcgcgatccgcctgcctcggcctcccaaagtgctgggattacaggcgtgagccaccgcccccggccgcacccagttcttaataaggttatgtttacaagtgtaaagataccaggcggagaagccgactcgctgaaactacaaagtctttgtgtcattcaaaattggatttaaaatgaaatgttttcccggtgtatctttatgttcattggaaagatctgaattgcagctgtcccttctgcagttgactaaatagagctagaaaagctgttagttgacaatgtactgtcattttaacagtcagttcattgctttcgtgaaatgacaggaaattaaggaaaagattttcttcaacagatcagttttcaaataaaattacaggtttatgaataacatttgcatatttacaattaatttcagaataaattcttgcctatcatttaaaatgttgtgaatatttaattctaggatttttttcggtttcaacctattataaaaaccttatccccatcctaacctttactttttgcttttgaaacacacttggactttggttacaagaattagctatgtctttagaggcaaagatgctaacagagtgtgtggagctttgagcaactaggacatgcttgacacaatagtgttagctagcactggtgggctggatgaatgaacagcataacaaaaagtgaagagctgaaatgcagtttttagaaatgcatctgaaattcataaaa

SEQ ID NO: 50662 - DNA, 566 bp, Homo sapiens
ggtgctggcattaaaagcatgagccattgtgcctggtctacaaatttctttcttaaatatattttgaagatactttcttgatgattcaaggacatccactatttacttaccctctgttgtaggtgaagtaggtaggatggtttatccagagcatgacctggctttaggtggctctgctttataattcttggtctcgacccttagcagatagcttccagttctcatttctgtgagtggcctgcctggagtacctcctaatcaccatttctcatttgccctgtgtggagatactgctaggtgatgcaatatattagagctgtataaaacagctgtcagattcttgcattcagcaaacagccagaggctagtgtttgctagatactgttccagctgatggagagacgatagtgcaagagtcaaaagtcctttcctggccgggcgcagtggcctcacgcctgtaatcccagcactttgggaggccaagtgaagtggatcacctgagttcaggagttcaagaccagcctggccaacatggcaaaaccccatctctactaaaaatacaaaaa

SEQ ID NO: 50663 - DNA, 886 bp, Homo sapiens
cagggagatgtgacagagaattttaggccatagcccagtccagccagctgtagctcagtgttgctgatagcgagcctagttcctctctggagtcacattggtcagaataacctgacactgggaaaggagttattctaatgcatacttattgcttcctattaataccgtatgtagcatctctgcaattttattgcattaactggagaatgagaaagtgttagctgctgctggatattgtccggagttagagaagctgccattatattcccctcatgactcgccgctggcccctgctgtcgaagcttcgctgtggcttcactctcagggcgtgtatctgccatcactgcctgcatgctgatagcctgggacacactattgcacaccaagcgcctttgagcaggcacttgtctcacttttctcaaatgctgagttgaaggggtgtccacgcctttttcctcattgagccagtagtctcttggttacttgtatgcagtagttatcgagagtgaaatgctgacttctgctttgacagactagagtaagggacccacggaagtcatgagcaatgacccctgagaagccttccagctctggagcgctccaaatcatcctccttttccctcgagtggaaaagtaggttttgttatcacgaagtgaatgtagccggctcaaaataggcaagactgccacctactgaccaaatgggaacattcctcagggaatttctaggtttgatctttgccctacaattaattgggataattagttattcatgaatttataattcaacaaacctgaaatacacacaggacacaatgctggacactggagataataaacaaaaattttttttttgagacggagtctcgctctgtcgcccaggctg

SEQ ID NO: 50664 - DNA, 727 bp, Homo sapiens
atcagtcacagacattggcagctcaagagataacttttttttttcttttttttccctcgtgatgcaacagtattttcttttcttttaaaattgagacggggtcttgctatgttgcccaggctggtcttgaacttctgtgctcaagcaatcctgccttagctttctgagtagctgggattataggcatgtgccactgcacccagttatttattctcattttataggtaaacccaaagagagcagaactttgatccctgtagccagtgagttgccaaatccggatttcaaatagtcttagaaataccaaattacactgaaaataaatgcatggataaaggagtgatggtgtttaagggttaaaatattttctattactcaaaaaggattgtgaaataaaggcttttccagttgagcagagcaccagcctgggccagctgagccacactgccttctgtggcttctgattactcatgcagcaggaactgggagagggtgtcctggtctttgttcccactccctattctgacagctcctccatggggagaatcttttccatctctaaatgaactcttgcagggcgaggactgtgtattgggtgtcaaggtcagaagcagaatccagtgttccaaatcataacacaaagaaaaccaacaaggctgtttttagttcctaagtacactacatgataactgagatacatttaaatcattggaagtggagaaaattg

SEQ ID NO: 50665 - DNA, 466 bp, Homo sapiens
gctcagagatggagtctggtgaccccagccatcagtagacccctcctctgaacctaactgatagcatgccacccttgctcactgccattgtttgtttcacactatggacctagagagatgagttgcctcatcacctactctatgcagaaactgccatgtcctcccctctgcacaggcaaatatttaccagctctgtggacagccacgtgtatcatatcaaggacctgaggccaagtcaactcagggtcagatgcaaaagggcagacaaaagcagagagagacagagtactaactcgtttttcgactccaattttattcaaataggcattgaaatgttgtcagttaatcctctggaaaaaccagccttgacaatgagcttggtctcagatacaagcttgtagcctctttgagtttcctcattgtcaacatcaagacctaggaatgagaaaagaaggaaaaagaagaa

SEQ ID NO: 50666 - DNA, 598 bp, Homo sapiens
acttagtgtaatgccctcaaggtacagcttggtgaattttataaacttgaaccacctatgtaaccagtgctctgacagagaaacacggcattgctagccacacagacctccctgtgcccacctctggtgagtcccctctacccttgcaggaccccgagggcaaccttgtcctttgtctatgcagagaaggaggcagaagggggaagactaaggtttctgcctcttacctccccagtagggaagctgcacattttatctgtttcacacattaggctttagtgtctctgccaaagaaaatttggaaactttgacttgggcaatgtttatatttcactcccagattgtacagataaatgccttgttttatttagtctgcctttgttcaactaactcccatttttgcaactctgtttaggcagcctcttctgggggaagccttcaaccctgtgcatcccacaatctggagacactgttggctgactgtgacttaccaccagacaaatgcccaccagaggacagtctccttggcatctgtgtaacctcaaagcccagcacggtgtccaacactcagtggtttctacaatgcatgtttaactga

SEQ ID NO: 50667 - DNA, 574 bp, Homo sapiens
ttctaaaaatagaactcagtaaaacgaaataacaaaagataataaaaaggaagagaaaaggcatttttagatatttaaaatatctaaaaatcagatttttgtttaagtgaatgaagaactgaagatgccatcctagaattgtttttggggccaagttaaaaaaaaagtcaaccttattaatggtatgtagacaaagaggcagaagaatgtggaagcctctatctctgtttcctcctgactttgttcatagctgacattccttctgccccacacagagggctggccccagcacagctgccctggtcttggctgtgattgatacggatgctccaaagtcaacaggtgtgttctgatgtcagagttttttgtgtttcctttggatgcattccaagcctggatagagacgtgtctgcctgaaatggcttatctcttctacaagactgggtggctggaagatgcctgagaccatggtgccagagaattctccgttagagtatgtccttacaactcagtaagcttccagggctaagttccgtgttgtgtgatacacacggagtctatgatcacagggaaa

SEQ ID NO: 50668 - DNA, 2618 bp, Homo sapiens
tctacccttattatcgtaacccagctactcatcccaataatgctgcacatctatactggtatatctgtaaccgtgcagcactcttaccttcttgaaccaacaaaatcagcctatctccgacctcaaagtagggcagcagtaaggaggtgggaataaacatttgaaaatgaatatttccactaactagtaaatgtggccaaaatactattgaaaataccattcaaaatgcatgaattttagctcagtttttatatagttctgaagaagtaccaatactattttggcatttcgtagcaccaaccacgtccgaagcgctccaactttcaagtctgagcttgtctctgaagaagttgcccgtgcagcctccatgaataccacacaccaaatactaactgctttttaacagatccagcaacgctgctgtttccattttctccatcctatttatgcccacatgaacttttttcttattagataattagtaacttgaaggcagagacctgttttacaggctgcaaaccccagggaccgagacagcacttaacgcctacaaggtccaaaccgacgccaacgattaagcgcacaaaggaaaggtgtaatatacatcatttcgtttagtcctccctgcagcctcatgtagtagttactattaatcaaccccatttcacaggtgatcaaaggtaagctcagaaaggtgaagttgcctgcccaggtcacaaggtaggaccaggattccaagcctgatcggtctggatacgaacgctctacccacgcggctttccccctacactctcgggatcaccacacacttccccttggcttttacaccggaggctcgacctgggtcccggaaccagcgaagccactgggcaagcctagaggcctctacagaggctagagacgcctcgccccaccagatgcattaggatgaaacgcgccgaaccgaaggtttagagcgccaggggagaagaggggcggggagagcaggctctttgacccagaggagggaggatctccacacccggccactctggcgctggggcgcaacactgaggccggcgggaagccgagcctgcccgcgaagagactggggattccgaggcggctcctgggagaccggacgcgcgcggcctccgccgctcccagtcccgccagacccgatgccgggctggagaagcgcgggggccgacgcacctcggataggcgggggcaggggcaggggcagctctcctttaccctagagcggcgacagaagctcttcgggggatcagtggccaagggggcggacagatttgcacggcggattcctccgaagcaacccgtgtgaaagaagccaagcggcggctgcagcccgggccgcgatgggggtgacaccgcccgtggtcccgccccttcccgtggcccctcggagccacttccggcggcagcgtccgggctagttcccggcgcgagcggccgcgggccagtttctatctcctcatccagggcttgcgggcgaggcctgttttaagtctccagtaaccgagcggaggcccggcaggcgcgacccgggctgcgtacgtcagagctgcctccgaagtggtaaaatgtgctgcgagaagtggagccgcgtggcggaaatgtttctcttcattgaggagcgggaggattgtaagatactgtgcctttgctccagggcatttgtggagtaagtagaaaagagaatctcttcatgttctagcacagtcattacccagaaatgtaggtattgcaaacgtggttgtaattgatccctgaaagcagccagaacatctgacccttgggcacggtgatgtttaagaaaaacaaaaccctcagacatgacggagtggtcgcccactgccattatttttatgtgaaggactacatctacttggtaggctgctatgaaaaaatgtcgtaggtgctatatgtcatctcatatttgtaaatcgaggggacatttaaaaattgggggaaagcgacatgtaaaatgaaatctctagtagatatgatgtcataaagtgaaagtttaaagttgagtgacttgctttggttaacgtctttttttaaacctaaaaatctacttaagcccaaatgcacataattaaaacttcaaactagttgagataaaagacttaaccatatttacatcagtttttgtgatatctttattttggggaaatctttgaatcaggtaaaaattgccccacatgaaaaatagctagtatgcaggaataataccgccaagagacttgaattctaggaattgtttcctttatattaaatgcgtgagttaaaccacttgaacctttttttcatctctataacgggtatatttaatctcacatgcttattttgttagagttaaatccttgtggaagtgaattttatgtgatagacttttaatatagtttaatatagtaggatttaagtttgaaggaattcatttttctcgtgtaattttgtggagtaatttgaaaacgcaaaaagaagttaaacttgttaaatttaatgtaaaaagtattgtcgcctttttagtcaggcatgcatgtagtcatacaatcattcagaaaatgttttttgtgctcttgtatatcaagtatgctggtaggcactga

SEQ ID NO: 50669 - DNA, 1731 bp, Homo sapiens
tgcgggccctgtacagaaaggtacacgagataggcatcctcacatccattgtcctgggaggaaactgaggctttgagaaacggagaacttgccgggccatttgactctacgtcatcccctcccccatcaatgccctgaacagcctcctgtacacccttaaggaacttactttgtaatgattattaagaactcagcgagaccccgagcatcacctcggcatatcgcatcctttctctagagaacccctaatgttggaagggatcagagcgcacctcctccgctcctgggagcacccccttcctaataataccttggggatgggtcggaaggaaaggaaaggagacgcgagaggtgtagtcgatgtgcctgcgaagcccaggctcctctggagatccttccgtccgtccctacaggagaaggctggcccgggctgctccactccccggagctgcagactgagtcgccaggtttctgtgccttcaaagccctgcgcgacggccacaccaaacacccaaaccttgggcagggaccaaacggtcacttccccgccctccgggctcaatatgcaaatccgagcaccaggaagtagctgggacctctcggccgagcccagagacagccagttcctctcccgccgcgccgggccgcgctgccgctcgctccccggccgtggcgcctccgggccagacgcgctgcagcctccagcccgcggcaagcggggcggccgcgccacccccggccccgcgccagcagcccctcgccgcgcgtccagcgttcccggccagcagcctccccatacgcaggtcctgctgggccgccccgtcgcgccccccactctgaactcaagtcaccgtggagctccgccgccccgaaactttcaccgcgagcgggtgagtcctctgcgcgagcccaggggtgggcgcgggcacgcgggcagtgggtgcaggggccgcggctgtgccaccagccggagtcccgggcgcagggtagactcggggccgggggcatcggcgcggcccgcggcggcttcctggccgcaccgcctctgggctccggcggcgaaggctcttagatgtcttcagccgacgggtgaccgggcccgggggagccagggcgcggggactgaggctccgcaggtgtccgccgcggagccgcgcaggggagcggtgggaggtgcgggcgcgggggcgggctcaccgcgtgtccttcccggtgagggcccgagggccggctgctgtccctgctccggccgcttctcgcacacagtggggaagccgctgcccttgcggagcgggcgcgcggcggggatactggagaggactcctcggattgtgcaatctgatctcccctctggaccctgggtctcctggcagtgggagatggggctcggccggcgccctctcgaggcccgcggacagttgccctccctggtggccccgggcaggagcgtgacgtcgaggggctgcagcggaggctggaactcaccctcccgctgcggcgcctctcggcctgccgaggagcagtccggtgcttttgccggctgagaggaagcgagagttattttaagaattcaggggttgcctttccttcgccttgggggaagggcgtaagagtcagttcccactttcctgcattctctgggcccatggtggcatcttttgcttgcggtgcattcgtaactttccaacagcctgcctgtcatgtggattagcggttgtgtttttgtatatc

SEQ ID NO: 50670 - DNA, 839 bp, Homo sapiens
ctcccctgaaaggcatctgccattctacttctagtttttgtttagtttccagtgtaggcttctaaacaataaagtgtagggaattgaaaagcagtacaaagccatttggtttggcaaataaacagattttcaagctgtgggtttggctaccaccggcatctctctgtgtgtggaatttacttgcaattcaactggagagcaagacctcgtcctgttttaccctggcgattcagttgctaaaattctcacacatgagtttgatctgagccttatttaaatacctttttattcatccattaattagtaaaattagctggcataagctatatatagctggtttttctgcacagccaagtcaatttataaatgcaaatatgtgggtgtgataagggtggtttccactgacccacatgtaatcaaacatcctgttatatgacacagtgccagtctgtgcataggcatttgaaagtactaactgggtttgtgaattcagtgatgctgttcttcaataaaataaagactcatttttctgatgttaaggaacacagcacctttgttactgactgttatttcaacttctgtttcatgtagttttgatatttatttttgttgggggtgacagagagaggcataattgacctgtggcatttgttaatccatgaagtcatgcttcacttatgcatcattcagaaaacacttcttggatactcactactcatgaatatgcatgcatatgacttgcagtcaaagccatgagttctcaatagcaaaactgttccagatatactcagagagttaaaatgtttaaaaaacttttttttaaagaaaattttcctttt

SEQ ID NO: 50671 - DNA, 823 bp, Homo sapiens
atgagccacccctaatggatattcattccaatgaaagaaagactttatagaaagagaaatctccagcctcacattttctggatgggtcagtgggtgttgctttgtaatcaaaaggctgcctggccgtttgtgtctctttagaccatattgtaaaacttttgcaatgaacagactagagttgtatttgcatgtcaaagcctcagttactatcttgttttaaccaaattctctacgcataaaatatgtctttatttactgttcaaaaaatggttttgaaggcactgctgactacatcatccacagcacttgatataaagtgcattataagcaaacttggaattcctgttggggacacacattcccatcaggaacctggtctgcttcctctctcctgctgtgactcatgacgtccctggcccttcttgccagaaaacctagggcaaatgtgcaggtcagttacagcagacctgttccctacaatgttaccacattcgcatttttctcattgccttggctctggttttctggttttattttattaacttcattattgactcttttgtggtaaaacattttaaagctttttttctctgagaaagaggtagcctataaaaataatctctttgtttggcattgttaataaatagatgaaacatgcatttcaaaatacccattgtatggcaaagtggtaagagcccaggctgtagacttagcttatgacttagacttgagagcgcactcctgtgtgagtgagtcttagcctcacccctcccagctatgctgtgcgcgagtcttttaacctttctgagcctcagttttctcc

SEQ ID NO: 50672 - DNA, 1567 bp, Homo sapiens
atgagccagttagcctggccttattccatggccataaccaacactctcagccctggccagatatgacaaaatgcacgctatggattgattaaaaggggaatttgatgagaaggtgaggtagggttgatgcaaattcaacaacattctagaaaaagccattttaaggaaaaatctagagcaatagtatatgtgtggcatacatgtgtttcggtcttataaaaagcatattaaaatgtttgtaagttaagggctttttgaaatttgaaaaatcagcttgctgcttttaaaatgatgtaattagtttctagtcttctagttatttcctctaaatcacataaaatagatcatatatccaaattatgcaaatctgaatgactaaaaaatcaacataaaacttcctgacataaacatttgaaggatagtatgcagccatgggtttttctggtactacaatgtagtaattttccctgtctcactgaaatggagattttatgggctttcatcagaaatttaaatttcagtacaaactgttttggtcccattctgtgaagccactttaatcaaagagagacagaaaagttacatgacttgtggtataggcctctgacagcatctatcttacaagaggcccagaggcctcacacagcctcatgtggcactgtgaagaaaagaatttgattttaaaggtaattgaggtggtcttctgtgccaccaaatccttcccaataactcacccccccactgaaataacaggggatgccatctgtccctgtgatggagtcagggtcagcccaagaaaacctggatgggatgggacttgctctcagcctccagggacagagccctgaccatgcaattttatacaattggggaagcctcagatgggcagtcccaggctgggacggcaactccacgaaatcaccagggtcccacctcttccgtctccatcctgctgccgctggtgtttgctttctatgtgaagactccagccttcacttgtttctagggagagagaaagaggcaagggaaaaggggagctgacagcaaagccctgcacaaccgatctgcggaccaaaactccctctgccctctgcccggggctagagagtttggaagcacactcattgagctgggcaaactgccaccccaaataatattagggctctgtcaccaaagaagaggaggagctaggatgaggtgagcacctggcacctgcccagaacctcgctcccttcctgccacccacagcaagtgataaagagccctgtcactggccaagcagggcaggatgcacctctacaggtttttccctctgtgctcctgttctttctgacttaataaatgagcccatcctaacatctgctactgttacaaaaatcatatatacaacacgaatgtgagtaagaaaagctaaacagaatttttttttctaacaaatattctctcgtaggttccagaatctcagcttttacctggacagaggtttcaaactaaaggtatgttttcatagcaacatagttaaaattttttttctttactattagagcttctataaagtgattgtcct

SEQ ID NO: 50673 - DNA, 2200 bp, Homo sapiens
acaagagcgagactccgtctcaaaagagaaaaaccaaaatgctacatgatgtttatccattcctccatcaatagatgtttgcattatttccacatcttggctattttgaataatcctgctgtgaacatgggtgtataatttcttaaatatagagttgtatttatagttttagttttaagtgatttgcaagaacaaatactggacacagtgtatacagcaaggtactctctgtgggccgtgcagaccctgagcccactaggcaggaagcacatgtccttcttccagttgccccctcttagtgcttcctctcatcctttgtgccccatgaggtttgttaaaacgcttctgctgatggattcttacaggtgttctcttgtgttcatctttagatccagaggaacaaggagacattgtggtagccttgtacccctatgatggcatccacccggacgacttgtctttcaagaaaggagagaagatgaaagtcctggaggagtaagtgctctcaagcacgccacggctgctcgtttcctcaggccactgagtcctgcaggctgtccccttgtcttgcttctggtgctacagccatagcccggcccctttcttgtaatgggtatgaggcctccttgctacccacagggagtgggcagtggaaggaatagagccaaagggattttccttttaagtcggtctgtgagcacacttcagggggtttccctttgaagacagacagtggtttttctttaaaacaatttttttttttgagatgggatctctctctgtcatccaggctagaatgcagtggcatgatcatagctcactgcagccttgaactcctaggctaaagcaatcctctcacctcagcctcctgagaagctaggactacaggcatgtgccaccaggcctggctaatttttaaaatttttgtagagatgggatcttgttatgttgcccaggctggtcttgaactcctgctgtcaagcaattctcctgccttggcctcccaaagtgctgggattacaggtgtgagccaccacacccagcctggtttctttctttatccactcttgccaccttaagaaatttgggtctgtgtggcccatgcatgatacttgaaatgtcacttttcttttgttatattactcatgtttagactgggttcatgggcccagcctagcttgagttctaagggtactgagctacagcagctgtgttgggaaattctcaactcagcagctgccatgcttttgtgaggacgcctgagtgtcgtcatctcctcaaccccctcttgctgactcagacatgtggcagtgtcagaccataggcatgcaggacagtgctcagaataagaaactccagttgctttaattctagcttgcttttcttactaatcttgcattaaatgtcactgtgacctgccaaatagggtttgagggggagactcccttattaaggacaaggtgttccgtggttgagagcaatgttgcatatgggttgaacagggacttaagcctgatcctggccctgccacttgatagctgtatgaccttgacaagacccttaaactttataccttggtttctttacttataaaatgggaatgacagtacctagatcatggggttgatgtgagcatgatgcatgtgtttaaacatgacataagcaaagaggatgcagagcttagtattagttctagttgccttcatgccttacagacaaggatcctgtctgtgtgtggaatttatagaggaatgcagttaaggctcaaagggacccattccttcccccattaccagcttacctgcttgcttcttccagtgctcatccctgcctcctccctggctccatgcctgcctttctgctgaggactcgagcatggtgctgaagctcacttgcttggaattgtcttatggttttcttcttttcatagtgtccatctctatgataactagatgtttgaacaaaggagtttataatgcatgaactgtggaccagtattcccttgactctcatttctataaggatttgaaagcatttcttagctatcctggggcaagttacaaaccttttgtttctgtgagatgggagccatttgtaccaactcttctttgtgcacccctgatcgcagtgatgcgtgctttagttgtaaggctgttttcctttgcttctgtctctaaacatattttaattccatcacgga

SEQ ID NO: 50674 - DNA, 2183 bp, Homo sapiens
aaagtatagatttcactatttcttagcagttatacttggaaaaggagattattatgataaccaaataaagctaaaataaaatttccaagaaattttgatcccaaaaaagtagagtacaaacaagaatgcatgagctctctgttccatccctttcctccatccaaattatggattggagattagaggaatctagtgttggggaatcaatgaatattaacaagtagaaaagtgtttctgtgacaactgttgagaggtataaaacaaatgctgtcatatttgcagtacagacaagttgagttcttaaactttttgcaaactccctggtgtgtgtgtgtgtgtgtgtgtgtgtgtgtgtgtgtgtttacatcctatttttttgttgttatcattaaatggtctttttaggtcagtttgggattgactccaggggcttcctgttataaaaaaatcctttagagagactgtaggttttactcaatttctacttatttttcagttccaacttattaatattgttattttataggcatcctagggcttttgaacatcattaattatgtgaattcttctttttctcaagcataggaagacaatacatccttagagagtaaggtaaacagtgtctactaaaacaggtaaagcaccaggaaaatcagatcttcatttttcctactttttgacaggtttctcatttaatttttctcactgcttgtctagatgacaaatgttttccaagcagccaattctaagacaggttgcgttttcagttccagtttctcatttaggctggaatttcctggggtagtttttagctttgcttgagagatcacattcagcccctcagtgaggttcctttgatcccttttttccctcagtcatctgacagaaatgggggttcttctcattaaagtgaaaaaaaaaaacccaaaaaacaaaaaactcaccgagcaagatagccttgcttgtctttgccaatttctcaaaaagcgatagtaattaggatgaacagaagagcactaaagcaagatttccagagtgaggtcatccacagaacacttcattatttgtccaaagcattgctcatgttctctggtggtagcagccgggtatgtgtgctgagcaaacagtccacagggcacatgcccagcaaggctggtgatggctcagagcctgcgcctcgggtgggagagagcttgctggaagccggtttcaccgtgtgggatgctggggttgacagacttctcactgggcctttgagaaaagcgggaaagatgaatgacctggatggtcatcactaggaagctactaagcaggggcattatttgagctctgcttggatttgtaaaacataattgagattgtgctctctatcaaacccgcataaaagaagtccatctgatatattacctagggccttggtggttaggaatttcccatctctggtgtggtcataggcaacccacttctcagtgggtgtgtttgatgacacaaaaccgcagtgcctcatgagggagagcccggttgcctttcctcgagaaggtccaggcaggtgcatttggatagggcttgctgagcctactcacatggacactccccattcaggaaatagcaacttggactttctactttaacattgttagaggagagggaatttaaatgagtgcattccactcaaatgtttctaaaactttggtctcatttaaccaaaccaaaaaccatctgagacaggtctccatcaatttagaggtttattttgccgaggttgaggaccatggctcatgacacagccaccagagatcctgggaacatgtgtccaaggtggctgggatacagcttgatcttacacattttagggagacagaagttataggcaaagacataaatcagtacacagaaggtgtacattggttcaacccaggaaggcgggatgtcttgaagctgggaggggaggcttccaggccataagtggattcaaaaatttcctgattggccaggcacagtgactcatgcctgtaatcccagtactttaggaggccgaagtgggtggatcacctgaggtcaggagtttgagaccagcctggccaacatggcaaaacactgtctctactaaaaatataaaaattagccaggcatggtggcggacacctgtagtcccagctactcaggagactgaggcaggagaa

SEQ ID NO: 50675 - DNA, 1946 bp, Homo sapiens
atagattttcaggtaccatgggttgaaaatgccaggtctgttttcactgtgctaggacaccacccttagagcttgcgcctgttaagcaccaaagcacaccaagaacacagcaacaataattcaacaatcatatctaaacattagctacttactaggaaccgcaatctaccaccgatttctatgtgcgtttgtagacagcatcagtgttaacaattttggcagccgaactccttaaagaacctgaatttatgcaacatccggaagcaactcctacttcctgcccctccgatttactttaccttggtaggcattcgaactggtcctttcactttgagattcttttcttttgcgcctcttatcaagtcagcacacactacaggaaataaaagacctctcagtataatcgaaacaattaaaatcggcttaaggccttcacttctgctggctcagaatagcgtataaaattatcaccgttactcaacacaataggtacctcctcatcgccagctgtatgacagtaaaagcaattttaagccacgctttacttttttaagtaacttgtcactttagttcttgcagtccaccttctacactaacattaacgagtaaagctcgtcgcttttcgcccaattccccctcccccccgcataacgaatgcactgacccttttccaaggattttacgttgcggcttgttagggtgattcgaattcggtgaattgccacctccggctccacgggtgtttttccggtatccttaaaagcctattattagatacatgaaaaagaacaataagccaaaaatggtctgccacttctggagaaaggcagcttccggaagcttcccgcgtttccccaccatttcaggagcgcctttccgcccctacacgccccggcatctgccctcaggagcacgaactcgaaaccggggtccccccggcgcccgagccctgcgttgcgccgcccgccgccgactgccgcctcaccatggctgttgcgcgcgggcttcctgaccgacttgttcctcggcgagagcgaacagcggtgagtcaggagcaggagcgtgcggaccaaaaatcctcagcccttacgaccgcgtcttcctcaaaaagaaaggggtgggacttgagcaacgcttatatagcacgcttgcatccgggtcccacacgccccggaacaggaaatatcccgggccctagaggcggtcgcacaagggcgagctggagcactagtggagttggcgggaaaggcacggctgcgggcgccccctgtccgcacggaggagccgaagtcccgcagggtggggtccccgcctgcgccgagagggccacctggtcgagagaacaggcgacacggaaacctgagaaactcctctgtctggtgcacctaaccctcttcctcataaagtgcacacgaactctggtttttccgttgcaaattttgctttctacatagaccataccattcgttgctctctgaggatgaggtaacttctctgagcttagctgacatgagcattggcagaaatgcttctcgtaatctggataacttacgttagaattagtaagcagttatttttcatagcctgaaacgtcctgttgtgatatttcagctcctggcttcccagtccagcagaagtatctacatctatttctggaaaggacctgaacttggcttctcgtccttctggaaagtgaggcgaaaatgccaggctgcgcagctatcctgaggcccggcctggaacctggctagccacccagtcctgatacctcatctcctttctgttggataaagtcattggataagatcccccagggtcttcttaatactgaacatctgttcataatcacataagtgaccaagtatagtggaaaacccgaatggtcaactgagctgagcagtgggagagagcgcagggtgagctcacctacacctgagcaagaagcc

SEQ ID NO: 50676 - DNA, 1718 bp, Homo sapiens
tatttttcgggtctctaatgtcttccgctctcgctgctgccgctgccgctgtcacaatattcacagcaccagagaggaggaggaggaggaggaggaggaaaacttttcaaactttccagaccctgaataaaggtttttttttttttcccaccgacctcaccttcgggtccccagccgcatcgccccctgccctgtcagaagcgacttcgggagtcctcgcagccccgcgtaattattttattttattttttattattatttttctctctggggtcctgagcaggggctgagagtagcacaaacttttcctcctcctgccgccgccgctgctcctctgccccctcggctagtcccataatttaaataaccctgatatttctcccgctaaacgcctcgccgccgccccggacccccggagaactcaccgcggggctttaacatcctccctccggcccgtccgccgcctctacaccgcccgcggaatttctaataatttttttctcatatttcgggctggacgcggcgggcctggaaattgtttccttacgcctctttccagcagccattgtagtgtatgcgctgcccctgcagcccaacttgcagctgccgccgccgccgccgccgccgccgccgacgtcgcgcccaccgctgcctccccctgcctgttcggccaccgcccccgcctcccgtcggcccgcccccaaaccccgcccgccgctgcgcccgccccccgcgcgcgctccgcccgagagctggccactcggagccgccgctggcgggagttggcccgcccattgggccgcgacgccgcccgtcaagccgaagtgttaagagacgggccgcggctggggggcgcggtggggcgggggaagagggggcggggtcgcgctcaccgccccgcccactcctcccgcctcggccctcctttcgccaggcgggggcggggcgaggcccgaccgcccctgcggcccagggccccgcgcggctgtcagtctggcggcggcgcgcgccgattgggcgggctgccgccggggagcgggggcagcaagttgggatgcgcgctacttaaggtcctgctgcgtgagccattgacgtgtttggagctggagacggcctgggtgctggcgaagcggaggccggaggtgagtggttcccccgccctacctccgaagcggccgcagaaaagcggggagagaggggtgcccttgggccgtagcggggcccgaatgcacttctgcggcgcggaggcgctcccgccaggcttcgccgcagcgcggacctcttcccgttgctcttcctcccgccacacgggtctgttcgctccgggggcgaggaagatgacctctgcctagtccgggcaaccccagctcttcttccactctcctgtgtagcctctgaagcgcagttaccggccccacccccagttccctgcgttttcctcgccccttgtctctctcggcatggtctcggcacagcaaggtgtgttcacctgtgcgcgccgtccaggatcagatgctgacgggctacaccgcggaaggcggcgaggcctcgggttcgcccttcgtttctccttgccctgcgcgcccacctccggcaggccacccttgacttcttgcccccttccactttgcacctggcagtgggttaacggcacggcgtgtgcagcttccgggtttagcagagccgcggaccctgcctgggctccgaccacggggcgt

SEQ ID NO: 50677 - DNA, 2752 bp, Homo sapiens
ttatctaataaaattccagtgaagacaatttttcttcccagtagccaaaactacagttaggtgagttaagatatacgttaataaggtgctgctacgctatgctgagctcttcctcaacaaaatttgcagtttctggaactgcaaattttaaatatgctttattcaactcaatagcagctccagtgaaatgatgaattcaaaaagtattaataacaaatccaaaatgtctggatttccttaagaaaatgtcaactcccttcccagaaacctacccaaagaaaagccaaatgttatttaattcttattctctggagtaaatatggatctttaatcaagggccaggtaggaccaacagctggtatatttctaagtacctccttaaagggcccgcaaactataaactttagagcgtcctgacaaaaagacagcgaaatgagcatactcatcccccacccccccaccccgactcccgcgagcgcacacacgcacacacaaatgccccgcacactaacagctctgcaacaagactcggtctttcagctggctactggcaggccacccagaaaatgtgtactccagtttcgacccttctagggatgaaatcaaggaaggatagagagtcttggtggattttagccaaccccttaattctacagaggagcctgaagctgcgggtgcaattaactttgtcagccttttcgtttcaaggccttctgatcccaggtacacacggcgcacacccgacccaggacgagccaaaagggcacgggccctgagtcagactacgtgcaacctcacccagctcctctgctgtctgtctgaccttgtgcacgttaacttctgcgtctcaatttccacatctacaaaatggaaccagaagctccacatcccatactgttaagagtcgacgggccgagacgcgctacccggctcgagtgggcgctccgcccgtgggctcccacctggacgctggggaaggcggtcttgagcaggtagaacatcttgcggttggacagcacgtcgccgctggtcatcttgtcctcggctccctcgcgcgtcttccccttggacttctcgtggaggacgttgctctcgcggacgcgcctcacctcgtcgccgccgcggactgcggccagcactgacacagccagcatctcgcgcaagtccacggtgcccccatcggccgcggccgcgggccccgccgcgccgccgccaggctcgccgcccaggccgaagaggctgaagcggccggccaagaagcccgagtagaggtggtagagcacgccgagccccagcaggcaaaacactgccacccccagtggggaaaggcggatgcccatgggggccatggcgtgggaagccgggcgctccgggctgcggctctcacaggcctccagcgcccgccgccgccgccgccgcagccgccgcgctccgggccaggcgccgcgcgggctacactggcgcccgctccccggccccggtgcgccccatcactccctcccaggaaaggccgagttgcgccgcgaagaccaccaacgccgccccgcgcgcctgactcgccaggcagcgcgctctaggttcttccgccggccggctggtccgacttccacgttagcctacggccgcgaggtgaaaggggagcgtgggtgtgtatccgggttacgcgacggggcggggcgagggcgagggcgaggggcggggagagctgggcacctccccttggggcggggcggggcgggacaggaggcgctggactgagctgccttccttggtctgggtgggaaggtattcctggaagtggcgagcagcaatccgcacaggacagtgtgctgtgctgagtgccttgtgggtgtttaaattaaatatcccattgtacgactatggctggctgtaataaacccacagtaacagtctagtcttctcatcactctcagattattgaggaatggaggaaaacacaataaaccattttaaaagattgatttgcaagcttttttagccagcgggggtgtagacagcctgtacctttaagtcgcttctccgcgctcttcccggcaggacggggaactgggcggtgaggggaagaattgtacttggctcttcattctgttgacatctttgtcgtgccctaaatgcttatgtgtgtatagagtttctctcctccacctgccagaataaaccatcctcgaagcagctgaaaaacatgccttgatccgggtttttcataatgaaagaaagcaaaccaggcttctctcatttccaagggtactcgagcctggctctcctaccagagcttaagaagaggaattgcttgacagagtccacttaaaatagaggttatccggagatggtcagtctagaacatgtaatctttgagtcagcgtaggctctcgaagtattttgacagaaataactaccttctactataacaccgatcttagctagaatgatagtgaatactttataagtattcatgagtttatctttaatcttaaaagtgaatattaagatgtatagtattgttcttaaatgttaaaatatctatataaatcaacttaaaatgtagcctgttttactgttcatagcaaaacagcattggttttaagtggactttagaattaaccacctgaaaaactgcaagtataccaaacttctaaacatccattgctaagcaagtcatgtagagcctgacctttaccgcttacttagagttcagggcatccctagaatttgcatgtgattatacacatac

SEQ ID NO: 50678 - DNA, 797 bp, Homo sapiens
tctggcattcacaaatattatctttttttttttttttttgtattttgattccacgcagcagcatggtatatcagaaaggactctggaaggggactgtagtctgaactccggggctttcgcaccattcaccttgggcatgactcacacctatccaggcctctgtagtaacctggatctgcttatccttgagcacaacctgaacctctcccacctggggacctctcagagagaccatgccacagagtgattccaacataaactccggagccagcccaaccgggtctcaatctccgctccagcagctataagctgtaggatcttggagaaattacatatcatctctgtgcttcattttgctcatctgtaaatcggctagtagtaatagcagctgccttagaagtctgttaggagctttaaatgggttaacatttgttaatccttggagaagtgcctggcgcacagcaagtgctccctgaatgtttgttaataaataacttccatgtccctccaatgcttctcactctcctttttctcttctttcttcctctgtgctatgtgccacgtgttccttctcaggaattttcttttgcaatcaataaattatttaaaatcaaaaccctaaaagtcattcgctaattttcctattttatcattttcattgcccacttggtctaccagttctgactcctaatgcaacctatctattttgttctttcagcatagctttagctccagttcacatcctcctcagggctcatcagttcatttcaaaacctgctctggtcccctccttcctc

SEQ ID NO: 50679 - DNA, 530 bp, Homo sapiens
tctcaaaagtgtttcgatctgctgaataaattagatgatcgctcaaaatacaggattatattctctgtcagcaggatattttgggctatttctagaaaaattctagaagaaagagacttaccacaccccccaggtataatccaaaaatgtataattcccatctcctgtgcagatggtaagctgggttatcatctgccaatcacagttctttccagagactgctgttttaaggtaaacaatgggatgaaagtgacgccctgaggaatccttttgcagccagcgaactggctttccaaggtcagaggtgcaaagtgacatcatgggattgtggcaattgcagcaggcaaagtttcctcacaggccggttctgcactgagggatttaaatatattctttctagcttagcctcaaagatgttctccagcctttccaaccattctgtacactattcaatatcttttaataaactcctgggtattttgttttcctgcttaattagtcagccaatttctattgcttacaactaagga

SEQ ID NO: 50680 - DNA, 2110 bp, Homo sapiens
atcatggtcctatagtaatgtcttgagtataccccaggtccaccccagttctggggaatcaggattcagtccaatttcactgataggagaatgaatatttagagaggtgaggtctttctcctaatacattgcactataatcagaaaacaaagggtagaaaaaaggaaggaaggaaggaaggaaggaaggaaggagggaaggaaggaaggaaggaagggcaggcgggcacgccaagatttcttccactcccaaagataaagaaatttttctttttcacagtatttctaaggtgccaatttaaaatattgtttttagatcacctgtaagttagaggtagctgagattgtgttagatctgtttatagatcaaatgcagaatatcttttctattcctattattttttgacattaccctgcacttaacagagtaggggaagcattgaaaagaatagtcattctctttaaaaagatgtcaggcatccttcccatcctttcctccctgcctcctcttccttctcatcctctttttttttcttctctccctctctgtccctttctcccagtgaaggctactgcagtggcatgtgaaaatcaaatatttcaaacaagtttgagaaataagggcagactggtgacaaaaaggatatcaaaacacctaggaaagagttagaaaaatagaactgctgataaagtcctctatcaccctgcaaccttagaaagcctgtttgatctctgatttcataaaacaaattgctacattttgcttttcaaactcatcttacatcagaaggtaaaaaacaagtcatacttcagattgcattgtatgtatttcagcttaagaaattgaaattagtttcattaaatgaatggcttgtataatgaaaagtattaatagtcctactgagaacactcgtttgatctggaaattcttgctcttctgtttatctctatccagcaagacaaagacatactggattaatgactagaatctgaataattattaactgagcttgccagtatccccgttcaccttcacacagaattcgaggtgacctcattttgaaatgcagggatgaactctttgatcatgcatctctccctctgtgactcatgctttcagtgcattcataagatgatttataagtgggggaatgtaagtatgcaaggaattaagccctttgtattttgcatttctttgtctttgaaatagtctccttcagaattgtcaatgtagagcactcctgtcttctagacaaacagatgaagtccagattgccacagagagttgaaaacagctctgctcctccaagatttaaaaaggcagaaagtggctgggcactgagcaaggccaggactttctcactggcctagaggcttgggataggtaggttctcatgatgtattctccactttcagatgtgggtttgggggaaatggcctgagcctgggtttctttcttgaggcctgctccctctggcctcatctgtgggctgagaggcccccagagtttgttcaagaaccagcagggaggccttcggggtgcagcattctgggactaagaagcaggaggaagcccggcaaggcaggatgccagtcctggagaatgacgactcctggccacctcactcccaggattccttaaagattttgccaactgggcgcgctcttcctgctgtcccggagagaatgactagcaatttaaagaccaattagaccccaagaatctttggtccttggcctattactaggtcatagaagaaaatagcagtgatgagatagaaatatcagtagcattagaaatgccaggccagatgtactgaagaaactgcttgatggtggctgaaatccatgcccagcatctactggtacctctctctgttttaaacccagcatctactggtacccctctctgttttaaactggaggaaatttgatgccaaaatcacattcacctgatctccttgatctccaataaatacatgtcagttgatataaacattagatgtgcatatgtttcttactttttttttctgaagagtagtgtctaaatcaatatagtttagaaattaaggccttatggtatatccccaccaaagaactacaagggaaca

SEQ ID NO: 50681 - DNA, 2560 bp, Homo sapiens
tctttgaagccacaagtgttgcttattattttagaaatttctacagttggtgataatctgacttgtaaagtcatttctcagtggatttcacctaatggaaatataaatgctttgatgactgagtactttgattgaccaaagaggagaattgatgtaattacaaacccacttgttctttgacgtcagatgttgttacaacaagagaagtcactgcctcagagagtttcaaaatattataattttgttgaggattattccttgcaaggttcaaagataggtcctttccatactttattttacttaatcctaatagcaatttataagatgcataatattgttttacggattaggaaattgagatttagaaaaattaaataacttgctaggggtgaaaaccgaggcttgatgaagccaagattgaaacccagatgtgtctaacttcacagcctccactgctgaaatatactttgtcttctcactagaagctgtaagagcagcatctggtgatgtgtgaaagaaatcgttaaagggtgaaagcaaaatcaaaggctatagaaaatctaacatagagacacataagacctagtcatctgtatttctggcatgtatcctacttttgaacaatctgtcatttgtttgttgcaattaactctgagttgtagcctgccatgctatttcctaaaataaacaggtacaaggttgagagtgtttgcactggaattacatattcacatcctcaaacaggctagaaaataaaaccacactttatgactcaaactgtcatcggatgagctcatgtgtgggggacatggtggatgttcccagcacaccaagtaagcgcttggttacttagtaagtcagaatgataatacccataatattgctgcaattattatacattctcaccactgtcacactgcttaatttgtgaagttttgttttgttgctttcctttaaacacagatcttcttgggttattatacgtaaaattcttttaaggtcaggcggaagggagtgggatggggaagtagaagaaaggagttggtataattatttctgtttaataaagagctaagttactcacgtgtttaaaaaggcaagcagcattcagtgagattttaacctaaggtgaaatccaatctctttgggtacatgttctggacctttctaattaaatgagtgggaaaatgttttttttcaactactgggtttgagatagagccaaagaaaacaatttatacagcattgaaaaaaaaaaaaagtctagcaatattaaggcttgagaaacaagaaggccttgggttaaattgaaatgccaacttgccagcccagagctcagcttgacaaattacaatgtgaagtctccctttaaaccctgaagcctcagcatcagcgcgtatcgactgcacctggctttgggtattgaagcccgtgcttccctccttataggcatgtggccagttctctgtggcatttccttggaaaatcacgacatgatccttagtctcagttcctcatctgtaaaatgagagaattagactgacaagaattagctctaaggatttgtctagagttaatggttctttttttttttttttttttttttgggacggagtctcacactgttgcccgggctggggtgcaatggtgccactgcaacctccgcctccctggttcacatgattctcctgcctcagccttccaagtagctgggattacaggaacacaccaccacacccagctaattttttgtatttttagtagagacggggtttcactatgttggccagactggtctcaaactcctaacctcgtgatccacccacctcggcctcccaaagtgctgggattacaggtgtgagccaccatgcctggcctaattgttaattcttaatccaatattgcttcgctttgggatctagaatggtctgctggcaacctgtggcataataataaatatttatttaatctttgtccccatttcctgacaaagagaccctgtaatttcctaagcaatgggggtgacaggggaatcgtacacagagctcataaatcccttggaatttcctgggtgataggagcatcctttgttttaatgaagtgactcttggtgggcttctggatagctttagaatgaaagctggttactagaaagaccaaaccttggttagaaacctagaacttccagccccactctcccgaaactctaggtaggggagagaggatggagattgagttaataataaaccatgcatatgtgatgaaatctccataaaaccccttaatgatgacgtccagagagtttccgggcaggtaatgctgccaccatgccaagagggtgatgcaccctaaccacaagacagacaccccagaactcactgtgtgaaactcttcatccagctgttcatcagtatccttcataacatcctttccaatatgctaatatatgtaagtaaagtgtttccctgagttctgtgagccatcatagctaattattaaaactgaggagggaattgtgggaaccgcctgagtttacagctggtcgaacagtccagctgat

SEQ ID NO: 50682 - DNA, 703 bp, Homo sapiens
agtctgtgagtatatctctcaatatttctctttctccagggccaaagtattggacaggtgcctggattcacattagccttagcctatttgtttctttgccctgtcatcacacctgtgaggtttggcttctaagggaaaagaaaagccagaaaaaggacttttccaccagcatcatctctaaggccacattctcaaacaggaaacacaaaccttctttcccctttggcagcattgaggtgtgtgctatccagagtccacctgctgttgttcaagcacgggtttgccctgaaaaggcaaagttgaaagattctgccctgagttgtgtaaacaccatcaccacattaggaaaaatgtttacagaaatggagtttccaccatttgagctagttgtttagtggaggacattaagattgagggttgcttaaactctgccaagggagaatcccaagtttctctcctttcaactgtgtccttccgtgtaggtaaaatataacatgagcaatggcataggttataaatatggaggaacttaaaatgaattgttggtaattgtgtactttgacacgtatgtaatttgacatatgctagctatttagaggggggagtgtttgtaaactaaaaataggaaagagttcctttcctgttaaaaagagagctccactgtattttaatgaatctttctgttctctgcctgcttctgctt

SEQ ID NO: 50683 - DNA, 708 bp, Homo sapiens
ttttatgtgcatggaggaaaggtagaaaatggtttcttgtgaattttgtagataaatttctaggagtgttgtgaacattgcttcatttacagggattgacttgggcctaattaaagactggttaggtaaaatggtatttattactaccaggtacaccacaggaattagcactaagtacagtaatgagtaatttgaataatcagtttggcagatagtgagacagggcaatactgtgtcatcactgagagagatgaactctcccttgtttagagaaaaaaacagaatagagtccagttggatacttgtaccatgactcactaagcctgtagcatagacagagtgtgaatattacagatgcatcacacaaagtggaaggcaggaagagagacatagaagactttagcacattaacttggctttctgaatgactccattttctgattctatgcatgatcctccatcctcaattctcttcttacctgcaagtgtttgtttaatgtaaactttggctggccctattggtctattaattgagatttagctagggagagtatgaacaggaattacattgaagactgatttgatttaggctttcctctttaaattaacattttggggtgcctttagcatactgtgtgccatcctggacattggagggtcagtgcaagtatctctgcctttgtctggtaagatcagtcaacatactgg

SEQ ID NO: 50684 - DNA, 1666 bp, Homo sapiens
taaatgaaaaaatcaaattgactttggaaaacattatctactgtgaattacctttgagttagcctcattcagctccttttactgcgctcagtctggggagacatgaggagtacatggaggttctcagggctgccatgagaacctcagctttccccttcactagattcatggctgtgacccagaacttatcctttctgagtctcatttttcttatcaaaaaaaaaaaaaaatgagaacagtaaacaaagcgttaggattgtgttggaaggggaatatgagaaaaagcttggcagagagacaatacctgttatcacactgagaaccatgtgtattggtgagacacgagggagcacaggcagttggatttcatttcctgccaggaggaaaggagccaagacagctcacccagggtcactcagggcctgagtctgttagccaatgaagccagagctggagcaattcctgcctcatagtccagtgccatttctatgctgtcttaaggattcccactgcccaaaccatgtttattcctttgggtgacacatttctttcccagcgctaagtgaatggcaccccataaaagtattactccactgtcctcagtagcacctctacatccagcctatctctatcgtagtcccactgtgccaagtccttggccaagggcacagaggcagcaggggaccatagtgcttcctcctcttcttaaaagaacttaaaaaaatggcaatatccaaaggaggggtcctaaacacctcacaagagttcaagttgctccctgtgtgctggtctttctcatgctatgaaatctaaaggagcaattaagtgcttagttgcctcaaaagctgggcctgggcatctcagccctaccatgctcccagtgtgaggggccctgcttgaggtgctcctgaaatgtcacaggccttccctttatgaagtctctcatcctgagactcctgcaaattggtgattccttcaattctggagttgaatctatcacatagtgttgctgaccacagcagagcaactgcttgaacattatctaaactcaagtgacaggggtcttttgaaaagtatgcaccagtaccctggtgggcagccctccaaagccaacctgaaaacaagaacacagcaaggcccatccctctctgtggctccagcaaaatgggtgtcccaaagatgccgtgtgctccatcccctatctacaaagccacgcagagtatttcttagaagcgcggggtattgaccttatgttctgcaaatcactgcacggtctcccatgcaatcgtgtagtcagctacttagttttgtaaatctgcagcagagagacttgggttgtcctatcgcaaaatgaatcctgttgcaaagtccaggaagaagatactagagactagggttgacaaaattcagtccagttatttcattccatattaaaagtatcaaataaaaagtgagacaattttattaattttcacatgtgatacttagcttatcttctcattaaagaaatacatcttaattaaaagctgtttaagatgatatgctgtgctgatttactccaccaaaacaaataaaacaaatatttactaaccgtttgtttaatgtgtcaggagccttattctgtactttacatgttatttcattttatcatcataaataaatcatg

SEQ ID NO: 50685 - DNA, 1994 bp, Homo sapiens
agatatatatgtaaaacatctccctttgagaaagcagcacgtgaaacataaatacaaacttgtgaaatattaagaaaactctagctgctgagatattatttgctatggtagcaatgagaaacaagttatttctgaggtaaaaatctatgatacgtatgaaattgaattgattcctttcataatatactgtattttgaatcagagtgatggtttatgtatatgtctttcattttacatgaaagacagtatagataggagacataatgagaatggtgttaatggaataaaggaaaagacaggaaaggtaaagtgtgagccctcatgtaggacagagattttcaaactttggcatgtagtgaaatcaacaaatagcttgttagaacccacattgccaggcacccccactccagccacaaagattttacttcattgggtttactgatgcaactcaacagttcgaactcttaataggttcccaggtggcactgacgctgttggtttagggttcacactttgagagacattgatgtaggagggtttgaaatatttcagcaaagttgataccaggctatcatgaagcttggtgaaacagattcctctgcttctgtggctataaaaatgctcatttaggatttttctaaatgaaaatatataattcctaataaactaaaactaccttcacattgtttctttttcaaacatggtctgattcacattgctgtttgctatttatttttactcaaataagccttcctacagaactctgtcactgcaaatagtctcaattcgccattagctaacattccatctgagatgaatcagagctagaagaatgattatttcacaataaatgcctttgggtccaatttttatgtaactttatatacttatacagcaaatcccctcctcatgtgtcaatggtctgagtagacctcatgtccaatccagaattaatcccaattctggattattttagggtagctctatgcattaattggcataaacttcctttctcctaagccaatcactgtggtaggaagaatggagttactgctctctctgaactacattactgctatgcaataacataggctttgaaagaatattggtgtactgtctcaggctggctttctcagatgcttgcccaagacaaagatttgtatgcacatgatttattaattatctcaacaagacaggaaagagaaagaagctagccttgtataactgcaggcaacgatcccaggattgcagtgtcagcatgaaccatgggggaagctctggaaggaaaatgagctctcagggtaatcctgacctgagataagacagctgggctttcctgcttctctgtcatccttcagcctgaggctcaggctgcccccaaaggatggaggctgagctcagtcccatagaaacagtaagatctaaggaggtatgtgcaggacaacagcggtattcactacagggtgacaaccagactctgccacaccaagattaagagattttattttatctaatatgtcagcacatcctgccaaacatgtgcaaagagggaaaaatgggacagagagaatggatagttcctgaatttgaaaaatgctggactaaataaagttaaatcgaagacattctgcaggtcttttatgagcctttactatattaatggctgttgtgagtcaaaccacaaaattgtttttataagactgtctctcgggtgtatcttctgtgagacagactttggaaaagctgctgtgagtaaggggttgtcaaaggtttgtagagcagcataatcagatcaggatttatggcgtgaagtaaaaagggatggagaaaaggagcactaagacaacaagatcactttgcttctgcaaaagaacaaatgaaatataattaaatcatgaaataagcaagttgtatagaaaacaaaggaggaaatgaactagactatctaatagttagaattgtcataactatgaaggctgtgaggcactaaagaa

SEQ ID NO: 50686 - DNA, 1395 bp, Homo sapiens
attttgatcttaaccggcaagtgtgtccatttattaatgatgtcagctggtctttaaatgtgtctatcagcctattcattggtcattctacccacatgcaatcttgttcatttactaatgatttcagctgctctgtaaatgtgtctgcctattcaatccttatgaacaatacctttgatcacttaattcacataggtctttggagagaacaagccctgctactgacagtgcttctgcctaaatcaccccaagccttcgttaaattgacccttttatgtttaaagttgaatcttctccctatacccaaattgcgaaacatgatttccctggtgctttgcacttcacaatctacatttatagtaatgcctcagagacagtctggcattctgcagcttcctcacaataatgaaagcaaaactgagactgcacaccccaaactccggagcagcattatcaacaaaccttgctaggatcgtaacttccagaggtgaggggaggctggagacaaaccatagtcacacgagacagacaagtatcttcctcacaaggctgcatcacaagaagaaaacttcccattaaatgcatgatgtaagcaagtttggagacacaatgagtggtatatgctatcgatctatttcctgcacgctgaacacttgttggatcaagtagaaaaaataactgttaagttattcactatttttcatgtggctatgatacattcttatatgtttatgcagaagcaataaaatcacttgttgaggaagacaaacattcagtgttttccacaccaggaattatttctatcaaaagtttccttggaagcgtatttctcattaaattggcacattcctaaagcacaaccttctctttaccaagatactgttcctcttgtttaaagtactgatctcaaaacttctcagtaataccatttaaaccactgccactaatcaaagtccagctgcaaatgtgaagcatttacattggctgagaaaatacgttttgtgaaattttgtaacaaagcactgacattaaataaacatgacatgttttcaagcaagcatgcctttttatttataatttttcatatttttaatgtgtcctggtgttaactttgtctaaaaatctgctagagttcatgaacactgaagccttggggtatataagaggttcattagcttcttataatttttatcctttaaaaaacctgaataaatcatttatttattttaaatcactactaaattatcaatatagctatttcattttcaataaatcccttgccaaaagacaaaatcccatgtactagtaaataactgaataaacaaaagcagagcatgctgtaatttttactgctactataatcaacacaaaggcaacaagaaattattctacagt

SEQ ID NO: 50687 - DNA, 1084 bp, Homo sapiens
tagatcaatgatgagtatcatagaaataaacagaacactcagaaattgcttttaaaaatgagtgtttcaggttaacatcaatcacattgctttgttttgtttttgttttgtcatcattcatatattctcagcacaagcttgccctgagcatgaaattcttttagaaaaaagccctggggtaggtgttgacccactgacattaatgagaactccgtattctgagaaaatgcactgccgagggaaaggagatgagaacttggccacagatcacatcaaaagagtttagccaaagatttatgcaaagaaattttattctagagttggccgtgctctatagcgaaagccaagcttttagtgtgctgtattgggagtctggcttctttcaaactacaaaatgagcaaaatcaactctctttacatttcgaaaggaaatagcactcacactgacaacataggcattatttgagtccaaagttcattttaaataaatatatatggttaaacaaaatgatctgccttaagtcaacagaattatgacttgcgccaggagaaaataaaggaaagcagctgaggctgaaaagcccaggctggcgtttgggtgggaggtatgcctgtgaatgccgagccttgacagttcgctccgaccagttatgtaatccagaatacagcccgcgtggaaaaaaaaaagagagagagagagagactggtaataaataatggcttagcaggtctgcagttaacagaaaggaacatttaattaaatagtaaatacttgggaatacagatttggcttaacattaaacacagatcaggtagcaagtaattggaacaaatgtgtgggattttgcatatttggctttttaaagcttattcttaccttataaatatttttctcacttgacgtaaaatatattaaataaatctggtaattggaaagatcccattttgccattcaactgtaaacccagtagtctgaaataggctttccctcaaaaaaaaaaaaaaaatccaaggagaaggatacaagtgcccaacatactccacagatgtccctccattccgaagctaccaagacctaaaatgt

SEQ ID NO: 50688 - DNA, 755 bp, Homo sapiens
cataaatccatcagctttttccaggcactggccaagctcacatttaatggaacgacctattcaggttacagcagtagtgatgatcgaagcagacaaataaaagaccagttgaagaacagccaaaacctgtctctgctcacgttgctctcaaggttgccacgtccacctgacgtgcatctgcatcctgctgccctgagatgttgctaagtgaccagcaaccaggctcaaaagctacaacgcctgctgctgcagtgcaaaaataaacagttcagaacgccagtttggaaccagtatcaggaagcagttggattttctgatgcaaaggggatttttgcttctgcctgagaacagccggtgagtctcacagctctctgggtgatcccactcctcagggggagacaacagttatgtcggcagagtgaaaccggctgctgtccttaagatttgtgattgctaccttatagactcttccatctctctatgtaaataaaccaagcctggagagtctcaagggcacctctgtcaaacaaaacagactttgaacttcttctgctggagagttttctggtaacataattttcactccagtaaaggtacacaaaccaacgtgatggtggtgaagcacagaaaagactgtcatgagctggagtcgatacgtgtccaatggctgcttcaagcacttggatttcctattccttagagaagtagatatagatttcgttatacttaaaaatcacaaagttctatgcatttgg

SEQ ID NO: 50689 - DNA, 981 bp, Homo sapiens
aaaaaaaaaagaaaagaactgaaacaagaaaaaggaacagtgtagaaagtgcaagaagcaaggagaaggagaaagaggagacccaaggcaaatcctgagaccagttcaacacatctagagagctgtaagaaagaaggaccagcaatcagtataaggtcacattcaataccctttgtagtgaattaatgtgtagacttttccaataatgtagatttaattctgggcagagaagagaagaaaggtgtccagttttccctcttgcatctctggagaatgagtgtgagtagagacattccagcctgggccaaagtgcatggagtgtacctggagaggcctgtggcaaggtgagaatgacaaatcaatatcattgtcatagtagaagccaaggtccaaatgcaaggcatggatggacatgagagagaatatattccggtcattagcaaaaaaagaatggaatcaagacaaaatcagaaatgcagagaagctcaagggggcaaagttcagtagtacaaagactgtcagggtagtcctgttggagctttaggtttcatgctctttggaagagcaggcaggcaggttatggaggtaccatgtttggacagctcgccctggggaaatagttatctcctccacttgtagtttcactacaaagcccagatgatacacaattgctggctgtactcctttttggtcctgtccaaagaggacgcagaaatctggcagaacactcagccccctgctgcgtatggaaggcagaacagctctttctgcctcctgcaggtctctgcaagcctggcctgccaggactttcatgctgacctactttttagtgcaaggacttggacgtcttcccacctgtcctaaccatggatgaaagcctaaaatccagttatggcacaactttcttttcctcctagttccctaatttttgctccttctccatgctgctccctacttctctgtataggtggatgccttgtt

SEQ ID NO: 50690 - DNA, 843 bp, Homo sapiens
atcctgacatcataatccttttaaaatatttgtaaatctgaaagtaggtgaaagtatcatgccaaaaaaaaaaaaaaataagagctcatgtatttatttcatacaagtggacacagcatctcagttcccaagcatgaatcagttttatagctggaaagaacctaagcagtttcaacccccatctgcataattatttggttattcataatatttggcaatctagagttcttcaggcaatttttcattctgttcaatgtcagtaacagagacaaaagttaactcagttcagtccgattaaatagacagcatctatgtgtcctccatggtctcagtttctggggagcagtccttattttttcttgttattgatcaggtcccttcactgggtccaacagctgggtgccagggacatcatctcctttatctgtgctcttgtggtagcagtttcctgctcctgccaaaatctaagtcaatttactttgtgttgtttgccttttcagctctctaggacctttggaagtcgttccctgggttaaattatctgtttccagctgaaacctgactgatgcatttggggataataataactttggttactgacaggtgatagcaatgagcattgggggtgggcggggggtggggggtgtcctaggaaatacccaggtggagccaggtacagtatttcttgtgtgtttacttttttaaattttcattccagcttagacataaaatgcaatacaatacaatacaatacaatacaatacaatacaatacaatacaataatgtcctagcgatgtcaaattgctgtaaaagcttgtaaacacaggcttggcgccctttct

SEQ ID NO: 50691 - DNA, 1800 bp, Homo sapiens
ggtgcttgcgtgcggacataggtgggagtgggggatagggaggaaatggaggcgccgaccgagtggaatggggggtgggtcagggatggggtgggatgggcatcagtagcggggtggagatgttgagagagaggcagggcttggagtggaggtgcgagaagggtggggacccggaaggtggggtgggggcgggatggaggcggggcggggtgtacgaggggcgtgtacactggctcagggacacgcgctctcggccacagcaactggctccaagttccctccctcactctccggcgaagcctgcctgagccctcccactcggtgcagaccgaaccatcgcggccgccgccagccgggcccttcgcggccgcgcgtcctgggcccgttccgccagccccgtctgctctctacccgcggccccgcggcggcgaccgtgaacactcggcggcccctacagcccgctctcggcccttcgtccctcgcgggccccgactctccctccttgcagtcccccggagcctggctcccggctcgggccgcaccgccagggactggggtgagcggcccaggtaagactgggccgtgggggccgggagagagactgctgggcgggggttgggattcgggttcagtggtcgcgccgcgccccgactgcggacaatgcgggagctgcgcgcggccaggcggcgcggagctaagccggctctgcgcctgcagcttccccgcccggcccgggtctccgttgagcccggcctcactggcccaggcggaccccgtccggctttctgggctgccgggggaggcgcagcgccgctgcctgccccgcgccccctctgcgctcggcttggctgcacgtcccgggctcggctaggaggctgggcacggggccggggctggagccggggttggagccagggcggggggaagctggccgcgctgcggagcggaggtgggctccgaaagcgcgccgccggttgctgctggaggagtgggactacgaaggatggggactccgctcggccaccgctcctgaatggtctctaatctcggtgttaaatactttatgagagtatcaataccacctaatcctttgctgagaattactgctagaaatgtagattctgaggttccgaaagtttgtttttggttaccccctccagctcctcccgtggcctcaattgtctctattttctttgaaagcatacagatttgaaatagaattaaattctccttggctcactcgtgtctccatcacccagcggagctcataacttggcaacaaagcccatacaggctgtgggaagccgcgatgcctgctgcccagcctggtgccctcctattgtttagagctggagctgtacagtgtaaatggcagtgacaggtctcccttaagctggctcgtggggaaggaagggagataactttgcagtgtgcttaaattactctggaaagtggaaagaaaacacctggtgctcagctttttaaccctttcaagttgttattcagatttattgacacacacacacagaaaagtgcaggctttctttcctgcctaaaaaataggcaacctctgtgttcttcctcacagccaacttatgtcctctgcaaaatctggcacacatctgtgacaacattgcacttctggcgtaactggtctatttctcaaaagggaatatgatagtagaataagcatttttgcagtatggatagtaggacttccattttcttcgtttcctttgttggtgaagaaggtatttattattttccccccagtttacacgtagtgatttctgggaagat

SEQ ID NO: 50692 - DNA, 2375 bp, Homo sapiens
gattgtgccactgcactccagcctgggtgacagagcaagactttgtctcaaaaaaaaaaaaaaaagaaaaagaaaaaaggcatgaggatttcaagtgaaatccagttaaatgagtattacataattaaaataggtcctatttggaaataaatttaactcttggaatatttaactattcctaactgtatcattcaactcattctatttatatggtttaattatatatttgacccatttaatcttaatacctcacgaaaacaaagctatgtagagtatcttttaatcagttttagcatctgagaaatctgatgtctctttggtggatttggccagagggaactggaacacatgctctcattgccactttgatggtattttttaaatctatgaaataaatgcttttagaaaatgattttactgggcaaagagagccaggtgtggaagtaaaatttgtattatctattgttgcataacaaatgacgccaaaacttagtggctcaaataatacagattttctctcttcacattctgtggggattcggagtttcttagcagggagcttctggcttgggcctcccgggaggttattctcagatgtggctggggttgcagtcatattgaggctgcacagagcctggaggctccagcacccaatgtggctaagctctggctcagctctttgactggagagttgatgctacctgctggtgggagcggggagctcagttcctccccagcttaagcctatcctggcgctgcttggttgcaggtcaaatttttggccagccaagaacctgaaggaagatctttcataatgtctcagtttggctagctacccaactccacgtattcatcctgtttgcctcgtggtgttgcctcatgccaggaagtgctccagtctgtgtttgtcatgttctgtgccctccaggagctcatgatgcaccagagaaaaggctaagcccagggcccaagagaagctggtgcaatgagcagcatgggcacagcctgaatgagggagggagtgtgtccaggaaaagctttcctgaagaaggtcagatttgagctgaatcagatgtgcctgccttctaagagaaggtagatgttagccaggtgaaggagtaggctggaagcagggagtagggggagaaatttaggaaggaaatgctaggcagatagaacagacttagtgaacagactgaggctcgaaacagcacagcaagtctggagaactttagcagtttactttttcagtgcctagggaaatgtttgagttagggagagatgccaggactggagatgctagtgtggtaggtaagggagttagtgcttctcagtcatgcagcttggatgcatgtgtttcttgcccatcatgcatgttttcttactcattcctcaacaaagatttgagcatttacaaggcttaaggcattatgccgcttcattgaaccctgaaaggtagataagtctgcattttatagataagagactggctgagggatattaattgacttgcccaaggtgatgtggccagtgagtagcagggctacatctgtgtgaaaacctgaaagtcgagttaagatgcgaaccagttcttcataagaatcactggaggcacatattttatataaagatttcaggcctccaccctagacttactgatgtctaggggaagggcctcaggtactctttactattggtgaagtggagagcttagctttgctctcaacttgaacttgacatcagtgagagtggaggaattgtggaagagggtgtgcagtttcttttctgtatgtgctgaggggcatgaagtccaaaagatgtttttgtttggaaaattctgagtgacattacagcctcaatctcttagaagatgttttcaaagtctctaaaaaataaattgtgaagaaagatatccacaagcttcagtatcttggaatcaacacacaattggatttttgatatctggtttgatttgatatttcatgtgaatgagtagctgaaaggtgctaatgaggtatttaatactggtactagaatcaaaagctgagaaatacctgaacacaaagaccagactggtaataatgtcatgagattccccaggactagagaaaaacatgaagaataaaattactaagaattattcaaaagagtgttttgttgttaaggattgctctgtatgtcataatgtactgttttaagctcttcacgtgtattgggtcattttatccccaaaaccaaaaatgttattgtttttgtatttcacagggctatagaatgtgaaaaaatgtgtaatttagttaattgttgtttttaaatgctcaaacaaatgtatttaattttttaatatccttataattttttctgcctgttctatc

SEQ ID NO: 50693 - DNA, 1065 bp, Homo sapiens
tttatccttagataaatacaatgtctgtgattcaaggaaaaacaatttcttttgaatgataccttttaatcacttttattctccagcataatttttaatctgcgtctttttccttttagaaatctccaaattggacatccagagcagcattcttgttctgtctacgtcttgaattagaaactatcaagctctgtaagtcctgaaaaggaaataaaaggtaattacattaaaaatttattattaaaatcatgtaggaatctggttataaagtaaatttgatcctttatatgttgagcagaatttaggtattccccaatttttcccacctttttcgttcttaaatactttcccttccctccttccttctttcttctctcccttcctcccccttccttttcatatattcatttagcaaacttttgtggactctgccctgtgctggtcactgttctaagcacacacactttattccaacttcccatgccctggcaggaatggggagattggcaaaaaccatccttgtagaactggctccccagcctctgtgccggctgctggggggcagatgctctgccattggtttggctgaggctgatctcggcacctgccccaccttcactatccccactggccttgaaatgcatgcgcttctcccagccctctgaacttgcctgggtgttcacttgcagtggcttttttacctgagaattctgaacactcagtggacatttaacttccccaattgggactgttagaattataatcactcatggggataagtaaaacagaaacagtgtactgttccccaactactgaatatgtgaatattctcactggacatgggacctagtatatatatttttaattattaacataatgtaaatattgcaaacaaataaatgttacagataggtagcatagaatgcaactttctactcaaaagccactctccagagaaaatattggttagatttaggtgcacattctttaattattttttctccatgcacatactaatgttcaggtgttcagtctgtattaaatgccttaaccctatgagtgaaa

SEQ ID NO: 50694 - DNA, 1298 bp, Homo sapiens
ttgggaaattagactgtaatttattttcctaaagaatatggctttcaggttttcttattttttatactgctgtgaaccaaccttaaggatccaaaatctctcaaacagactgttttaaatcaagaattccccttttctcagcctccacccttttctctgtcaccatcttaagcccctaggaaagccatgcagttcagaaatagtcatgtggcttcatggttcaaaggcacctcttgggtccactgccagcatgctcccaattctacctcttaccggttggtagtcctgaggaggttagttatctctccatcagtttgctcaactgtaaaatggtgacagtagtatctgcttcatggaattttgcaaggattaaatgattaatgccttttggcatgggaccaggcacatggaagttgctcagtaaaggttagctattcctcggctgtcgctaaatgattcacctggtgcttgtgttactttgcttcctcctgcagtccacaagggtggcctccaacctgcattgctttgacttgtcctatgtagtgtcactgagaccattttgccccttggggccgtggggagaggctattttgtcattgacatgttttagaattgtctgcatgtggctttattattgttttttacattctctacagacaatacactcccttattagttgcaaggggattgatttcaccttctctcctcttttgaagctatgaaattgctatagtgacagctgttattatttaagaagtagctggatcttaatgaaattatttaacttaaagtcatatagtgaggaaggaacagaacagagagtcaaacccaagattatttttaaagacttctttgacctcaagatgcttagctgtgagtttaagaacgatatcagagacaaaaaggaaaaaaaaaaagacaattgtgaataccacagtcatataaagtatatattaatttcctccagaaagtggctttattacaaacgtgggacaagtaaaagaaaaactggtaagaaaaaagctgaagaggcaaaaatactagttgaaaacataaagaaagatgttttaagtcaatgttaacagtgattaactttaaaataaggcctatatatgaataggaagaattattctcaggtccttataaaataatctcaatatcaaggcacaatatgacattgaaatacataaactataactgtcataaatgcatgagagattgagtcatttttttctttagatatgcatgatatgctacatttaaataagacattgaaaggttcagtggaatttaaaata

SEQ ID NO: 50695 - DNA, 3488 bp, Homo sapiens
aagtgggaaggtaagaatacctacccaacagcattttggggattctcaaagcagatactatatgtgacgtttcctttgcaattttaaagccgtgttcaggtttagtcattggcattgttgaatctgtctccttccctggtttggaaggtccttgtactcctcatcctgacacagcatttggcaaatgataggagtaaataaatactagttaaatgtcattatgaggacagggaggaggagccgtgatgacaaggaagtatatgagaaccatgttctggccccagcatgagagtcctagtaacctctttaattcatgccccttccagagcctcgtagtaccccgcccccttcaccagtactataaaaagcagatcatttgaggaagaacaaaaactaggctttgagaagacactccaagatgcacaactgacttctaaaccgagccctgcagagaagactcgtgcagtctgctcagggtttttgtacccagcaaggtcattgtccaacactattatccctctcagcgggcgacctccctgagaactcacactcggtgttcggggctgatgcgcaggtactggggagatgctgaggacctcttcaggcagtgaagctgcctcatggcacagggatgccaagtgtctgtggaggagctggggccagggctgctgcccatggcctttggagcagcaggagtgacttccagcagccagtttcagtctgttccaggccatccaggccacagctgagtaagtgtctggtatgccacactcttcacaaaaaaagaaagactgctgtttgagtgtcaggaacagaaaaggaaggggcacaagctccccggactcttgcccgccagttgtcttgcccctggtagccagaaggagactttcacagcctgggtactcttttcttttcctcggtgtggggtgatcctggtggctccccggacctggcttgcgttgactagggagcggatcgttggtttctctgcctgcagtgacttcatgttgtggcttgaggtcccctgatagaaatgctgctcagcactcagccctccaagctgccctctactcatgtgggctggggcccaaggctcctgctggatcacagctcaaacgccggtcctttaacatcagccgcaatagccctacgtgcagccaagcctccttctcaggccctggtgctgttcatcagagcagaaacagctctccaggacccttctccttaagatagtgtttgaccagcaactgaaactgagatacttcctgccagaatattatgatctctctaaagttacctggaaccctggctttcaacagaatcattttttatgcgtgaaccctaacttttttccaaggggaaaaagctgtaacagttgtaacaattctatgtgaaaattctggaaacacagcctcattttcagtctccagggttagagaatgagaacagaacttgaggaaatccatgcaatgaggcagacggtttctgtagtgcctgctcctccttgccagtacagcaaatgtaaaaagtacacgtctgcattctgtgagccaggaagagtagatgagggtttcgacttggaaggtaatgggaatctacaaagatctagaaggagagaagctgtggtcagaccctcagggagcttgagccaaacaaaccctttcctcctctagtgtgtatggttgtgtctcctccttcctcctccatccactgccctctgccagcctctccacgaccttcacagctcttgaatatcttttgccacactccagctgaggaagccagcaaacctgcttcagacttagccagatcctgcacccctctcatgtgagcatcctgtgctgagctgcagtttacctgatctttattgcttatttgttaatcacttaatgagcattcccacattacaacagaagctcctttaggaatcagaatgctctgttattccctacagtatttccagggtgcagcacaagtccttacacatagtaagggcctaacatgattcactgagtaaacaaatgatttttcagaatcaaaagtgtgttgactgaagttcaaagacaagaggactcattccagaggttgtatacataggccccccgcagccaagtggcaatgagaaagattcccaatgaactgttactcagttccaaaacaaatactgggtctgaacatgttgaaagataagacccaagaaaggacagtagctttcttcttttagaaagtgtctgtttaatgtcttctactaaacaggcatgaaacaaattaattaaacagctttttcagtgcctattttgagctagcagtctgttaaattaagaggaaggcagaagctgttagatgtttcctagagaaatgcctggaagtgttactagcctgtatcctggcagccttcagggagctgtgccttaggccaaatctctgaagccaattcctcttggagtttttacctcctggtaatggtgattgcactctgataattcactaggatgatgcttcaaggtagcacacacagctctcattttctttagccaattatctccatcatattttttcagggtttgcgtatgtgtttgcattccagcacaagttttcactcttgaatttatggaccatgagtttctgtgctttcccttgaagtttatggtccatgtcattcctttcactggtttgtttcccaacagtttgtggtacacaaagattggaggatgaaatgcccctttgccaatagtcctgtttcttggctactaattaatctggttcctcagagcaaatcataatgcctcttgagcatgtcagctttttgtaaagttttttagctaaaaataaaaaaaaaaaaaactacagaaaagggaagtttgcattttatctttgatctttggaatggaatttgactggtagaacatacccacttgtaggaaatatgaaaaaaaccatttaacatttacagatttgattagatcagctcaggactgctaattctgtagaacacattgagaagaaagaaattaggggaaaagaagtagataaacaactctcagaacggagagttgcatttgactggctgacttctctcccttttcaacataaatttgtcattttaaatttaatccaactccttctaattaaaacttttcccaatttatattccatagaaaacatttttaaaatttatatcattaataaaaataattagaagcccttaatttcctgaaaatttatttttaagatagctttgtatagaatcaagtgaaagtagtgactattatgtatctaaaaagaagtaggggaaataatttgccttataacagtgaataccaataatggttctgtgtgattaatcaaccctaccattagcttctcagccttcatggcttcagaatagtatttctgacagaactgtacgatggagacatgttgaggtactctcttgagtgctgtgatgctggaaagaaagggagacaatatggagtggttgagatcac

SEQ ID NO: 50696 - DNA, 1110 bp, Homo sapiens
tgacctcgtgatccgcccgcctcagcctcccaatgtgctgggattacaggtgtgagccaccgcgcccggccagatttttgcctttttaatatggtgcgtgctagatacttgagaaattgctcagaacaacaacaaccctcgtgcatttattttgcatgttaaatgggcctcaccaaaaatgcttgctggttttccccagacaccttttttttccaactcggtgtttcctaaagctggtcctccagaatgagaggtttgtaccttgtcaatgactcatcatcctctcatgccagcacccctgacttttgcctctccccagatcagctgtttgccaagagaatgactcagagatcagattccagcagtacagtcaggtgtggctcctctgaggccatctcagctgaccttgagcaaggtcttctcaggaatcaggagagtcggcacgacagtgagacccactgtgccgggagccaggcttgctttctgcttttttaaaaagaggaggaggaaagggcattctctgggaaaagaagcagggattttagatgttttcttttacttattcacaaaaattgtatacacttctctaagggtagatctagggatagtctccctcatactcagaaggaagtataattctatttttgaggatttaacacacacttattgtgaagttcaaaaaattattgattggaatttaaattatcaaattggcagtagggtgttggtggcttacgcttgtaatcgcagcacttttggaggctgagttaggaagatcgcttcagaccaggaggtcaagaccagcctgagcaacactgtgagaccctgtctctacaaaaaaaaattttttaaattagccaggtgttgtggcatgcgcctgtagttccagctgcacgggaggctgaggtgggaggattgcttcatcccaggagtttgaggctgcagtgagctacgatcatgccactgcactccagcctaagtgacagagccaagaccctatctttaaaaaaaaaaagagtaatttgacatattaaaattttttaaatcaaatgtaagacagattctgtgttactacctgcatagtttattagtggctgttataatagaaat

SEQ ID NO: 50697 - DNA, 1420 bp, Homo sapiens
actctacaaactgccacctttgcaaagttcccagtcccctcacttgtcagtgatggatggtgatgctttaagggtccatttcaatagaggtatatttcccccagtaaagacaaaggaatgttaatgggctaatagctccgtactgtcatgactgacttatgtgatattgcacaaggtgaggacagtggagctggtattttgtttggcattcaccaggcacttcagccctttagtgcatcatctcccttcattctcacaacagatagttgatgggacacatagcacgtgatcatggggctagatctgagctcacaccatacaccgtctggttgcagatctgtgcctctaaacagtcttgccaagtgtccagtgtgctttaggtgccaggtgcttcacagacttcggaggtaaatattttcctactatttagaagtcatgttttttcagcacattagattttctgaaggtttctctgaacaaaagaacttgctgcagatgccaaccaagattcctcctcaggggtgtttaccatgtagtagtgccaaagaaaccagcgctgtgcgtcaccttctaccttatctagagccctggagaggtcacctatctgtctgtgacttagatcggtgggcttcgcttccagttctctgatttaaggcttctgttagagcagcagctgtagcaatttgctttttgaataggcatatacatttcacaagcactttcacttcagcggcctggaggggtggagtaaactgttatatcagcttcatagatgaggcaacagagcatcagagaaaagggacctctcaaagctacatgggtcataactggaaaagccaggatacaagctcctctgcctcattcgccatcacaactccaaaacttgacctctctctctggggccatctcctcattggctcatcggcagaatgaatgaattgaactccagcagtgattttcaaaccctgttccctggagtattagtggtttcaaggctgatggggattgagatttgggtctctcctttagccaaaaccactctgcattcatctattttgcataccaatgttccacattgtctttaaagaaagcttctgtagtaagaaaatactttgaagattactgatcctcaaagtttttattacattctaaactttaacctttaggggccagtgcccagtttaaaaatcaattgaactaatataaacatgagtaaattatcaatgggaaagtaaattggtcttacaaaactaatttgtaactttcaaaaatgttatctgttgggtgaatccaagaggcttccccagaagtaaaactctctaggacctcaactcaatacctgatacctggttcccacttgactggcttataagaggggcccagtaaatgttgctaaaatgtaattaaaagaaaaaaattt

SEQ ID NO: 50698 - DNA, 2599 bp, Homo sapiens
tacaaaaggggtcttagaaaaatctgtttcttcgtgatgttgtgataagatctttctttagaatgtcaaagactttgctaagtaattaaatagatttttaaggcaaacagatcttcgttccttaaataacaatgaatagactccctataaacataaccctactctggatgcttatgaaactatagtctgaccctgaaaagtttttctctgtggtgaagtaatgtgtgcaatcatacccatggtatatcatctttacgacctgtgtgttcttcctgatactgctgggttgagcaatctccatcggtcagtgcaaaatgagccaaatttatctttcagtttctgcagtttcatttattctgcaacctcaaaaaacaaacagcaagtttggcattagtcttgttactaagctagtggttagcaatttctaacaacttaacaaagaggttggaatcaatggtttcaaattctgattaatacatggctatttaagctacaaaggaaataaaggcatctaatcaggatattcttgaagtcagtagagctgcctgcttccaatcagtaatcctatacaccaaaacattttctgagaagtacatttatagatgtatttttgaacttcctgtgtgtcttgctatgagaagaaaaacatccctaaaaaatacaattctgcaaaacagaaaaaggcaagcaatctgtgaagcagacacatgctgttcatgaccttctgagacttccttttaggtggcagttagcaatattgtgtcacctatgatctggcaaaacagagggtaacaaaatcaagtgtgtcagcaaaaatacctgaccccccgcccctcaaaaaaaaagtgtgtttgtgtgtgtattagtctgttctcatgctgctaataaagacatatccgagactggataatttataaagaaaaagaggtttaatggactcacagttccacatggctggggaggcctcacaatcatggcagaagatgaggaggataaaagtcacgttttacatggcagcaggcaagagagcatatgcagaggaactccccttataaaaccatcagatctcgtgaaacttattcactgtcatgagaataggatggtaaagacccaccaccatgattcaattacctcccaccagctacctcccacaacacacgggaattaagggagctacaatttgtgatgagatatgcatggggacacagccaaatcatatcagtgtgtgtatctaacaacacagtaatagaaattgtagcttattaataatattttacatgagggaaatacactaaggaactataatcaaaagttattgactaagtttctgtcaattaatacttacctatgtgaaaaatttgtctagacacataagacaaagaagagaaggaatttactagaaaaccattctcaaggagcttgtcacttagttgggccaaaaatacatagaaagatgataactctaacaagcagaatacaaatgactaagaagtggcagagacaataaatgctgggcatcaaaggatcactttgggccaggaatgtcagtaattatttccagaaaggtaaatattagcaacactgagctttgtgattcagaagcacaagcttcaccttctggtaattcccctgggcaaattccttgatcatgaatatgatcatttaaaaatcaattagtaggccactctattcacatgatttcacagtctcccaccttcttttgcaagggtcaagtaaaactaacatcatgttcaataaaacatcgtattaacacttctaaatagttgtggaaataatccatagtgcctattttgagctaaacccaaaaacaaatataataaaaataacaaaacacaaatgtattttttgaaactatgaatattagaaaaaaaaactcttaagcttccattaaactatttgcctccttgaggtaaacagcagaaaagaggaaaatgatgaagatactctcatgagtagaattgtgcttaagataaactggcacaaccaagtcaacttacagctaaagacacaagcagataatgacagagagacagagagaataagaatgaagtactccaacccccaaatgatagagataccagaggaaatgaaaagagctagcgatactcaagggaataaaattcaactggacaggagaatccactatagatattatagaagaactacgaatttctgtggcaatgatgcaggtcttgagagaatgaatggcatgaacatttaacaacacataattctaaaaacaaacaaaacagggccaatgaagaaaaaaatgactggaaatgaaatgtttagagtattggatgtttgtatgaagaagaattaaattagatataaatgtcatgtcataaaccacaataaattccaaatgagttaaacgtgaaacacacactgaaaactatgtgtccagtaaaatagaaaaataaatttgtaaaataacaaggataaaatttttaaaagaaaccaatgaaattccaaaattgacaacatagctaatagaagtttcaaattctaaacatattaaaaacttgaataaaatcactgctcaaatttcactggagataggaaagaaatataaatc

SEQ ID NO: 50699 - DNA, 1456 bp, Homo sapiens
tccaagcactttttacggtgtttttcactctcagtgctaattcacgctgtggtgacgatgtaccatccaatccttgataggaaagatcagagaatctgaccaagactagatggagaggttgcaatttttcatcagatgaaaaatccagaggatgttttcattgttgagctaaatgaatctgcaagtctatgctgccctctagggcggcctacagtgcctttaggcgagtagcaggagcaacacaaaacttaacagaggtttccctgcggagaaactccctttaagaaaaaaggagaaaccaaaaaggtgggccagcaccggaagcgggggcgcgggttcgggtagcggggacgcgcacgcaccttgcgcgtcttcgcccctcctgcggttgccaggcaaccggccccggaagttgcggcaggtgcgtccgcagcgggcgccgctagccagcggaagatggcggagggcggaggccctgagcccggcgagcaggagaggaggtcttccgggccgcggcctccgagcgcgcgggatttgcaggtgaggcgaggagccgggggagggagcgcggcggtggacgcgggctggtgacggcgcgggctggtgcgagttggaggccacctctggcctcggcggagcctttccccgaccccgtctggggatagaatccggcgcccggtctcccgatgtcgggtcttgacactgtggtggtcgtgaacacaagtgcccaagcctccagcgctggtgctttgtctcccttccaccccacgtatgatgtaaaaatagctattcgtttagaatgacattttgcggggtcagttggtcggttcacgggttgatgcttccttcttgagacttactccagaagaaaggttactgtggccgcagggaagtagacagtcacctgaacagtaatgatacgtgatttgttcttttttgtcttggatgctatttctgacttgcttacttaaatataaaaatggttccattttatcaggtaggtttttcttttaaaggggtgaaggaaagcgatgcactctatgcccatacagcctagttgtctaagctgtggtctttaaaacattgcactgaagaaactgggaaataaaatttcgtaatgttgtgtaggacactagtattagttagctaaatagtagcgcaccaaatcccgttttatcagatactaacgccacttttctcattttaggcgtttttgtgtctcattataagattattgataaaaatttgacaagtaaatatcagtaaggagatactaaggagaatcttggtagaacagttttactgtattactttacaaccacacttcattctaatgtgaacaaaccaccatccattgtaacatactgctgagctttgcgaatgtggaaataaggacatcaaatccttagtcggtgctgaactctattgatgggtaggtatgtaagtgtaaaagaca

SEQ ID NO: 50700 - DNA, 857 bp, Homo sapiens
tgggagagatgaccataagtttcaggaaggccacacactagacatgaagcaccttttagttttttttttttttaaagctattaagactgtgaaatttgtcttttttaaaaaaacccaataccatgtgccagataactctttcaccccaaaatataaaatcctatgcttataattttaaaaccctcagtgagctctggaatattgtgcatatttaatacctaccagcaacctagaagtagacaaataccatgtatttgtcataccaactttccaaataacctgactcacccattactgactgggctctctcattactggccctgggctctctcacttcctcagcaaccacctctttggaactttaatttccacacctttttttaaaacctgcacctcaagctttctccatcatcccagcctctctgcctgattccatcccatgtaaagtaacctcatctgagaacctgcaatcaccttttaccaaacacatgataagccttagcaacctagggactatgataactctggccttggcctaaggttacataagaacatgatagtttgctgaccttgtggagggaaatctaaatgaaatcaatataacaaacaaagctagccaagatcaggtatttccattctgagtataaaagcaactgatcttaagcaacgggcagagatgttaataccggagatatatttgtacaatcaaactcttgtgtgctggtgaaagactttacccccaaagtcaagtcaaaacaaaaccaaagcaaaatggagaatgagtcaatgtaacaatgcaataaaaagaacaggattcaagcttcttgctgcaaatactgaactggaatctttttctt

SEQ ID NO: 50701 - DNA, 458 bp, Homo sapiens
acatctagtatctctcaactaacagctaatggaagctaatcagctgctaataagtacacgttgtctgtgatgttcaaggttttacagatagtatcaacaggtcccacaacaaaaacaacttgagcaaaactgatctttttagctctacagcttacacaaactcactttgtcagctttggaatcaagccattgactgaggcaactatcatatgaacagtccctgtggatggaagcctcccaggttgtgtgccataaataggtgacagcagggcacagagaggcagcacgtggcaggccagttgggcactggaactcctaaagccccaagtcaatgaccagcttcaagcaggatcttctaattgctcccaaaggactaaaatagaatgtattctgtgttgtggttttctaccacgatggagaaaaaattaacatgcactcacctagtaacagctatcatc

SEQ ID NO: 50702 - DNA, 1250 bp, Homo sapiens
acgtcccatcactaagctttattaattacaacagcttccaggtgatggatgtactcactgtcctgaacacatggcttgaaggacagagtgaagacttatgaactttgtaaacttctcatgctgcacaagatgaagaagacctattttgggagatgtacctctgtgccttatatgatgatcctctttaagaagttggcggtttggctcggaattctcttgtttttacattcccagcctgacgagcacatcatcagagtgctatctaagttctctttactggcagttgcatggttttcaggtctgttagggaggcatagctgtcccctgaaatcaatactgagttgcagggatatgtttactttgactttagtcctattggaattctgtgaccttggcctaaaatggacagtgatcaaatatattatttctgaagggcaaagttaagagatttagccttaggaataggaatggggacatcagaaataggacaaagctgctgctcttcaggttcttgaaggacttctcaaggtgagacttagttcgtacgtccccttttctccgtgctccatgccatgagaggggaattccagtcacactctgtctggccagctgtttataattctgctactgctgatgttaagccattttatttctctttcagtgccacatctctgtggaaaatgcacttaacaaatatattgcctactgtgtaaactactacagaaagttcttatttttatgcccataacattctgaaacccagagcgttaagcaatcccttgtaataaacgaaacttctgtaaggctttctcagtgccatctagcatttcaaagcactcgtttactcctcataacaaccctctgagttcagtgctttaggttctgagaacctaaaggtgaggaaaccaaggcatagagagagctaagaccatgaggctaggaagtggaggagcagagcagtgcatgcaggccccctggtgcagaacgccggctccagcagcctctgagatggtcctcagcgaccctagacttctgctgttcacgcccttgtgtggggactgaaattgttgactttcaagtcaaatacaacaaaatcatgggatatcacgtctgagcttaggttacactcatgtgtacctacatgaatgagtccagaagcagattcctcagcccccatctggcctgcagatgactgcagcctccggaaagagcctgaacctcaggcacccagctgagcaggtctgggttgc

SEQ ID NO: 50703 - DNA, 573 bp, Homo sapiens
ttcttttgtttcttctcaaattcttttggcctgcctcacttttagtttgccgtctagagttggaaattttttgttgttgttatttgaaaatgtctttccctgcttttattttgtataaatgcaaagcgttacttatatttgcatgtgtgtgtgtgtgtgtgtgtgtgccatgccatatatggaaaagacttcagttttctgcactcttacccatcagccttgccactaccataaagtgactttagggtatgtcttgctgacttaccaagaatagagagatggttacatcatttcaccagaggtaaccaaggtcaacactttgtaagtcactattgactctagatcacctgccaaaatttcaaacaccatgagacagcattggaaggcatccagtgagagtttttaatttggagcactgagccccagcgtggttttgcaggattcatatgccaagtgagtgatgataagggctaaagagttgtagtgtttttttttttttttttttttgagacagagtcttgctctgtcaccaggctggagtgcagtggcaagatctcggctcactgcaacttc

SEQ ID NO: 50704 - DNA, 1066 bp, Homo sapiens
gagccatcctccagccccagaaaactgtacaatgaatggatttcttcattgtgctgcaaagcaaaggcctgactggaaccagaaacaggcttagaccttcagcaggcttagaccttcagcaggctgaacatttctgaaatttcacttaataaagaatagaaaataaataggagactcagtacataaatgactggattgcgggtcaaagaagactgtgtctgcttcccccctgggcctttgccccatgccggtctagtgactgtgccaatggggctcacctctctgtgtctctgagccctgtcagcaacctgctcagctgcccacagaactgatgccttctccacctccagtttgtttcagcaaatagtaaacctgccttgtcacgcagcgtgggcctgagcactagccagctgtgttctcaattctgtgtgtagctctttcccaatatttcaatagtgtgagagatcaatagagagaatcaaaaagacctgctagtaaagcaaccagcgtttgcaactcactagagcccaggctaagaagaaaaacagagaccccaaagtgcccaacgcctccgcacaaataacacacttattccatcaccgtcttcaactctttgagctcccgctatgtttaaggtgtcaattggaagctttggtgggctatgcagttgaataaaatacaattgccctccttggagaactgccattccctggaatcactccagagaagtgatgaagtaaaggcacttacagccaagtttctgagaaactgctgactctgtttgattgccacatgtctgtggccaaagcactcccagggacacctgagctcactccaatacctccccgtggccctggcacactgttacctggagcaccaaatgtttcaccgagatgatatcccgtgtcccttcatctgcccccaaccatcttctcaccaacacactccaagaaaaactgtgaggagaagtattttcctgtacatattttcctgcatgcacatacttttgtgttttaaaataacaatttctgtttccagtggagtttgtttcacattgcttcttgcc

SEQ ID NO: 50705 - DNA, 1790 bp, Homo sapiens
cgagacctctttgaattggaggcgacgagaaccaagcgaccgtgagctgcgatgcacacagtagtgagtgggtggcacggggcccgcgggcacgaacagccgaagagcggagaagactgggagcataaccgctgggcagcgggcagcggacagcgggcggcatgaaccgccccactttgccggatacctggagctgcaggaacgacccacacccaggcctctttacccctaccgccccgttaccttggggacgggatcacccgacccggcgccgtgcgactgcgcgggctgaaggcgggggcggtgccatgacgcgcctcgggggcggtcctcgggcgcgcaccgctctcttacactcgggcctcagaagtccgtgccagtgaccggaggcggcggcggcgagcggttccttgtgggctaggtgagaggccaagggggcaaggagggacgccggtgccaggtcccgggcgcggggacttggggcagaggtgtgacggtccctgggccacttcacagactgcatcctggtcgcagccgttttcgcgaggcagcggcgacgccctctcctcagggggctccgcgcccctccctgcgccctgctggctgggggggcaagtttgcgggagcagcgcgctcttcctgccgcgaccccgcgcgtttcgggttcctgcccgggctggggctggggctggggctggggctggggctggcagagcccggaggcccggctgggtgaacgccttcagcccccgccccagctctggggttcttcctgggaccgtctctcgatccttgttttctcctcgataagatctcgacataagaaagagcctctggccacggttcctcccagtgctcggcgtttctagggctgtgcttaatcgcccttcttttgggttattcggaaagtcctggatttgaaaggaggaaggaagtgtttgtttattgggcgaagccttgacttttttggaagggggtggggagaggttgttcgctttgagctttttcctggagaagttggacctgagggagaaacgtttccagtagggtgtgtttagaaggaaatacccctgagatctgacccctgagatatgatgactcagagccttcctttcaggatttccttgtaataatgggaaagggaaggcatatggatgtggaaagttttcacttttaccaaagtggtgattattgagtcatggagtcttctaatgtgtccatttttgaaaggagtttgtagattatctagtctgtataaccacatacacatttactgttatcttttccattacgtacattgcttagaaagtacgctcggcttaccaaactcttaacatccgcttgtttcaaaaagaaatcgttgattaaagcaggaaatttaccttgaaaaacaactgcgggccttttaaattaaattgatttctaaatgtgtatgtgattagttaaaactcaaatttgttcagtctttttattttcctgtttaagattgagggataacggtagaaaatacgtccttttgtcttctgtgttaccaacttaattctataaaatttgtgccttaaatggtacataaatattataaatctagtggtttgtggcacagaataaaaagaagtagaatgacttttaaaatggtcagtaaatagtcactccattataaattaaatttaactttggagacattaacttttagttttgggcattataggaaaagatgtaaaaaggggaaaaagatgaacaaaaggggaagaatttgctaatggttgccggttaaatgtactgtttaatta

SEQ ID NO: 50706 - DNA, 624 bp, Homo sapiens
aaaatatatagatatataaaaatatataaatataaaaatatttatatttaaaatataataatataatgtaatataatatatattatatataatacatataatacatattatataatacatattatatatgttatatataatacatatgcacacacacacatatataatatatatatagccttttggtgttctgaaaaagtccgaaactatcccacccactgaaagatctcttaatagaaactatttgtgagttacttctgaggcctgagatacattgggtgtaggggcctttcataatgcatgaagtgagtcacagagattgcaaataatgtagtgtgggccaaacctggtcaaagggtatgtgggcagtaccatttctttccaaggaattaggccagtggaaaaaagctgtagtggtcaggaaggtttgatcaaacccttaaagagtagtgggagttttatcttcttagtgattactcagctcgaaggaaagcctagaaacaaaattctttagtttagttcgtacaataataatgtttgataagagttgcaagtgaggtaaaatgagattcttccactgatgtaatagttactttcagaatcctcttaaacctcattattggt

SEQ ID NO: 50707 - DNA, 606 bp, Homo sapiens
attactagttataacatgattgaagaaatagaaattgacttgtaagaagtaaagacaacttttaagaatactgtaagagcagacttaataagtagccactaactctagggctgttcccatactggggctgagattcaggtctggttgaagaggggacagatgtcactggcagatgctgaagttgccggataccatgcttctggaacttattctccctctggcattctgaaccttggaatttgctgcagaagccacgtgaaggggttgagaaagctgctcagggagattccttggtggtggcattctgctgcagagttactcaatagagtgctggggtgagcttctgcatgcttgtgaaactactcctggcaggagtctggctagagtagtacgttggaaccatgaagagaaaagctcttcctcctacagtgtacctccagttgcctctactgacaaggcttaacatcatgccagctggtaacagagcaatgttgaaagagctcagctccattttgggagagaaagcaataagaagtggatttggaaatgggaggtaataaattgatacctgaatcaagaatcttacgttaaaccacataccagttt

SEQ ID NO: 50708 - DNA, 2070 bp, Homo sapiens
ctagcagcactggaagatctgtggctctcacaatcaaaacagtgtgtctgtaaaatgattcagcccccctttccttttggcatctgagctgcagaccgagcaagttgtttctgtcaccaaaaatgccctgggaactatacatagagccgaagtgagctttcttatgagacttcccttggggacaggtccagcatatctgaaagggaactgctgtgagaccattttagctcaagggatcccaaatccttactgggatgctggtgagaatgagtgctccgctgccgcaccgcgatttcgactgcaaagctttccaacacaaggtccactgcgcggggagcaagtgtttgggaggcaggaccttggctttcctcagaatcaggcctttccggcggcccccctcccagccttccagggcatggagctagtcctgtgtctaaaggagtcggcaggaaaaaggcgcggcaatgcgagtgggtggtcgccggcctgctcggtgccgcccggcgaccaactctgcggcgccggcgccgagtgcctggacccgattaaggggaaggattagaaagggggtgcccgccgggcagcgtactcaccctcccctgcgaacgcccgggctcgcgtgccgggatccacgcccggaccccgcgcggccttccgggtgagctgcccgcggccgccgggacctgcactgccggatagctcggcatgcctcggctccgcggtggaatctggcctggcccgtcatccagttcctgtccccggcaggctccggcccagaccaggcccccggcctctcaccccgacctcaggtttccgccacagcccccagcccaggccctggacacgcgtccggcccctgcctccgtgcccggcccccacgccgcctcccgtccctcagatctccggccggcgtccccacgaccggccccgactaggcccccggctgggcccttcttcagctgggcgcgcacctctccttggagtagagctgcagctgctgctcctgctgcttcttccggataaacgccatggagggtaggcgcgggcgggcgcagagcgcacaggcaggccccgccgccgcctgccgaggaggtccggaggagccggggagggcgggattggtggccggctggggagcgcgcggctgccggcctggcttcccctgcggcgccgctgggcggccgagagcccgacgcggcgtcccggccgcgctcaccgcagcatcctcgcgtggggactccggcggcaccgtgactcaggcccggaggaggggcgcgcggtgacacgaggcgccccaaactcaggccgcctcagaggatcgccagggccagcggccagaccaggatccgacctcacacactaaacgtttcaccactttaccaaccattgcaggctgcgttttaaatattttacgcataaaaagggatgctggcccataaaccaccaatctgttggccacaaagacttgaaataacaacgttttgtgtcctccattgtgaaaaaaaaaaaaagacggaagttaaaggggtgaaggcaactcagtcgtaactattccaaatacaccaggaataagtggagatttatagccaaggagcaaggagcaggtgttcggaaaactgctaagaggaaacatcaattctgggggaaattctggctgaaccaacctaacaggagtcccagtgaaggcaggccagggggtcagatactaagggtaggagtaaagaattttgatcacatatggagggtgggggattcttgctaaactgccgtggcagtgttacttcctaacactgcatttacaaggaagtgcacacaaggacctgggagaagattcagaagcctaactgaagtttggccaagcaaagaatctttaacacagtctcttgattgttgagataattgctcgcatgatttttttttatataacagctttattgggatataactcacataccaaacaagtcaaccatttaaagtataccattcagcgatttttagtatatttccagatatgttcaacaatcaccacaatttgagaacattttcatcacatgtaaaagaaacccatac

SEQ ID NO: 50709 - DNA, 747 bp, Homo sapiens
aaatctccatgattacagattatatcaatctttctggaaaataatcaaatgtcaatcatagagataaatttcctatcatgcaatttaaatgctcttattaaaagatttccccacattatttaaatagtttttgtgatggttaattttaggtgtcaagttgattggattaaggaattcctagagaactggtgaaatattacttctgggtgtgtctgtgagggtggtttccagaggagactggggtgagtcaggagactggggtgagtcagcagactggggtgagtcagcagactgcgtggggaagacagaccctcagtgtggccagccatccttcaataggctggggtcctggatagaacaaaaaagacagaaaaaagacaactttttctctctctctctttctctgtcatacatgtgctctttgtccttctgctttctaccatgggatgacacagcaagaaggctctcgccaagggcctcttgagcctctagaattgtaagaaatatatctctgttctttataaattacccactttcaggtattctgttacagcggcacaaaatggactaagacaatttccctcctctattgtccaaaattgtgtttgaaacactgatcatcatgcttatctcctttttaagttggtatttggacagtatggtacgggctttagatctactggaagtgtgattccttgccataacaggtaggaggacagtcatcctcttgcatttgacaacaggccc

SEQ ID NO: 50710 - DNA, 863 bp, Homo sapiens
tttaaaccttttattgcacatatacaaaacagtgacatcttaagatgtaggggccctgtttaattaaatgttgacaaccacagaaataagtaatgtttgttaatgttacttctcttaagcgcactgcacagttgctgctaaagtaatggtagtaagttgtacattgctaatgaatctaatatttcccagccttttatttaatatttgaagaacttttcttaacaaaagccactgaagctctacgaaatggaaaaacataagcatacgcgctcgtttgctgcttctaacgtcactaagtaaacaggttaacatttacacatggccagttgttcacaaagtgttccatctgcttccaggcaggttgaaggtcaatgttttaggctttgagctgttctagagttccttggtaacatctaggttactgaggctactggctcccgaggtcattatcaaagcattcaacatgttccaacggtaataaaacatgattgataacagactgcttatttacaatgtttacactatggccacaaggatttcctctgttaacttttggaaaagtaggcattacctgtgtgtgttttcaatgggaatcagaatttcctctcattttttctataaagcttttctatccacatactgagtcattgtgtcagaaacatcatacatcagaatttcatggcaaaaacacatctaaacatttgatatgaagtatcacattcatattaattgttagtcaatcaatacaattatcaactaagatgtatttgccatatgcagagaaaaaattattgggggtacaaagaagtataagcaattttccactttggagcccagttggtatgacacattccagttgggta

SEQ ID NO: 50711 - DNA, 653 bp, Homo sapiens
aagaacatgtggggctgctcctgtgaccttagcagatagggcggcctcaacatagacactgacagtaatttcttagctgctcctgccctttcagactgaaagtccttggaatcttcagggaagcacactgaaagaaaatgtacccaaacaaaaatctgcaagtggccaagattttgccttgcacatgcaccatccataaagggaccttccaggtatcctccccaacgagttcccatcagactgacggaggctgacttcttgaaaacccttcctgcaatatcgaggagctcttcctggtctcccatccaattgcttatcccgtgcagtttgagagattgtatctgtctcacagtttaaagatagaacagctgccaacagtcccaaacgatcattaataagttaaccgttaccagataagattgaaatctatgccagtcctattttaaagtaatctctatgataattactacacaaactgctacccaaatgccagcgctgacgcaagagcgagggggtgaggttaggcatctactcccagctcaactggagaatatagccttatccagatatccttccctatccccaccctgtcccccacctccacccccacgaagagcaatatccaatgcttaaaatggattaccagtgaaagg

SEQ ID NO: 50712 - DNA, 934 bp, Homo sapiens
tcgaaccagattacaagaggatacaatacatctatgtgtagagcagggcaaaagactgattgaatatggtcagggatcttggctatcttgttcatcaatgcatttccagaaccttccacagtccctggctcgttgtgggcacatggtgaatatttgctaagtctgtgggaaaaaatctatgatataaggaacagaaggattttaaaaagctttcctagaaatatcctgctcttttttctcttcccattctgctacttacttcagtataaaccggaagtaagctctccactgtcaaatgttttctcagtctgggcccttctgaagttttaagtccattccttcttgacttccctacttgctcaaaccaaagcaaaatccaattcattccttcaagagaaagtcacggagcatacaacaaatcacatggagatgtgggctcttatagagctcagggtccatatctggttaattgcaaaaccttgtaaccagcactttagtgagcaaagtccaaaatgccacaggagcacagattggaaggttccagggcacatgtcatatgaactcagcccagaagggtgacccagcttctgacaggcacatgagtgggtgttcccagaagagtagaaagagcaaattaatagagcaccaaccgttacagcaccagccatctgttccagtgagtccaagcactgggtatcatgaaatgagacaaataaaggttatcaagacaggttgtaattaattatatcataactattattaacacttattgagcacctactatatgcttggcacaggcactgacctctacccataaaccttattttctgagtaactgacttctcccaagtaacaagactgtacctacccacctggactcaaagccattcttctgggagttcagagctcaggcaattaatcaaaattattttta

SEQ ID NO: 50713 - DNA, 840 bp, Homo sapiens
taccagggtaaaaacaagaacatctttccttcaccttccaggcttatcattacccatgatttacacacattggcagtgaaggatcattaaacatgagaaaaggacaaaacaaacaaacaaaaaacccaaggcatttggtaggagacagagcttagaagaaatgaacttgtagaagtaggaggataaacaacctcactggaaatttaacacatttgaagcagtggttggtcagaaccattgctaggaaaaatatgcatctgatcagccagtgaaacatatagtaaataatttttaagactttcaaagctcatgctttaatctctaactgataaggaatttaggaatggattgcacactggaggtaaaaaatgattcgccagatgactcacacatctgagaaccttcagctccagcaatatgtggaatgtagttctgcttaggacaaaaaccaacctgagaggctttttggttttggttttggtttttgtttttgagacagagtcttgctctgtcgcccaggctggagtgcagtggcacaatcttggctcactgcaacctccgcctcctgggttcaagcgattctcctgcctcaacctcctgaatagctgggattacaggtgcccaccaccaagcccagatagtttttgtatttttagtacagatggggtttcgccatgttggccaggctggtctcaaactcctgacctcaggtgatccacccacctcggcctcccaaagtcctgggattacaggcatgagccactgtgcctgacccctgagaggtttttgtctgtggattggattggctggctgaattttttctttttttcttttttttct

SEQ ID NO: 50714 - DNA, 396 bp, Homo sapiens
tacaatggttaacaaaatttttaaaaaagatctctgttttcatggattttagtatctattgagagatagatagtaaataacacaaacaaatatataattgcaaacaatgttgagtgctataaaggaaagattcactagatgtggtagactttggtggcctcagtgaatcatgccttctggtattttgcccctgagtaatccccttccatgttgacactgggtttggccaacgattaacttgcaccactgggacattacaaatatagtgtaagcaaagtctgatgaacttgtgttggtagaagagctgaggcaggactggcttgtctgtcataatataaaagagtcttggaagatgtccggggtccagggtctaaaacccctcgtggcctttggaac

SEQ ID NO: 50715 - DNA, 2454 bp, Homo sapiens
actatttgttacacataaaaattatatacaattcatatattacatatggtgcatgttatatacacacacataaacagatcatctcggttttgcttaacctaagtcaggctttttttttttttttttttttagagcagccctcagaaccaggacaggttcagagactttatttattttttatttactattattattttgagacggagtcccgctctgtcgcccagtctggagtgccgtggttcaatctcggctcactacaacctccacctcccaggttcaagtgattctcctgccttagactccgagtagctgggattacaggcgagcaccaccacgcccggctaatgtatttttagtagagacgcggtttcgccatgttggccaggctggtctcgaactcctgacctcaggtgagagcaacgtagtactccactgtgcgtgcataccatgatttactttgcagtcccagatttacggtttccaatttataaatactgccattttcaccttcaagccccgatgccaaacacagaaataccaggccacccccaccccctcgccgtgtgcctcccacattttcacacacattttcaggagcccagggcgcagcctcacaccgaacgccgcctctgccgtcccctcacttgccccgtgcccccaccgcagggctgaaggcgacggaaccgagcctttgtacccccaccagccccgttccctggcgtctcccggccgccgggctcgcccgctcaaacgtggcggaacaaccggagccgggccccgccctgctggaagacagggcggaccgggcaaggcaggcgcggggcggggcggggcggggctccggctggcggggcgcggccagcgtgcagggctgggccagcgtgcggggctcctcccctttcctccggcggcgccggcggccgcagaacttccgggtcggcgcggaggcggggcggaggcgccgcggcggctgttattgttcggctgggctcggtcgggcgctgtctccctcggctctgcgggtgtcagttcgtccggcttcctcacagcccctcactcccggcggctgacagcagcagcggcggcggcgggcggcgcctggcgtttcgaggctgagcggcaccggggttggggcgcggaggaggagcagcagcgggaggaggagccgtgtgccctggcactgagcggccgcggccatggcgtacgcctatctcttcaagtacatcataatcggcgacacaggtgagggccccgggcgcggccgggcgggtgtcggcggcctccggacccgggctgaggggcaaacggcgtctggcggtggcggggacgcggactccacccggcgcctccctcctggccgcgccgctccatttccgcagtgctggagctggtgacgtgggcactgcgagcggccgcggcctggccaggcccggtctgcggcccccgacccggccagtcttgcagctgagggccgtggcagccgtttgcgacgcccgattcaggaagtgtgtgacaggaggggaggcctagcgcagggccgccggggcccgactcacatgactgcaccccacccccagggccccttgcgttaggtctcttcgcggccccaggaaaaagaaggagggaaacctaggggagcagaaggtgttggggcccgggtcttggttcctgaccagtccaaccttcctccaccagcacgcatctatcaaggcctgggcaaggcgctttttggcgtgggacaggcagccgagaaagagaaaaggaaacctttaaaatatgtattttatatatatacatatatataaaatatgcttttttaacaccttcaactctcacgtcagaataagtcacatctcattacttgacggctggagaatccctttcggggttaggaaagcatgaacgagttctgtggacttttgccacgtgtgaactggggttatatagtaatgtaaagtcgttcagtgctctgggtgtgtacttaggtatgtgtatgttgaggacgctgatgttttagatatgtcaagtccggtgtcacaactgctaattttcaggtgagctcatgtccatgagctgaaagaaattcagttattctcacttaaaatgacgtcctagtatatttcacagaaaagtaaacagactcttcgtagatatttttaatacctgtgatttggcattactttgaatctaataataaacataaagattgtttagatgttgcaactattaatataccagagtctgatttcagtggttactcttgcacaactttggaccctttgcacaacttcggtcatgtaagcagcagtttgtagttgaactaatgatgtggcaggttctataagtaactaaagaagcatgttggccggacgcggtggctcacacctgtaatcccagcactttcggaggccgaggtgggggatcacctgagatcaggagttcgagacctgcttg

SEQ ID NO: 50716 - DNA, 534 bp, Homo sapiens
gtgatgagagatgacattatataagacacaatgggtaaaaagcttttccttatgtgaaaactctggggcagaagtcaactcttctagtgtgggctgtgcatagtaatttccttcccaagaatacagtatggaaaagagggggaaagttcctttccattggagaagcctgacagactaccttagccaggttatgaaggttaaagtcaacagtgatcagtcacattgatagtatgtacccttgatatgatgtgatgaaaatggtattctttctctgtcatcttccttccaaacacttataatcccagtctaatcatgaaaaaattagacaaatttcaacacagggcatgttacaaaatacctaatcagtactcaaaactgtcaagaacatcaaaaaaggaaagcatgagaaactgttacaaccaagaggaaccttaaagaaggcctgacaattaaatgtaatatggtttcttagatgtgatcctgagacaacaaaaggacatgaggtaaaaactaagggaaaaaattagaacttta

SEQ ID NO: 50717 - DNA, 1859 bp, Homo sapiens
cctcccaagtagttgggactacagcattgcgcccagcctaattttcatttactccacaattacactctacgagattacaacctcacttaaataacacccacgtattttcaaagataatcttgggagaattatcatcttctcaagggctctttcaaaggtctcatctactccaaggccttgagatacgattcaatccataggacacatcaagatttcaactctagtcagaatcagtattttaacaatggaagcaaactgggaaagctaagcagtctcgcgtctttacacacatggaaactatgaccatatatattatacttttccttaacattttacaaaggacattcagatgacttatcacaggtcctaattaaaagaatcctgaagacaaagccaagtcattttcataacacttgacccttttcaactaccttaatatttttcatcttaaaggaaagctttatgtcaaatccaagtattttatctccttgttaaagctgagcttgtattttaaatcagcacctttatgccagtctcagaatctcaaaacagttacattttcccctacggtgttcccaccactgaaaggcccccaggcggggctgtccaggaccctcgctccgcacccattttgatcccaggaagggcggtcgggcagggacggagacggccgcgaccagacaatgtcctgcattcaccgcggcctcggccaatcacaggccggcgcctcccggccccgtgcggcgccaccggccactgctccggccggaggaaaacctggctctagtcggccatctgcggctaatccagtcagagcgcgcggcgctcccacggcgcccggcccggggaaggggtctgggcagcaggcgccgcggcgtaccccgggggcagggtcgcgaactgagggcaggacgcgccgccccctccgcccgaacgcggcgctgtccctttaagatgatcctcctcccggggccaagcagcgcgttggcggccccgccgcagggggcagcgacatccgggctaccggactggcgacggcggcggcccctcgggcagctaccagtccccgcgggatgcccggctcaccgccgccggagaagaggagccctccaggccaaaaaaatccccccaagcccagggtcgcaccgcggcggccgcggcatgtgccgccacccgcctccgcctcgcagactccggggccgggacgccggggccagcacgcgggtcacgaacgctcagcctgcggggccgcgcggcgcgcgcccgcctcaggaccgccccacctcctgcgcgtgcccagggggcggggcgctgctgatcagccaatcagcgccagactccagggaccgcccctgaagtcttcttagggggcggctctggagggggaacttcgtcgggggggagcggcggctggctgtgggtgtggaaaagcgggcgcgccagaggggctgggaaggtgggagcagaggggctgggaaggtgggagcggaggcgctggccccgactcctaagctgtgcggaagtgaaaggggcgggagcggcggggaagggcgctggccgcgcgtgagaaccggcgcgggcgagccgggggcggggaggcgccgggagcaggtggtgcagcccgaggtgtgcgggaggggctggcatgtcctggagatgggaaaagcggggatggatgtgctgagctaataagcgtactgccagagctgtcaaggtttatttatgcaggacagagaacttagagaagttattcactgactggtggacacacgttctaagattttcctccgttcggtttaagagaaaagtgcttacatgtttctgatgcctggtgatatttattaaaattgaaagttggt

SEQ ID NO: 50718 - DNA, 806 bp, Homo sapiens
aacactacaatctggtcattatccccctaccccaattcacctagccccgggatccgttttgcgtctgcacttcaggccgcctggttgtcgctgctgcagctctcatacctcggtgcggggcgcggcgtctcccacctggacctccggcgaccgctcaccgctctctccgcctccgcccttgcccctcccctgtctcgacagcacagccagtcagatgctttattttaatgtaaatctgttcgtgtcactcctgtttacgatcttttatgggctctctgttgctctcgggataaagtcctatctccttaaattcgcttaatagggccctcctaatccagttaccgctttcgtctgcggctggatcttttaccttgggccgctcctccagcccttcttcgcgttccgcctaacctggactgctttcacttctctcaacttgccgactcaagctgctgcagcacttctccgtctcctccctgcttctttcgtttcctgcacctccttccccagcgtgagcgttaagggcgcccgtggaaccccttcctttgccgcgcaccggtagccttgcactgccgtgggctgcggtccgacctggggcgcgtcccacgccagccctttggagcatgggctgcattgttccggtttcctaggacggtcctgacaatactggcagagcccaataacccttttaggatacacagtgatgggcgcagaaaaccaaacaagtagcctgagatctttgctgattgattcattttatattgctgtatttttcagttttaaaattttccactttataagaatag

SEQ ID NO: 50719 - DNA, 3656 bp, Homo sapiens
tttctcagtttattttggagtccagtaataaccagtcagtctgtacctgccatagggcaatctttggttgatatgagttcctttcctgattttaaaataagtgcaatctttaacctaataaaattatcttaaagtttacaattgatggtttaaacacattataattgctccgtattttgcagatagaagaggcttaatccatgtttgtagatctatttcctaaaataaaaattagtaaaaaaaagttttttttcttcaggtttaacattcattttgtaccgggaagagaaatggaataagaggctcggatttttaagactatgcaatcagatacaagtgccattttggccaaagaatgagtaaaacattctagtcccgacacgtttaataatgggcatacatcctatttctttgtttcataatcattgagctctctgccttctctctcttttttggtatggtaacaaattcgacaaaatcaatgccatctagttaaactttttgattaagtagtggatccggtgtcctatccacgaagaggtgggaaaagcgatgtggagaagcaggcacgaacccatctggaatggaacatgtcccttccgaataatttcatgtgggaaaataatttcaagttgaaggataattactgcagagactgccagtcacccccggccgccgccggccgcgcagcgtcggaaacccttcgcggcagccaggagggtcgcagccctcccggagccccgcttcctgccccggggcggcgcacccggctccgggaaggtgccgcgcgggagacgtggcagcagcccctccagtccgcgcccgggcgcagcggccgagcgctccgtgcagccgggcaaggaagactccgcggcagcagcgcaccggccggcggggagacccgcctgaagcgccggcgcccgccaggggacgggaagtggcgcccggcccgcccttgcggcccgcggcccgcggcccagcagctccgcgccgccccttttctctcggcctctccctcggcctccgccaccccggccgaattcttgcataaattatgccaggcgcgcctgacgtcaggtggcggcgcgcgggcgcgggcgcgggcgcggcgcggcccggagggagctggcggcgggcgcgcgcggccccgcggcttcgggtgcgcgcggcgtgccggacgcgcgcaggcgctggcgtgctggggccgcggcggcggcggcggcggcggcggcagcggcggcggcggcggcggcgcgggggttgagtcgtggtggtgcggacgcgctcgtgctcgggaactatcggattaaacttgaatcgagtgaaattacacaaaggagcgccgcggaggaggcggcccggggacccggacaccctgaaactcaccagagacccgttcgcccccggccaactccgtgcccgtggattcagccccctggccgcagctgccgagccaactccggagcccgctctgcgttttgttttcccctcggcactaggcagcggaggagcccgaccgacccggtgagcgcgagagttcgcccggcgcccccgggaggggcggcggcggcggcggcggcaggaaatcgctccgggccggggccggggccgcgctaggagttgggagcgaggagttgggcgtgtgcggggcgaggggcgaggggcgagggcgggagggggccggggccagcgcaggagcgcagcgccgcccgcgtagtgtcgccggcgtcgccgcccgcggggcccgaacccgcgccccgagcgccgcccggcgccccaacttttgcctgcgtccgccgggccggcggcggcgggggcgcgcggtgcggccgagggtcacttcctcgcatgtaaatggctttttgttgtgctgccggcgtggggggggggtacgggggacaggagggagcgtgtctgcgcgcgggggagcgcgagcgcgtttcctcccgccggcgccgagcacgagttgccggctccattcgagagaaaaaggaaggaggaaaagttgggctccaactcaagtgcgagcgggcgatgggcgcgcgggcgcggggcggctgagcagcggcggcggcggctcggggacggcggcgacccccgcctcccgcccccgccccccgctccggaccgaccacgccgcgctcgccgggagctgcggccgcaccggcgcgaacaaagtgcgttcctcccggcgcggcggcgccagcccgcgcggggaccgccaccgagcgaggtgggtcggcggcggggaaagtgcgcggggcgccgcgtggggcgggggcagcgcgaacacgcggcgcgggaggcgtcccgagctcagccagtgccggtcgcgggcgcggagttgcgagcccggagttgggggctcctggggctccccggcggctcccaagtgcgctaggaggagaagaaagggagcggggccggggcgagcgccgggaggcgcggcgaggaggggaccccaccttgtcgagctggccgggccgccggcggcggcagctgcataatagcgactttaaccttccaacgcaactcggctcccccgccccccaacccgccgggggtcagcgccggtggggggtggtcaccaggtggcccccgaggtgacccgggtgcgctctgccctcgcagagagccgcggcttggagcgtgaacggccgaggtggctggaggccaagcggtcagcggggagaggaaaggagggcggtgggggacgcgttgtttgtttggttcgcaccggggattgggctcgctgggggcgcggggctcgggcgggggcgcgggcaccggctgggctgcggtgcggggcgggcgcggcggcgcggggctgtcgaggtcgcggggggggggggcgggggcggcggcggcggcggctcccgggcgggggtgggggcgctggtcgggaggctctggggaaggagccgccggccccgagcagccatcattaccgagccgcctttctccggatggctctgcctcgaggagcccggagccgtgggagcgcaccccaaactcccggccggccgcccgctttgtgagcgcccccgtgaagcgagcggcgcggagagtgctcctgctatgggtcggactcttttcctggaggtcacttttagagactgctcacgccttggtttaaactagtttttttccccctcttctgaacagacaatggacaaaagaaaagtagcaacccacatggagagagtttccttttgaattgctagaattagatacactatccagcgctccacttgctaagtatactttttagtttcccattgtatattatctagcaatcgatttaaataacttatcttaaaaagtgtcccttttgggggcttaatttctggaatacattacatgtcttaatttatttttaaaggattttgtgaggccctgattttttattttctaaaaattttaatttaagccgtctttgcagtgggcgatacctttctaaggggttaagtgttatttcaccccagttctctctcggtaagggagggagtactcagtatacgtagtaatcgaagaggaaacaaaatacgtgtctttatttcttcactgatcttgtctgacgatgacaaaaaatatcttagtgactgtgaccttagcagcatggctacctgatttatcccagttataattatatttag

SEQ ID NO: 50720 - DNA, 1892 bp, Homo sapiens
cagaaatttttttttttaattgaaaggcagtactatatttgagaagggattcgtaagcatgctttcttagctagaatatagagggtgataggcaattgttggacagttaggatcagtatttgatttcaatactgattttaatttgattttagcagcaatcctagaattctgaaatgagaatgacagggtcaaaacattattttattcacaaaagcaacgttctctctagggtgtcagtgttaagattgtttggaggccagaggtttggaggaggtggtgggcgttcacgaggagctcttctagagctgttgctgcctggggtaaaccagcacagattccaggagaagccagggaaaacgcatcccactgggatctaagtgacctttcccacaagaccaggtcttgtcacttctcagcttaacatcttagatcggcttctcattgcctgcctgaatatgagccaggaatttcgatgtgatttttttccttctttttcttattttgcttctcctcccgctcccactcccaatccccgttttctttctttgtagaaagatagcagacataaataatcttcaataaaaaggcagttaagaaaaaaggcatgccttcattccaaaaccccagattcagactcccagggctgcttagggggagcgctggggcagagccaggcctcggcgggcggggtgggccgggctgggccgcgcttccgggatgggtcagcgcccggagcccgcgcgaggacatgaggacggcgagcgggccccccggggggcggggcatcccctgggccagacgcagggcggagcggggtcatcgctggcacgcggaaggccctcataaggccctcgctgccggcaccgtggcctcccacccactcggggcgctcgcttcacctcatgcccgcctcagtggctcggggccggagctgcggccacttcctgaccggaaggccgagccccacctggcctgacaacatggcggccgggagaaggcccccccccccccccccccccgccccgcacaccgccaggcctctggacgctgagactgggagcgaagtgggcaggagtcagcgaggccatctcgcgcccgtgcgcaccgctgtagggtcatctccagcgctggcacctggctcagccctcagccctcctggcccctgggcttctcgaaatggccacactgccccccacttcgcggcctggttccgccctttcttggcctcaggtgctgcacaggccacgccctctgttccgagcccttcttgccacctgccctccctcatggctcccgctcctcctcactctggtcgtctcgggaggccttctctggatggagacctggctaggtccccgtaacttgacctcagcagcctgttttgccttcgtagcccacagcccacttgtaattctgtgttccaggtctgcccaggggaaaaggggatggtaatgcctgttgctgacatagctctatcagaaaggtgctcagcggctgaatgaatgaatgaatgcggtggagcatgagggcgcaggcgccatagtggggaggggcaggagggaatattctgccggcagccacaagaataggaaagagaaatactctgtccgaatggtttgtttttttgtgttggtgggattgctcaatgcatggctcttcttgatcagtgagaaatgtgattggagaaagacattagagttttatagctgatgttaaaaaatgagagccgccacattgacactatttgcttccggagaccgatgagagtgaagaactaacagctttgggctaaactttggagtgcatttttattaataaggctagatgaaccatcgctggctttccagttgtatgtatccctcatagaatcagacaccaactcagggaggggc

SEQ ID NO: 50721 - DNA, 653 bp, Homo sapiens
ggtatgctgtgatgctttgcctgtcctgtgctcaggtttattcatgatggataagactcccttcctatcacatgtgcactgttctagcaaagagaatagacaaattcttttcagttgtgatgttgcccagggttttgttttgtttttttccctttaaggaaaagaatgtcagtggtgtatatcagaaaagactgtttacaccctttctatcccttgcctttcaaaccaggcaggattcagtacacttttaaactcccccagaatatgaaaaaagatcccttttcagctttccagaaattttttaaaatgtagaagaatgtaggaaattgccaaatcagttagttaatcagtgacaactgcagtcagtacacgaagagcacgcttcttacaagagcagctagctgtttgctgctttctcagcccctctgcatgcttgcccttgcctcacctctgcatcctcctccagaggttcagtgtcagccttataggagctggtgattgccacggggtccccagacagagcatggccacagggcagctccttccttcccttccttctgttccaccctcactttttgtaggcttgacatcacctggagcttctgtgtgtcaagtcagtagcttgaaataagtctagaataagtgggaaaatc

SEQ ID NO: 50722 - DNA, 801 bp, Homo sapiens
atattcacaaagacatctttccattataaattttgttgtttatgccctaggtctgtgaaagataaattaatgcctgtgtatacagattattcttagtgctattcaaaaatatatactgattatctaccagaattgcagctctgtttttggggtgcacagtagctgattttagagctataaagcatagtgcttgttttgatggacttattatcaattttggggaaataagacttgcatgtgaaaatacagaggagtgagagaccaggcatgattatgtgacaaatgtccagagagaggaaataacctgtagttgagagtgcttggaatttggctaggccttaccccggggaggtgaacccaggtcagcagttgagactgggggatggtttgctaaacaagggcacgggaagtcaagcttgctgcagggaataggttggaaagtatcagtcagggccagattgttgtgatcttggattcctttttaaggaatttggacttaaacggggagggagccagtgatattgattagacagtccacaggacagatggagaaggagaagatgaagtgtgaacctgttttctaggcctttgaggacagtttggaccagaaggatcaaagtgggagcagaaggcattgaagcagtgttgaaagtaaaagggtttagtcagtaaacaaagccactcagggcatctcagagcagcattttttttttttttttttttttttttagtggtgataattgtcttctatgctttttgtcagttcattaaaaaaaagaaaaaaaaagtattttaggccag

SEQ ID NO: 50723 - DNA, 874 bp, Homo sapiens
accctgaagtaaacgtgaggaatgtaggttcttgtgtgtaaagcatactgccttcactgattggactgagaaggacccttacaagtgacagttaaaaattatttccttgttaggttccctggaagcatgccagtgtggtccactgggatggctgggaatgtaacttatgtgaatgacatctaagttgtcaaggagcagttactgaagagttgtcctggagtaggaagccagcctctagaagcttactggactttttcttatttagtacacactcaggactttgcacctgtacccccaccagtcagaaacaaaatatttgtagtgtgcagctctgttccaaagaatttcagatatttttggctttggctttttgtttgttagagtagaactccctgatacctataacttcacagaatagccttaagctagacctgaaagggagggagagagagatgaagtgaatgaatatgttttggtttagttcggtttggttgtgtaactaacagtgatacctttggcagtgtgggttattatgtaattttattttatacatcaatggaaagatattgggaaggtaagtagatatcattttttaattgcgtaggctgttttacaactaaagtgttttattgatttttgtttttttactgagatctggtcttactgaatcaagtgttttaatgattttgagttttatttttatccgtaagggtattttctcctgatttatgtttgcttaaagcaggacctttatgtcaatagtatttggacaacattaagaatttgtttgcatcagtagaggaaattctgttatgttgttatttcacaaatactgctattgtttttttaaaagtctgtttatattaattcagac

SEQ ID NO: 50724 - DNA, 557 bp, Homo sapiens
aactcctgacctcaagtgatccaccgcctcagcctcccaaagtgctgggattataggtgtgagccactgtgcctggcctctgtgcgcttttcaaatattgtcagttagtgctcacaaaacccttatgtggtagatactattattgcctccacagcggaagttatggggtagagaaattaaccagcttgcacaatacccctctgccagtaaatggtagagctggactttgaagccaggaaatctggttccagagtcagtgctcttcccactttgctatactatgcactgagattcagctctcaaactaaatccagttctttgttcaggagtctttccagagaggaagaagagtagcatgtagtagaaagaactgacttcctgccttgattctgctgtccctagcattgagattttgagataggccttctaagcttcagtggggtgaaatgactaggtgcatagactctggagccagacccagctagcccacctgccaccaccctggcccttaccaactgggtgctcttggtcttttacttagcccattgagccacaga

SEQ ID NO: 50725 - DNA, 1448 bp, Homo sapiens
tcaggataaggcagctaaggcattgttttcctagctgtggttacacctaggccccaggcagcttctgaattagcagcctgcaacagattggaattcctgggggacttcacttaacccttagttctcccaaacttgttttcaatgcactgttgcgtgggggctcctcgttgcacccagctgtgcggcagatgtgctttttgtattctgggaagtagcaggagggtttggggtaggtcaaaaagttaatatgtcaatgttctgaagggagatgggagtagaaacttggtgatattaaagatgatttgaatttagattcttaaaaaaagaataaaagcatttttttatatatctgcaatagataacaattaaataagtcacacatgaatcatcaaaattagagtgagggcaacgacctattagatcatctagccagttccccagtgaacacagaattattccccacagtgttttcaggggtgctttgtacagtgtcttttgaaagacttgagcaattgaggccttcaattatttccttagggagacacttccccttataaaaggccatagtgttttcctcctttgcctgatagtcaagctaaaaaaataaatgtctgtatggtacatgcaaaatcatttgcacaatgacactgatcagaggtagaaattatacctataggtctcccagaaaacagtgagcatgcagttggcattcttccctgcactctcatttcaggtttttacacttgaatttgcatacttcatggaggtggcagtactgaaatatctccggcaagcctccctgtttgcaataccactattgcaaactggtcagaggtaacattgcacctcttaatttgaaactaggggggaaaagctgttttgaataaattctgttcagactgtccatgttgtcagggtagagaatactcagtcatccaggaagtagcaactgcttagaattcctctctctttggaacagactggtattgtctttcctgggttgtttgtattggagaggtcgccaattgtacacacacgtgacgggggctgtaggatagacagcccccagttttcagcctttgaaacctggagctgcagagccagtgcccgtaggtggggtgctcacaaggcttcctgctgagttgccatggcttgtgtcacagtgcccttaagggcagttttcagttcaaagaggtcagattttgcagagttatagacaatggaagggacaaattgtctcgatttccagaactcaagaacgctgtgacttgaacactcctatcctagtcccctccgccttcattagagtccaatgtgccaggcagtgagtttggaaatggcaaacaaggaatcaaatttcccaccttggaggacctcatgaggcaggcagggaggcgtggaaataattttgaagcattggagtgagggctatgagataggtaagcagg

SEQ ID NO: 50726 - DNA, 1038 bp, Homo sapiens
agttaaaatgtcaatgttctgaagggtgatgggagtagaaacttggtgatatgaaagacgatttgaatttagattcttaaaaaaagaataaaagcattcttttatatatctgcaatagataacaattaaataagtcacacatgaatcatcaaaattagagtgagggcaacgacctctggggcttgaaaggtggccataaccttccattatccattcattaccatagcaggtactgaaatttgaattttatataattttcacttgtcacaaaatagtcttcttgtggattttttcaaccattataaacatataaaaaccaatcttaattcatagctgtacaaaaacaggtggtaggctgggtttggccacaggctgtagtttgctaacccttgatttaggcaatagtcaggtcgcctctagctagaaaacttcttagatcattgatctcatcaaatacgtattggttttaaatgtaattattaggaacaaacttattttcaattggtaaggtgtattacactttgttgtctctcttttccatgcctccttcccactatgtaatagctatacctatcttgtagtcctatataccttatatgtgagggctaaatgacataacatagtgcctggtgcctagtcatatgagttttcacttcccttttcttctaaggttttgcttggaatctgccatcagcaatgccgaggcctggccttggtggaaatggaggtgctgcttaacttttcttccaaaacatagtacaaccctagtcatcctggtgagtaacaagattgctccataatccaacccagtgagtaatcccttttgctgatggtgagtggtatggagagaaaaacatgaaagtgcactgtggaaataatgccagtagctcccaccagaaatcccttaggctgtgcctattagagctagggtacacatctagaaaatgcccctttctttatcagtacccaacatataggacctgttaaccctgctcatgctttatgtacacattgaatgtttatctggctcttgatgcc

SEQ ID NO: 50727 - DNA, 1329 bp, Homo sapiens
cagtataaaagaaataaataaggaatacatgagatagatgccaaatttagttaatccaatttgaccctggaaagaacattctgaccttgagaaatacaggaccctggaaccattgagcaggactgttccacctgtggaaatgcatctgtcattctatagttgtttagaagatctttaatatgtgaatttctttattgatttttaaaaaaatgcttgtttcccaagcacgtttctaacttagagactattaggaggtgtgtctagatgttagaaaggtggacccacctccaccgggtgagtgaagagaggtggagcactatacttgcagagtgctgtatgggcctcagtgcagtgtctttctgcctgggaaagcttttctttcatggggctgtgtcatttatacatgcatgccctcatgcacaccttccacagggccagccagccctcctcttgcaggaatcttgctctcaactgaggctgggagactgatgtccgggtaggtgtgacatgagcttaggcagtaatttggctcttttaagagtgcagacagtctcctggagtcccgcagctcccatcactctgcagccaggagcagagtccagctgtcctcaggccccacggggacctcgctgtgtttacacgactcgtcatatggtaacctcttacagctcttgggcaggctgcactgttacctcatctgcagtcccgtgacctcatccatgtagaatgtagcgagtgcaagctgggagtggagcaggctcagcctctcacttcgagcccaggagaagctgtcctccacgtggactcagggaatccaccaggtggagatctgtccacttagtaattattcccagcaggggtccgattgggagccaagaagatgtgttttccaggggctggggctgggaggtgccggtgcagacatgtgtgtgcccacacctggaagttagttatctcatgtgatttttgtcgcctccaagaagggctactgactcccagcatctcagcctgtcaggtaggagcctccaagatggtggtgtgcaaacaggctgtgaaacgcaccacaaaagggactaggaaggcacagtctcagaacgggggtggaagcatcactaggtactgtttttattgtttatcactttctttgaattatatttgctctccccctgcaaaaaaatattgcatgtgatgactaggaatataaaataaattacctttgccataggctgctgggtttattagcctctttcaaactcttcacaatgtaaaggacaggctgacctacagtggcctcctccttccaacaggctctccctctctccccctcac

SEQ ID NO: 50728 - DNA, 593 bp, Homo sapiens
agacactaaccagcaaggaattatttctccatccaaaggatagggtgtgaggtgcccccagggaagactctggaagctcagtgaggttttgcagggagaagggagggagcatcaaggtttatgatgtctgagtgctgcacccagtcccaggaaagaagcatatccaggtgccttggcagagggaattggcacctttgctgtgttgtctgctgttacgtaattgtgcacacagtgtgaaatccgtggaagcacaatgaccatgagctgcagctggcagttcatctctgcctgaacaataaccagagacccccacttcctcctaaagcctggtaggacttttgggcaggtcttccttttcctggtagagctaccctcccacagcccccaccaacacctgccctgccctgaggttcagaacatgaacattttccagaagaaggattttcctttttggaaaggagaacttctggcttgacctgcattccagccagttgggttggctgcagccccagcctagcctgtaccctgaccctgcccccagcacctcctgggtccctccctcccctgctccttcctcaccaatgggaaagggt

SEQ ID NO: 50729 - DNA, 889 bp, Homo sapiens
aacacagcgctgcccacccatacacatgagttcatttgcaccctttgcccaagcgaagtcctctccaaatcctcttttccaaccctgaaagctattttacagaaggaagatttcggaccaactaagaatgttaaggctattttttcttctctcagaaagtcaattaactacacactgtgcatctatattggtccaaggattctgtcacgggaggaaatctctttaaaaggttcgactcagagacctcaggacacctccaacatggggctttcaatccgctgtgagtccccagcttctgtgcatgcccaatgtccacggcacacagctgtgccagaccctgctgtcgggataactggcaccagccacgggcaatagatgacctcaatctaccagcctgagagctccaccttgatcgccactggtcctcctctttgatctctttctctctttctgctcattgtttctctttttccctccaaatggactttgtccactctggttcccatccttgtgccagcccctccctttcctgtcatcttgactctgtgcagttggctccacactacgctcgttcaggtggcctttgcctgcctcataattctctgctgaaacagagtaataataaaaaacccaagaaaagaaaatatttaccagttctgaaatggcttgaattaatgaaataatgttttggggcatttagattgaacccgtgtaattgtaggttgcaaagtataatagtagctcatgcagggatatcattttgtgctattttactttcaggtttttgttaatccagtgggtttggtggaattagagggctgctgtgaaaaaaaaaaaaaaaaagcctgagcaacctgctggcgagagaacagctttgtcaaactagcag

SEQ ID NO: 50730 - DNA, 1807 bp, Homo sapiens
taaataaatacatttaaaaaaatccaagttagtgatgtctgacttcctctattcatgttattgctactcttgttgctttttggtttttgttttgcttcttgactgttgttgttttccaggaaagctgtcatttatcgtgagaacaagagcagccatgtgttgatttttctggattctttttggatactatcccagtgctaatgaaggcccttccaaagtgctaaagagctggtgccaaaatcagttacgctgaaaacaatagagagtggtacacagacagcatatatatacccgtatatgtatacgcacgcctcgatatctgaattaatacgtgtgtgtgcacctccctctgtttatgcaaatatacacacgcatctgtgcaaacacataatgtgtgcgccggagctacactgaggagaatgtgacggctgcattttaataaaaggactttttatagctgcttgcagaaaatttttctttgatcaagggatgagcaaagtttctaaatgttgcagcgcccgaatttgtcagtttggaagctactaaaaatgtactttcatcagttaaaaaatttagggaggaaaataaatattatagatagtatttgttttactaggagatgaggatactactacaagaagcacctggaaagtgcttagcataggcttggttgctgtgcttatattaacaaattctttaacatggatgtttgcgtactttagaggtagtttattagctgaaagaggggacattttgtagctgggctctctgtgccctcaatagattttccctgcctttctcccaatgtgtaattattctgtcctcaatttgtttacacagcttggagacggggacagagttctctggcgaccatgcagcggcgtgcaatcgccctaaagagaaacatttagaagcgataaaacctaaatgccctgccatgcaccattacatcccacagttattcaaatttagtaagttaaattaaataatatcaaataacttgatttcggggctttaaaaattcatctctatggtgcccagtagtcaatttcctttattattattgttcatcaagtaggatttatgttttttatgaatcaggatcctcgcctgcgccatccgcagcgctcgtggcgggcccggtgagtcgcagctcggagcgccatctaccggctgttttctgcacggccgccgggaggctgcgcgccggccccagggtgggggagaggcccagggagccaggacggcccagcgcgctggccctgaaaacatcagagacaggacagagctctcagccgctgtgctcacagcttctttggtctcggtcactgggggtccgcctgaagtcgcagggagaagccggagagactggctgctgaggctggaggagtttttcttctgctgcaaagctgacacgtgtggtggtggtgttccgcgcctcccgttcttctttataaaagcccagacatccaattaaactgctgtgtcccggcgtatctgggaagccattcctgcatgactcaaagcctttctctgctctcgcacattcctgttagacgaggacactggatgtttaggcacagtagctgctgatgccaaaaagtcccccagggaaagacaatgataaattttgtcatgtgttatgtttttaaaaagtattttacttccagggaaatcttttccctttaacatttctgaaaaggagttgaattctggtgtggtgggggcaatggcaagccattggttttcttagtggcaggtttccatttacgcttaatttgattgtagtttagcaaataaacaacca

SEQ ID NO: 50731 - DNA, 1663 bp, Homo sapiens
tgtggcattcagggttaactcagaccaacatttctgctagagcttttaattatgcataataaccatcacactttgttcttaggtatcactttcatccaaagctcaaagtgctcttcaagcattattagctcattaatccttgcaacactcctgggaggtggattggaggcaagatgattaacccatttaccagacagggacatagaggcacagaggatttcagcaacttccttagggttgtatgagtcagagttgggtagagaacagagcctactcatatccacccccagtctgcctctctgaaccttccttcctcctaggagcaaaacctagtaacatttgggtcttgggaattgtctctacctgttttctgcatatcatgtgcttcaatatactgaacagtttgccaaaaatgaagcaaaaaaaagtttttttattgaaatgtaaagcctatgctctttaaggggaaagagatttgtatattgatcactaaaacaaaatagggtaatcacttagagccttcctagtcctcagcatcttttaatatagacccttaaacttctcttacatagaatcaggaaattccatttggccaagcagaaatgaaacttgaacttcataagggttaggattcagttcataactgagaagagctaacatctgtcttttaagtttgacaaacaatgttttctccttggtttcacttgaatgcaggctagtttcacatggacgtcattgtcgttttagtggagtcagaggaggggaggggcagtggtgtgatctggtgggcatccaaaaggagagttaatgtttgcggagccactgaaggcctgggatggggtcaaagggctctggagagcggctggagaggtagagtagcaaattcaatgggaagccaggactcttcttggacctttgtcttttttttaatgattcatttatttatttaacaaatatttttcgagtatttattatatgacagtcattggctggatttaagtaattgtaaggtgaataagatgtaatactcatcttgcaggagtataaacaagtgaacaaatattatatacagtcatgagtgattgtggagatatttacaaagtgtagtcagggtgaatttgcttgaatggctgagagaaatctttctaaaagtatctctgaaagactacatagagggagggagggtccaaagaatgagagagtttggcgagcaggtctctgggactaaacttttgagggttatctgttgaaagtttattgtgattgacatcatcatttacagcagcagcaagtatttactgaacttctaatgtgggcaaactaatattcaggctactggggatataaacacacatcagaaatgattccaatcctcaggcaaattgtaatctgtttagaaatacagaatatacttaaaaatacaagtagcaatataatcggatatatagttacagctacttcggaacacagacaataagcacaatagaaatccaaagaaaagagggtgataaattagaatgctagaattagggacatttatgaaacatgggaaacaccatcttccacctcccttttcactctccaaaggtgttaatgccattgaattccactgcatgtgtgtggatgactgatgattaatctattttatccatgaccaaaggct

SEQ ID NO: 50732 - DNA, 5697 bp, Homo sapiens
attgtaataaaatattttaaaaacccacaatgcaaaaaaattctttatgaacaaaatatccaaattttatttatttactttgtaaagaaagcatgcttacatttgccttttattgctagattttttttattttgatagatttagggggtacaagtgcagttttgttacatggttatattgtttagtagcaaattctgggctttcagtgtaaccaccccttgaatggtgtacattgcacccaataggtaatttcttgcttcccctccccctcccacactcccaccttatggagtctccaatgtctattattccacattccatatccatgtgtacatattatttagctcccatttataagagagaacatgtaatatttgactttctgttcctaaaatatcaaatttttaaagaaggcaggatcagtattattgattttcctttggcttcaggctccaacttggctcagagcagcactgctcagaccaatcagatttctcagaggaagaaccttaagttggctgctggtcagttatagtacagtacataatactgcacatatatagactcttcagctgcatagtctttatggtcctcaagcatttccatgtacgttttcttatttaatgctcataaccatttggcagtttcagtatcactaagttactaatgacataaaaatagtttcaggaggagaagacactttctagtcaagaagcaatatgactcatcaatgggaaaacttggctcagactcagagcttccaattacaagctcatcccaaaggcatctgaagccagtcactcagcccctgagtggttagatgtttcaaaatatccatggagcttctgaaagactgcaagtgggtttcttggcggagaatgagcatgtgcatgcgcgccatgagtcacggtggaggggatcggcagtctgggcttagtgcttcttagaaagagcacagtcagcagggggagctgctcaatgttatccggtagaaccgtattaagcaccatgaaatgcttagcatcccctcttccgggcactgtgataacccagaagacctccatatttccagcacccttaggggagctggggcccacctggagagccctcgatggagactgtctagaaacatcttaatatcagcatcaataactaccagttgttaggtgcttttgtgccaagtgttttgtatacactatttctaaggcctgccgtagtcccacaaggatctatgtttgtacatgggtactatgtaacagtgatggaattattccctagtctgtctgcacataaggactatgctttcccactaagtcctacttatgatctcattccgaccctgcactcagtttccaaagtctttttcaatcaaaagctgaatcaccggtatgctgttaagtggcaaagtagcccaagggtctaaattcaagtttgtttctacattctttcttcaagtccctctcccagccaagaggtagagggtggctcaatgtaaacaacgcagccattccgtgtgtattcgaatgggactcaggcagtgatgcgtgtgcattagaagttgggtccaccagaagtcgagatgattctgaagtctcaacatccagggcctattcagtcctcgatgtgagtgggaagaaagaaagtggagagggacttgttggttcagtttgaaagtgaaaggggtgctgaccaattgacgaggcttgttacgctttaatggaatgaatccgagtctccattccttcatgcactctgtaatacacatactaaatggttacagtcatctgtccttgtgtgtttcctgaaggttccaaggttgcattcctgttctgaactcatgatctcagaatgacatctcacagcagttctctcacctccaaacccctcaggcattaaatgatgaaaaaatgaatgttactaggatatttgaccttctttccttcacgattgtgaacatgaagacactgtcatatttactttctcatgtagaaaaacaccccaaatctgtttgttcttagaggacaggtgcttttccacttgcccttgtttctgggaaggtgttcagctgtttcttgtcccctcacgccttgcagtaatttatttgatggatacgctgaagacagcagcttcttcaaatgttaccagtcactgctgacctgtggcagtctctaaagggctaacattgcaaaagcccccacagctctgtggtgtgatttggcagtgggagatgagcattaagcaggttccttcttctgattaaaaccccgaggccgtaggtgggatataactcttcaaactataaataagcccactgattgaggtttgcctttggcttttgcaagagtgttaaagagctttttacaagtagcgggaggtctgtgcctcattcggtttgattgtcctcagttataagaacttgtagcatgaaaggggaagatttctaatgtatccatggtgaatattggtgaggaaagaagggaggaggcaagccagggagatgttaggcttctcaccagggtcatgaggtaaccctgcccccaaagcctattaagagaaacccaagaaaaggtttaactgtctgcccttcccaccaaaacatttcctgaatctttctggtgatgatcaatttttcttttgagtttgagaatgagtaaacataaactgaagagaaggacagttattacaaccataaaagcaaacaatattgagtgcttactgaggcagtaatgctcttacgtaagcactactaatagccatattttgcagatgatgaaattgaggctcagagaggttaggtgatctgtccaaggtcatacagctggcaagtggctaaacctggcaagatctcagacctaatttctcagttaaaacactgtgctgcacagcttatcacttatcactggaactcattcaccaaatctgggggctgcaaaatcagacattaacgacaggtctccatgagctatcagtaagcaagacttcacttgtcacttgaggtctcaaaatactttgaaaggacctcatagcccaaaagacaaatcctgttgccacatacttcaatctcacagaaacctagcgaaccaaatgttcaaaatccttacccaatgtctgccctaattatctgacaataggaacagtgatgacaaaaacaactttgatttttcttttaattccagcccagcaaaggacactggatattgcttgaaatgttttacaaaatttggtcctaatctaagcctgatttaagatagcgattgaaggcatcatttctgccttgcattgaaatgagtgttcatatagagactttctgttggcaaacagaatctcagctcagctgctaccagtgttgtgaccttggcaagatttgtactccttttacccttgtttttctcctttgtttggtaataatatgtattctgtagaactgtgaggacgaaatgaggtactagagaagaagaggtcagacaggcagatagtcatttcctttcttccataagtgaggtggttttcctattttgacctaatccagagcctaaaatgctcaagatatgatttctcattcagtgtaaagagctgataaaatacaatatgtctctgctgtgtgcttctgaaaagctgttgattgatgagggatgaagttaggagagtttataatgtgccttgattccggcttcctcgacccactgcatgtgtgtatggtgtgccatgtgtgtcaaccaaatagttctttgaatatttcttttattctcccttctccctctaacaatctccttgtcagatatactctaccactcactctctaattccacttcatccagggctcagctgctttctgcccaccatcaacgtgcccttacgattgcactcaggaccttacaaacttgtctgttagaagccatctttcccacagattggatgggagagcagttgggtctcggctcagagataacacaacagtgtacatccctgcgtgcccgggtggctgcccaccaggaagatgtcagccattacagggctccgaaaatgtcgttacaaaggcagtgtgggcttgcagtgagggggctgtactgacctggagaacaaggttttattgacagcatatctttccaggccagctgctcctctgaaattctcacttataaactcagaagttaaaaagacataacattcattagctcatagataaaaaagtctcctctgatggctagaagtccaagggcctaagaataacttcttccttctcaaagcaagtcccagtgaaggcagccaatgctaagctcactcaattagttgatttgaaattgtgctgcaatccaggagcatgacctatgtttgctcttccaaaggtcagtgtcagtaaaagagggcatgtagaaagggcgttttaaaaacacaatgttgcctgtatgctacattcactgttggattttgtaataagcatagctggcttcctgaatgaatgcattgcaagttatgaggccttttcttgcactgaagctcttctgggctattcattgctttccccagttctcaacaagccaggaaagcaagttttgtccccataaggaagatactgtagagccgagaaggaaagcccctggcacaagcccaaactccaacccccaattcctgtgcccagagcctcacctctataaccacctgccagctcccccgccctttcgatatggttcccagataatcactcagaacagtgatatacagaaccttaaacagccactgggaaagattaagtgcccatgcttcgctccagttgtaaatcaagctccaaagccatttattgtgagtgttctataaagcagtagaagttattgccactatcctgcaaaatataacgtcagataagaaagtaaagacagggtaaattttgttgtgaaggttttaaagtgatgtgttgttttttctttgcacattctttctgtttctcaccatttttctcttctctttgctactatttcttccctatctccaatagtccctgataagtatctccagatctaatttcaaatatggctttcccataaataacagcagtgcctttctggattacagattgttaatgttaataatgctcccaggcattgagcacctccctgagcatgtggtttcatttaatcctcaggacaatttatgaaggagatgttgttattctcattttaaatacagggtatttaatctcgacaaaatcgcaaagctcgttagtgctttgatctctctctccttcttcatgctgcctaattatgtttggggcctgctgtcagggattgtgccacttaatctctgatgactcacaatttgttgcaaagttcttactaaagaatcttcatggcttcctaataaaattggttcagtctctttgccatacattttggcacataaaaccttaatcattcagcattactttccttatccaaaggtcatcttccacttgagtcaaacaattctccccactctccccttctgctcctcctgcatcacagctcttcccaccttcgcgtatacagttcctcccattcagtcttcattcttataatgtggggaaaatggccctacatgagaagaggcctcaaacccagcggggaagctgggacctcagaggaatcatcctgcaggtcttgtctagctttaaggagaagtaagagtgagcaggtgaagggaagggagtgtgagggagactgc

SEQ ID NO: 50733 - DNA, 771 bp, Homo sapiens
aactaagctgaatcttgactgacaatttttatcctctttgtttcctggaggcccctccctggtgcaaaatcatctgcatttcaacctgagctcagtctgatatcccagccatataagtaaaagtactaaaaaaaaaaaaaaaaaaaaaaaggtagttactatgtgctatttcagcctcattcagctcatggacttaccaaataaacattcatgtctcagcactgaaagagaaactcacagtctgatgacagtggagccaccgcttatcggaattccagaaactaccaggggcagaaaagcacatgttagcttcccttttgtggccagtgagctgaatggagcgataccacaccccacgaggtgctgccctctgcctgtgacacagcagcacagccacccaggccaaacagtctgaggaaaagcagaggtggagtgacctcgaagaatcatgcagaggtcttctaatgtgggcagaatcccaggagagagcaatggccagcctatcctggccatgaccactcaacaaatatttactgagcattttctctgggctgagatcacaggctcctgtgtttcatggaatcaaaagaccagtgtcagcaaagcacctccatgcaaaaagtgacaatattacaccatctgtgcagatcacaaacataacattttagttattaattctgcgctgacttcctaaattggcatgacatatgccatagaagacctacttctgattcttatggccaaataccttcatccttatgttctgtaaat

SEQ ID NO: 50734 - DNA, 560 bp, Homo sapiens
taaggaagaattttctagctgagttgactgtttaggggcatggaggagcaggttcctcaagttagttatgttcaagaagaggctgcacaactccttactgaagatttcctatcaggttggtctagatgagtcactgtttccctctaactctgtggctgtggttctcatgccatgttgtgaaataaagtgaagtcatatgacagaaggtaaatggagtttaaggtctgtaaaagtagatggccatcagtattttccttttccacagggtccgtaggtcaaagcaggaaggcagctgtccaaggtgctggagggaggttggcctgtgtctctggttgtgctctcttggttgtcttcatgcttgctgtttgttttaatgcctctggattttctgctttcctgttcctcgtacaaacctacacttctcccttccccacatgcacactgggccttaaactaaaacaaagagaaaaatgcactggaaatgtgttagggggctggggctaaactacaacctagagcttccttcctctgccctatcccagcaataagtgagtccatga

SEQ ID NO: 50735 - DNA, 5245 bp, Homo sapiens
ctatgttttcatcttagaatgagtaatggaggattaagcaattggctctgatggtctttggctaaagaaagaaaattttgctagggcctcttcattcaagggctccacaatgcaatcagcagtgtattgaatccctcagttacttagtaatctaagagacactcaaagtagaaagaaaaaggaagctaaactaaactcagaagtgtgtttctaaatgacaaatactcatcaaatgaagctgttaatgttttacaggcagtacaggaatatatttcattctaattaagcctaaacaaaaaggctgctcaatctactgagacaccttgagagagttaaaaagtagctaagagtttttaagtgcttatctatcaatagttttgagtatatacagacggattaaataataattaaaacctgctgttacataaccccaagcttcaaactaaaagggggatatattctacagtgacacctagtggcaaaagttaatgtagtagcaggacacccagacaaaataaacagggagatggaaagctgctaggagatacagggagttaaggggtgatactcaaaagggaaaaactaaacaaacaaacagaaaacattacacatacgagtgtctacaaaataagcccaaaaggacatcatgatccttctttgtcaaactattttcaaatcaataaatttgaaaaaggcttcccctgggcccaactggccatgcaagtccagttctatatgcaaaataaaggtaggaagtctaatttattcatgtttcttttatattataaagagtaaaactgaaaaaaaagtaaaattgaactctgtagaaaaccattttatcatttttcagcttaagctgaagaaaataaaaagcagacacttgctttaaaaatctgtgatataaattccccaaattccagcttccaaacatcacttttcagcaaaaaaaccaccaagataaagtttggccaggaaaaaaaaaagaaatcaccttttccctaaaatgcatgtttcaaatgactgggttcttttttccccatacgtttacacaacaacttaagaaataataatgtttaatgtgaccaatgccgtcattttctgactctcaatgtaagacatatcaaaaaacgtactatttgaacacatatacttcttctcaaactaaaatttcaaatagtgtttcaaatagaatttttgtcaagggaaatgtaattggtgataggacaaaagcatagttttctccaataattaaatgtagtactcatggagacagccagaagaaaacttgataatctagttcaactccaattacatactagagaacctaaaattcaagcatggcaaaatgaataacaaaacctgggttcttagtctcggttcttccagtaattagttgagtttccatgaactaaacaaccttcaatgaactcggcaacttctctgggcattaatttcctcatctgtatgatttgagcaggaaactaaatgggtctcacagtatgacactgctaaaaagtctttgattttcccagtagaaggaaatggttcgcacaacgtccgtactttaatgaccaggtaaacagcattaaaagaaaagccggctttatctttcgagtacagcctactatacacgacactgtactttaactgtttagggtgatggaaggaaatggtttccatacccagtgccttctatctggcacacagtaagaactcagtatctactggagaaaaaaaagaaaaggttgcggatatgcggataaagaatactcattacgtcacatgcagggttccaatatcaacttttgttttcgtatcacgggcattcctcccttttacatattcttttacatactatgtctgtttcatgactattagagaatcaacgtgtaaaatgcttaaaaggctgtagatcctcaaatatgggcagagtttgttctaaaatgcctgactatgaaagtcaggagaagttaatttaagttactgcattttctaaacctatctcttgcctgttaaaatgcttcaaatagttatggggtaggtctagaaacgtgagacacatttcccagtattagttctcaccaataagaggccatataaagtgacttccctcagatgcaatcagccctctcctcataaacacaaaaatgaaatggaacgaagacatgcttctctggcaaatagctacagaaaccttttgaaaacaactaacattaaagttgttcatcagctttctctgcttagtgcccttagaggcacaatgagaagaacccattctcatttagggatgttaaaaaagagtagcctcagtcggctgaggcaattaatctatccctctgcaggtttaagtaagtgacatttaagaacaagtgaaaaaggaacacaaactttcacttatgtcaaaggtgaattaatatgcttgcattgaacttcaaactgtgtctacatctttacttttagaatacaaatattagtccttagaatgtaaatttgtgcaatggatttaatgcactactttccccatttaaatccattcattcattcactactcaaatatttattgagcacctattatgggaaaggaacattctaggagctggggatacagagagaatgagccaaagacaacacacatgaaagtaataagacaagttcagatagtgacaagtgctataaagaaaatacttctttgactatagctgattcattttcttggtatattatgaatgcatgatctgaagatctcagaaaacaaagagtctaaatcacttcaagtgaagtttacagctcacattccatacacatgtgtattgcagtttcaatatcccaaatatgagtcaaaggaagtataaaagaaaccaagaatcactgaaatatgagacgaaacagatttaaaaatctgttctctctgctggatatgcacacggacgaggagaaaggtgaatatccaatcgatttttattttaagtaaaagtggtaaaaatacagacgctcgttcagtatttcatgacattctattttaaaggcaactgcaacgcatattaagaaagctacatacaagcaaaaatatttaaaataatttctgagagcattcaaatcactcccaacttcttccctccccctgccccccggcgcccccattttcacctcctttgagttgctctgaaacgctgctggttaggcaggaactcactttccctgactttggctcattttcaactccccaaaacacgcaaggcaaacgataaattgttctcttactcccatgttcaattccacggaaagccaagaaacagtcgttcagcaacctctgtctcggctgcgccctgcaggtgaaggaaccgctgggaaggggctccccgagactagcatcccgagggctcggaccccggtccgcctggcccctcgcccgcccgccaggcccgccgaatgcggcctccgccccgcgcgcctaaaggaggagcgtcgcgggggatggaggcggcgcgcggtgggacctggggagatgcacccgcagcgtccgccgcgccagccggctccctaccccgaggcgaggccccagatccccgccccgcagggcctctgacctctccgggccccggggctgctgctgcccgcactcgtgctaccgctgccggagccgctgctgctgctgttgccgctgctcttggcattcttacgctgggccattgcacggtccgcgggggctggtgagggctggcggacctccttcagtgcgcgggggtacacacgcgacgcgggaaccgctggcggcggcgggccgctggagcgggttcgggccgctgctcctgcagcagaccctgtgcctcagcaccgcctgcagcacctgggaagacttcacccgcctgccggctgcgcgcgcccggcctcgcgtgtacgaacctgtgactccctcccggggcgagagcgcgcggctcgccgcccgacggccacgccccttcccggcctcgccccgcccccggaaggctgagtgacggcgcctgggacccaatcgcaagggcccttacgaggcggcggtaccctgccgcgctccccgcccctgctcacttagggctgttcgggcgctacgcagctgcctgtgagcgcgagcctctttcggctttccagtttgtctcggtcctttggaacgtggcaaacgtggaagccgagagggctctcgcgagcgttggcagaccccgctccatagggatgggacagggcgcggtgcggaataggtggacacgtgggccgcccgtgggcggagtgcgccgcttctaggcctttcactgtggattttgtcccctttccgtatacaaggaaaggaaggagtgcagtctcgcttcttgcgaaagagatccctatttcttgtcctgattaatactaagacatttctggaatggtgatattaggactagttcaatgcttaaaccgtagtagttcatccatttggtgctgaagcaggaatttagttcgtttgtgccatcagtattttcagatactcttagttaaggaatgaaaatgcaaatgtgacacaaaaagttcattttcttaccctggatggcaccctctgtctgaaatccctggctgctttgctaacgcctgggcctgtgctgcctgagaattcccaacagagtattaaaatgtcttggcacgtggttgaaccagacaaggacttgagatcagcgacgtctttatcatctttgtgtcaccattgctaacaccatgcccaatgtgtaacaggcaagcaagaaatgcttagtgatttgatacatttctgtcaattgctgaacccacagctcttgatcatgtttcgtagcaacccctgggagtgtctcaggagggctcagggaccagagagagcagttgcattgtggcatctggtttcattcctcttttccagccccacaaacccacccacccgcgccttcagaagcactcccgcctccccccggccccatgccttttcacctgtggatggttggatgctgcttgaccctgccctgatgatgcacagaaaccccccaaaggtcatgttgcagaataaagagaatgcctttctttaccttttgtcaaatagtgttaggctattatcaagagacggtgggaggggagagttcacagagtttttattgaagtagctctctcagcttttatcttgtggcatctccttctgcatccatatatcctttctcccattcagggcccccttacaaccctctattatattatctcaatgaaggaggtg

SEQ ID NO: 50736 - DNA, 1923 bp, Homo sapiens
tcaatgtcttgttaacagaagggtaacaagtagtacttttttacaagtagtactcgaccgaaaaggattattttcttaaaaataggtagagatagcccatttatcatttatcccatcatacaaatgcaggcagccgtgaatagctgaagtaagaaatcaaaaagcaagcataggaagaaaatgaacattgtatggatctgtgcagtaatcacttagggaatatggtagcttgacgtagataaagaactacatttaaggaatacctacttaaaatgtgaaacctaaccaatgttaaacagataggctgccaactctctgcaattatgatagcttcacaaaatcgatgtgacttcaaatcagaacagcataagacagagaagatcatctatgaatgacataaaactaggaggggagacagcagaaaaaaaaagatgtgttccattagctaagtttgactgggtctttttgttgttttctatttccaagttaggagaggttggatctaatgccagaattatggtcaatcttatttgtagttggttggacatgtgtgcatgaacaataagaacttggtaaatttcacataagttgttgtacactgtcagtttatatttcatctaatccttaaaaaaaggaagttaagtcttgagttaaaaggatcatttcaagtattaaagatctccaagtggactcattaggctcaaattcaggtctgctcaaattcaaggttagactcaaattagactcaaattcaaggttctgcttactgagaaagagcagacattaaaaacagcaaatctcactgaatgatgcttattcaagtctaattcctgcttgcgcatgcaggctgactcataacacaggcggtcataggggaggagcggtcatcactaagcactactatgtgctcctcatgcctcatcaacctttgccgccaagcaccaaggaaaggtgtgtgggatgcctctgccccctgccccttctgctcttttctaatggcttttctccttcaaactgcctttgatggaaacctcatttgacacatgttgggcacaaagaaaaggagagaattcagagtcacctgtaggtctcttaccctctggccatttttctctgacctgtcatcaatgaaggcctgggagatactgtggactcagaattaaaacattttccttggttgaggctaaaaggtgggttaaaagtcctgtaattcttgagaagaatccccaccaatcaacagaaaatcctccttcctcctgtccccactctcaggactcccagggaaaatgcaagttgttggggtagaaagatggcatgttcagcatgactggcaaaaatttggcctgcctctggctctgatcctgcagaataacaattctgtaataagtaaggcaccaagccagagatattggccaaaggaatttacaactgggagtagggggtggggtgacattaccaataggcaacagtccaaggcctgcaaaggacgctgtactgacagaattccatctctctctgacccactgttttctgcaaggcaagcacagcaaccatttcagaagccctcactccagactgggcatacctcttttcagttattctagcaggagtggagaagaggttcttgcagttgctaccatctgcaggtagtaatcagaatttaagatagttaaggagagaattgctatatggcagttgtacctgacagcaataacataacttaagcataccttgagaataaccctatgatctaaaaagaatgtgtgttcagagttccaaactaaggaatctgggagtggccaacctgaaaattcatttcttatctatgagcaaaatctaaacctctagcccattctgtggaaggcaggctgtagaggggatggaggccctttgttttgggttaaatgaaggttgccaagtaga

SEQ ID NO: 50737 - DNA, 2496 bp, Homo sapiens
attgcttgagtggaattgctgggccaaaggtatttgcttagttttacataaagctgccaaacttttccaaagtggttgcatcattttattatatccaaagtggctgtaccatcttatatttccatcaacagttgctctatactcagattagaatttgatgtcattactctttttcattttagccactttagtgtgtagtgatttctccttgtggtattaatttccacttccctgatgactaacgatgttaagaattgttaacacacttattggtaatttgtttgtcttcctttgtgaagtgtctattcaaatattctgcccattttgttttaagctggactgtttgtatagttaatatccttgcttgcaggacacgggggaatgaggcagccacatagtctgatggaaaggtaaagagaatgaaagagagggagacaggtatctttgacagcaagtcccaaagtcgctcagctatcactctcctcttgtccatggactgtattcatgtgggcagttgctggtttgctgtttgtctggctgaacgcagacatagcgcctgctcatgatgtgaagatttggctcacacaaacacagtggtgaatgtcttagttttgagttctccccaaagcaaactgagaccagaattcagtgcagggagttcatctgggaggtgatctcaggaagccagggtgaggtagcagaagcatgagtcacaaaaggaggaaaaatcaaatgatgtgttatcaaggtcgctgctgtagacagcaaggttccattctggcaggacttctacaaaatgtacatagtgcccccaggaattgttcatgacaggacattcatcctctggctgctgtggcacaggctcccctccccttccaggtcttttgcagggtgggcagctactgtggcgtctgagaaggccaggaccagaagcgcatgtgagctctcaccgagcgtgggccaggcaatgtgactggaagcaccaaaagggctttctagagtgagagtgcttattgctagagtgagagtgcttactgaggatttcccacgggagatcgtagagggtgtcccatgaccccctgtatgtgaacaacttcacaatcactgcagctttcccgcaaagtcacctcctggcttagtcactgctgctcttccgcaaagtcacctcctgaattagtcactgctgctctcccgcaaagtcacttcctggcttagtcactgctgctctcctgtaaagtcacctcctggctttggcaaccagggctccttttttagcctccacccccagctcctccctggaaccctctctcccgccttttggattctacaccaaagtcaaattctcccaactcctgggaagagcggcctctttcctggcttcaagtctggcttctagcggtcacaggcctgaggctcagctcctaccccaaagtaggtttatccacacagctgcctaaaaaaggtagtgacaaataacatttcttctcattattgcacaagttttccacaagcccgtcctgaccatatcttggatggattcttcagtccacttgggcttttattcttgctagtcaccatccggcctattctgtgctccactgaaatacatctgttatcctgttatggacaggagctcttgtgtttttcccaagacaataattaggtcattcaatggtgaaattcctgctaagagcggtggcccaatgacagtcctggcgagtcaatctgctcgtatctgcccgtgccatctctgtgccagcctccccactccttccctccacttcccctgtacttgcacttcttcctgcactaggtcaaaattttgaattttgtttttttttcaatgtctctttaagtctgccttgatccaggaattctcttgtgctttgttcatatggctagcagcaaacctccctatatttaactgaatatatgtcatttaaaaagcatcactgagtataattatcatggtgcctctccctttttctttctgctgacatctgtttcaaatcttcatcactcctaactatagatttctctttaagatattgcttcaatgtggctttcctattctcggaacaaatagaatggaactcactgcattcttttccagctcttttgggtgatgtaggacaaggctgcaggaactcagcttttccagaagtagagcatggagccatattagctggagggttgctgaatggttccaggttcaaacatcagcatagcaaagtcattatgagcacaaactcctgtgacttactcagctgtgtgactcagggcaagcaacataatattgctgtagcttggttcattcttttttacagtggtagatacaataaagtaatacgcatctcacagggtcgagtgggtgctaaaagagttagtagatatcaggcactccagaggttgctttatacagcaggcactcaacctttgtttattactatcatgttgctccaccagagagtcacagatttcatctctggggtcact

SEQ ID NO: 50738 - DNA, 2594 bp, Homo sapiens
taagagacctaaagaaaatgatgttacgggtttctaataccaaagatgacgtaataatctcctaatggcctcccctcctaatgcccccacattgggggttaagatttcagcatatacatttttgtctaatacaaacattcagtctgtaacaacctctaaggcatttcatctgtcattcatagacggctctgctgcagtgtctttgggcatggaaaggccgttgaagttgtttattctcatctccctggcacttcattgttagaaaattagaacttggaagctcagagaggtgacgtgattagcctaaggtcacaaagctatttcataagaaggatagggctaaaactgtttagtcactttatactcttaccactgagttcctttgacattggaggggagaaaattttactcataaaactcagtcttggtgaacattgaaaataatacttttagagggaaagggcctttaaatcaggcttattacactgtttgtggtcaagtaatataggaaggaagtaggtttttttagatgtctgaaaatttagtggtgatcagctataatatagatacattgagattttactttctaacattctaccttcatgtcttcaacttttataaacccaataaaataaatgaacaatggaggctacccatttaagctgggtttttttcaaccccatttgaaatttaagctgggttttcttcaaccccatttgaaaatcttagaagaaatatcaacagggtgattccataaatactcagttttaccttcaaaatggagaattaattcaaacaaattgtgtaaacgtgtttctttttgagagtttcatattgattaattcatgaaatggttataaacaaaccttttttttagcagtttgtgctgcttttatgaatgctatttcatttcataatgcttaaaataataaatttatgaggcattagctctgaaggccatgttaataattccctgtgttaaattcctgactttattgatgaggaaagaggatcagagaaagtgaaggactcacctatagttaccagtgcataaatggaagagctatgtttgtatccaggctttacttcaaatctggccctctgtccattgcatcagaacccatgaactgacccaattcaaacaactctcatttagttccatatggtgttacatgtgatctattttttaagcagactatgatacaataaaaatgctgattccaaataatatgtcttacaaagtagcatcctttccagaagagaatgcctctctctccacagtatcaaacagcttctggtggagcttccacagtaagtgtgacctctggagacacaacatagagtctgctggctagagaagatataggatcctaaaactcttattatctgtgactgtgagagacttgaaacttctccttcacctaagattcttttccaacctcgtaagtacttgactaagatatatttgtgtgatgactttgtccagctgaagtaatctaaaaaccttgatgggctggaaatggtgaatttttcttctgttggtgactaatgcagtgagcaggcagtttttctagttcttttaaggcagcatcagcctaaaaggtcacggacaggcattagcaatgcgagagtacacagaagttaatttcaaaacaaataaagtggatggagcaattcaacaactgtgcattctgaaatgcaagtaaatgacttatatgctcaagtgatttgaagcataagtattgatgacttgtgtggcttttaaccatatctgggaaactctcatgtgagtatttaatccattcatacacagcaattatcttctataataccctaatgagtgactaggcagtgaagtgtagtggaaagaatgcttttcttggtttaagagttaaatattaatagttgaaaaaagacttttcctgagagtcacctggtgggaagggcagatggattagggtttgtttatctgctcccctttttagttctgttaactttgtcagtaaatacttcggagcctcaatttgcttatctgtaaaatggaaatctctattttctcacatgattgttgggaaaataaaatgtacttaagtgtacattgcacatagccatatatttttaaatataaaaggggtcttcaaaaagtttgtggaatatgctataatgaacattatgcccagagtttaaaactgttttgcaccaaaatgaacttgaactaacttgttatagcatatccgaacaggatatagtttgggacactaagaaagataaaacatcagtttgaaaagaacccctatcagagcaagatgaattttgctaaaattaaagcaagaacaaacattatgcttataaagattggaaagaagaatggtgaaatcatagttgctttgtgaaaagtttatggggacaatgtccccccaaaattagcaatttacaaatgggaaactcatcttaataacggacaagataatgttgaaaatgaagtctgcagcagcagaccatccacatcaatttgtgaggaaaaaattaatcttgtttctgctctaattgaagaagactgacaattaacagcacaaacaatagacaacaccata

SEQ ID NO: 50739 - DNA, 1350 bp, Homo sapiens
ggctcactgcaacctctgcctcccaggttcaatcaattctcctgcctcagcctcctgagtagctggggtaacaggcgtgcaccaccacaccgagctaacttttgtattttttgtagagacagggtttcgccatgttggccaggctggtctggaactcctgacctcaagtgatctgtccacctcggcccctaaaactgttgggattacaggcgtgagtcactgcacccagcctagaagttctattaatattttaatgtgaaaaatttccttggttgctttagaatcaaggttggtgcttatttttcaagcaagcagtcgtggttgtttacagagcaaatgtggattacaggtaagcagaatggaacattttggaatgattcccagctaaggtacatgaaaatgatgtttaaacaagccctgctatttcccaagagatattgcttaaaagttaagacaaacaatctagtaacaggctagatatgtgttctatcttagaaaggcactacactgatcaaaaagtacacttttaaaatttgtacccgtgtgtatgcacacatttccactccacatcttccagctgtaatacatcctgaatatagtaaaagctaatgctccatttagctgttactggtttcagcagtttgagggctattactgtttaacccgagaaagaggttatacagtaatatgtatcatacatagggcttaattgtaaatacattctaatttcttttctaacatatgtgtttttattcaaagttgtacatcttttacctctgatttgtttgggtcaccttaacaaatgaattacagaaaaaaatattaaaaagtgtgcactgttagacttcaaaccactttaccactatttggccttctgtcattcaggatgcagaaggcagggtcagcagctttcctaagctgacaaccatgagtgccaacaaagctctacaaagtaatcagtaaaacacacccaattaccagaccacagagaagggactttcctatgcttatcaaataaacagtgctcaatcctcttggacttccctgagaatcagagctacttttcagcaaactgacagttctcaaaggtaatctgtaaattccagcttctgagaaaatgaccatttctgacatcaaacgttggaatgctgaagttaagaaaagcagtgaaaatggaagcaatggttgaaatggaccactaagacccacgaatgatggaagtgtcaagtaaaaagttggcaatattgagtaaaagcctgggctgaataatgcagcatcaactcagtgctacacgagggacactagaaatctgcagtgatgcttgtgatgagctgggtctgcgttccttct

SEQ ID NO: 50740 - DNA, 985 bp, Homo sapiens
catacttttacagagaacaccaaaatttagagccaaggaaatatgtttatactggcaccatccctgtggcttatccctgcaggtgtcctcataaggattgttatttatttaatattataatgtcaaaatttaaactacaaggagatgtgcactctcctagaagcacttagatttggtgaatattgagccacaccctttcctttgttgttggcacagaggcacgatatctctgtaggaagataattgccaatgagtgagtcattttttttctaggaaaacttacagcctccatcactcttcaggagagtggcagtcaaggagtaagactcaaggaaaggtcagtgcttggttgagagcctaaatctttaccttgggttgcaagtgaacatttgggaagagcccatggcctggagagagagctagtggccaggaagagcaaacaaatggattgccactgccacctgccacattgggctgccactggcagagctgctgagtctgcaggtgcagtgattatgctgtgaaagattcaaataggacaaccctatgtagcagtggccagggggcaggtgagtggtgtaactctggaaggggttcttgttattttcagctgggattccaacaagataatgactgttggtactaaaaagagcttgaaacaattatctttccagagttttcctagaaaactaatgagcacacaatgtcaccatagaaaactctagacccaggtcaaaaggcatttggcttgtaactatcactacagaaccaagtaaacagtcaagaataataaatgcctggaataataaatagcagcataatcaattggtaaaaagcttcctgaaaaatcactgttgagcatttgcagatataaaggttaagaatttagtacaaataatagtaaagtccccaagggaacatagaaagaggggatagctttgtgttcaagatcatgtttcacaattatttttccactaggtgagtt

SEQ ID NO: 50741 - DNA, 789 bp, Homo sapiens
agatagtgccattgcattccagcctgggcaacaagagctaaactccatctcaaaaaaaaaaatcatttctctcaagttcaatgttccacagatctctagggcaggggcaaaatgccaccagtctctttgctaaagcatagcaagaatcacctttgctccaattcccaatgagttactcatctccatctgagattacctcagcctggattttttggtcagaaccattcaacaagtttctaggaagctccaaatttttccatatcttcctgtctttttgtgagcccttcaaactgttccaacctctgcctgttacccagttccaaagttgcttccacattttggggtatcttaatagcaataccccattctactcgtactaatttagtgtattagttcattttcttactactatgaagaaatatctgagacagggtaatttctaaagaaaacgaggtttaatggagtcatagttccacatgactgtggaggcctcacaatcatggcagaaggcaaaggaggagcaaagtcgtgtcttacatggtagcaggcaagagagcatgtgcagaggaactgccctttgtaaaaccactggatctcataagacttattaactatcatgagaacagcatgggaaaacccacccctatgattcaattatgtctccctgggtccctctcatgatgtatgaggattttgggaggtaaaattcaagatgagatttgagtgaatacacagctaaatcatatcacataatatataaaggacacatcattgaaggcttaaagcata

SEQ ID NO: 50742 - DNA, 1137 bp, Homo sapiens
aaatactcataatttaattacaatttcctagagtattcagtaaaataacatgccgtacagatttgtatcctaggagcagcggactatactgtatactctagatgtgcagcaggctataccatctaggtttgtgtaagtacactctgtgatgtccttacagcgaaactgtctaataacacatttctcagaacatatctcattgttaaacaaagcatgattttattgtgcttgagagagctgaggaatgcttgaccttgggccataataacacagtgagcaagtttctcaatattgaccatgtttctcaatattctttaatgacttacctaaataaatacaaaactttaaagcagttcagtcaaaagtgaatgactaggcaaacttgtaaaagtgagtaattaaataacccactgggtttcactgttgtataccagaaatcaacatgtttaggactggaatatgtttttaggagcaggagaaggaaaatggttaggtctacactatagggcgcacagcatgggacactgtggggccctccaaggtacctcagtggggcatctctggatttcttatgaccatgaagacaccagggctctgaatattgaaagaggacaagggagtaatgaacccatagcaagtgtgtatcgcgggtacaggtacgtcagctctcctttggcgtgtacagtggagcaagggtaagaagcactgagttctgactgtgatgccagtagcactacctgcagccaggttcttccaagcctcaggaagaggaggatgaattagaaatacagctgtcttatccagccttattattttacagatatttagcatagccaaaaggaattcttactgtgttgctttggtcctcaaggatgatgatgatctagtcttatattaacaataattacttttatataatattttctataatgtagagctgaagacaagactgtttatgttaatggcattgataaaaccactactctagaatcctggtcatgcatgtgtatgaaaaacaaggaaagatggaaaaaagaagtaaaaagttcaccaggctaagtccaccccccaccaaaatatatatatatatatattagcaaatataccttggccaagaaagattttaaggcaagtaat

SEQ ID NO: 50743 - DNA, 1433 bp, Homo sapiens
ctgtttatctgctactcaagaaagcaaatcaggatgcaaggcgtagtggcatttcttgcaggataacttgacatttctttaatttaaaaggcaaaaagttactctaaccccactgaggctgtctgtagttttacttcaaattatttttgacaaatctcactgacacattgctcccttctgcttttcattatgcttgttattgaatgaatctttttttcctcctctgctccactcaacaacaacaaaaaattcagacattgaaatcctaacaacgaacgtgatagtgctaagggagcaggcctttggaaggtgattgggacatgagggtggagccctcctgaatgggattagtgccttgtaaaagatatccagagagctagggtgccccttcccccttccaccatatgagcttacagtgagaaggtgggaggacaaccatctgagaggcaagcagcaggccctcaccagacactgaatctgtcagtgccatgatcttggacagctcagcctccagaacatgagaaataaatatttgttgtttataagccacccagtacatggtattctgttatagaagccaaacagactaaggcaatactaagtggatgtgctttctggtactttcagagcattctggagagccaagaagtttttacccatgaagaaaatgagcactcgaggtcagaggtgtcaagctgagctcttgttatctttgtataaaaaggaaaatctccacaatatatttggtagcagtactagaggcttcccctaccagttctggcaccatccagttgagatttctcctggctcggctatctgcccagctctgttgactttgcactgactcagtttggttactctaaatgtacacacccaattcaaaaaagtttgagacaccttacaataaggtcatagaacttgtaattataatagaaacaaaggggacaacagtataaagttaggagccaagcagtcaactaaggagggggatgattagattcctggaagagagtccaggacacaggttgactttgaaatgtgactcaaacaccagattcattttttttttctgcctcatagtttcaaaatctttagcaagatgatgtaataaatatatttcctacacgacttcaattacctgggttggcaaaccagaacttaatcacaactcatagtcaagtaacttttaaaagttaggtctttatcctgtgaccctgagaactgatatcttggcagttgcctggggaatcatgtgaaatcacacccagacacagtgatactcactggctctgctgctgttggttcttggatatgtgggattacttttgaaagcaacacagaaaactccttgttttcctctgcaaataaattcccctaagaggtaagaacaggttgacaatattgcattgagtcatttttctctactctgcatt

SEQ ID NO: 50744 - DNA, 3470 bp, Homo sapiens
aaccataagaggagtcaaatagaaagagaagtccaagcaagaacttcctgggggcatttgtagatcagatatggcacaagtcacctggccaaggcacagaaggcacagaagtgactggattaaccacctgttttctagcttcaatatcggatgctttgacctgagaggccttcctgaaggggaggggggcctgtggggggaggcggggtgctacttttcccagtgccagctaattcttagaggtaacaaaccctcctgtggggttgcctttcataagcaaactaaccaattcagagccctctccccaccccctgcttaatgagctcttgcactgggggacactattcccctgtcctaatcacctcaggcacaggcagggcatcgagttatgcaagtgagccaatcttaaacctgcttagcctgctcaccctgtctcacccacgctttcctgcaaacaccacaaaaaggctctttcaggtggcagttcgcctcactctctgtgcctacaaccgacctcagagcccctcctgtggcctgcatgggtggctgacctgcccccctcctcctggaaactctaataaactatcatttcaatggcagttgtctcctgatctgttggcctcaccatacctaaataaaaaataaaatctacattttaaaaggggctcatgggcagtgtcagcttccttccaagctggcaaatttgagcagtcttgtctcagtgttttcaggggtccgtggtatctaactggctcaacgcttggacaaagacatcttatggatacaaaaggaatcaaccccctcgcgatgctttcagcatctcatatgcttatcctgggaggatttgggtctcaggaaggacacatggttgtctgtctgctgccagcccagacgacaaggactgcccagtggtcccacggcatcagaagctaaataaaatggttattttaaaccactaaactaggagaacatagagttgttgcacaacaaacaagagcttctgaaaccgcttgatgtcctaaggttagcattccctcaatctggacttggaaccccttcctgtgggaggactagatgaacatggaactgagcctggcagacactgcaaatgaggcccctgccagccaggggaagcattgataggcacactgagggtatgctgaagaaggcagtgaggtccagctccaggaagctgcagcaacattaggccactgcagcggacctcattttcagaaggattttaagccaaagcccaaggtaaaggggagcaaggacttttatgcagcttgtttttgtgcaggtattaaggactctcaggaagcctggtccttcaggggtttattttgtttgtttatttgttttgttttgttttttctatacacaggggagaggattcaaatgcagtaatcagtttcttgctcttttttttttcttcttaaatagagacagagtctcgctctattgcccaggctggtttcaaattcctgggctcaaacaatcctcatgcctcagcctccgaaactgctgggattacaggcatgagccccgatgcttggccaattttcttgttctgtaaagctgcactgcttaagcacaaggccaaaatgaggtctctcaccacttctgcctgaactaaacttacccagtgaatgctgggctgggcagtccagtcttccccacatgtggtaatgttctgctctcagtcatgttctaaccacaaggcagcaaacactggcgcagctgagcccgaggctggggctgcagtctgaacttttacattactcagttaattacaaagccagtcaaatcaccccaaagatccacacacccaagagtgctggataagaaaaaaatcctgcatatcaaaccccttctgggggagagaccagggagagcgtggaagagaagaggtctggggtatgcagtggctggtggcctagagcaattctaacccaggaggcctcaacagggagcctgcacctgaatgttggaagaagcagggtttccgtcagtctgtgttggctttaaaggaaccatccttcatgcccaaaggaggcaagtgtttggcagcttttccagatggcatgtcttgcagtcgttgaaaattttttaaagtgtaattcttgatagtgtatctccaagacagagagacaagcccctagtcacccttctgaacaccataaagtaagttgcgatctccatcagacactggggcacttgtcctggactctcttggcttgtgggaacttgcttgcatgtcaagctttcttcagttccgttcctaattccagactccattgtcccgttactaaattgctctggtccttttggctcttgcactttgattccgcaggtggactttgacttggatctgcttccctgccccactttgggccataaaagtagaattcctgacctgtctgcaccctggatccacctcctacagtgaccaatcctagcctgctgagcttagtcactcggcagggcaattcaaccctcccagagggtaaagacccagcagctcaggcggccctgcagcaatgaggaaacgtgcttttgatctagttaagtaaaaggagcagaacacaaactgtatttgcaactgtgtgaaaataggccaaggggaaataacaaaaggacttccttaattcaattttttattatcatcgttacattgttattgttctgaagtctattctaagttgaaatcttgttttatgtggctattttccctcaaaactggggtcaatcattatatttaattatactaacagattcgcatacattatttgttagctcctttgtccttgggtagagacgagcaaagaggaaccaagtaatttagattcttttaactagagaagaaaaaaatgcaaattcccatcctcacttcattttacaaaactgaaagagaaaggatagttttaactattggcaaagtaaaattgctcttctagctgctcaagttgaacacttattgtacaaattattaattttattaaaagtgtatgaaataattttttagattatcagagactataaaataaaaagcatcttttctcagtttaaaaacgaaggacaattttaaaggactcaaagtatgcagaatataaatagaagctttcatggctaatgttacacagttagtaaatggcacacataaaacatgacccttggcatcctgacttctggtgcacctgtccactcttctccactgggaagctggatggaaggtatgacatacaaactggttaagaaagaattgcaattcttagtttgtgaacagttcattgtaataatccaggagtgacgtgactggtctaaaacaaatactatgtaagcttcattaatgaaaatacagtcttcccactacccagtgtgatcatctaaattctcttccattctgagattctctaattccctcaaaaccttgagtttctccctgaaaaacttctgggattaacttgaat

SEQ ID NO: 50745 - DNA, 1023 bp, Homo sapiens
gcacttctcctgcccacatccttagaaatgaccaaggaatgcttgattaatttggtaccttccctgcaagctttcccagaagcatctctcattatatgaggtgttgattctttcttcacccacccaaagaaacactctgctagcctagattttggccagttaagcatcaggggaaagaaaattggaattgtatgtacaatctacagatttatatacatgatagcacctggcccttaatagatgcttaaaagtgtttttatcgagtcatcaggacctcctcatagatcagaatggaaaatatccagtattaggtgtaagtctatgtttatgtttatatttaaataaatatatatttaaataaattaaatacaatatttaataaatataatttactggtaaatattccttaggtttctaacaatttcctgaaatctattattctaaataattgaacgcaaacacaaccagctaaacattaggttagcttgttctctcctgacatctagtgtttccaatacattactgcaaaacaccagtttttcttttttaatgtttacaggtttattataaaggacttacaaaggacaaagacgaagagacacatagggcaaggtaccagggaaggggcacagagcttccatgccctccctgggcgcatcactctacaggaacctccctgtgttcagctatccagaagctctccaaactccatcctcttgggctttaatggaagcttcgcaaggtcagcattccttcccccagggtatgcggtggggccctctctggagaaccccagttaatttttaaatattaaaataaaaatgctggccaggcacagtgactcacacctgtaatcccagcactttaggaggctgaggcagggggatcacttgaagtcaggaattcaagaccagtctgaccagcacggtgaaaccccatctctactaaaaatacaaaatttagccagctgtggtggtgcgtgcctgtaatcccagctgcttgggaggctgaggcaggagagtc

SEQ ID NO: 50746 - DNA, 1245 bp, Homo sapiens
ccatgagtagcaagttattctaacagtttaatcatggaattattcaaatttgctctgttaacaaattgaagactttcaatcaaatatgtaacattgctgaaatgaagaaatatttccagtataaattggactgaactgataaatcaatgctttctcctcttcagattcagatttaaaatgatggttgtttttccgagctgcaagaaaaaaagttaatttttaaaaagatcagatgacaaaatcttcaagagactattttataatatttcttcctgcaatcagcattattaagtgggaaaatatcaacaagaagagaaatgcgactgctcttcctatagaacagccatctttttttttctttacttctctaacaaacttactttccaaaaaaaaaaaaagaagaagaagaaggaaccaaggaagggagggaggcaaatgcttgacaaaatttccccaaataaagcagtgcccgatttatggcacagtcgcgcatggccacagcagctgtgctgtactccccctgcagcatatcccatgctatgctcactccgcaactcattcaaatacctacctatcaaatacacaagacttgataacacagcctggggatggaaatataaacagaacaggtcctaacactcaaaaagctcagcctcgtaaccacacagaatcatatgataaaaatgtttttatggtatatggtgtatcatcactggatgctacaagagtaaaaaagatggagaaactggtgaagctgaggcagacagagaagtgagacattttcactggtaaggcagcattatgaaaaaccaggaggcacagtgagaagtttggcatgatgaaagctggaatgtgaggaggtgagagctcctaaagctcccaaagtcaaagtaaatacaggctcttacggcattttcagaaagaatgttggaagataaaagaccacatagaccaaatgccacatgactactactgcagcaaatgcggcactgccactgctgccctcattcactccacgcactcatgaaaatgttcctttggactaatactgtatatgggatactttttttttttaatttggagtttttgtcataaaaccatccactcagctctgcatgattctaaagcagagtgaactcagtaggaagtacttgacttcccagcaatggcaggagagttgataaaaacttagggcaagcttggagatggaatgaaagcaaagttcacttaagtctttaaatggct

SEQ ID NO: 50747 - DNA, 2338 bp, Homo sapiens
cgatatgagtattggcaagctaaagaacaggcagggaatcttaactagatttccacagactattctgaaaaacagttaaaactttccatgggtgtatgtatttgcccaggaaagtatccaaaactttcaaatataacatattttcagaggtatctgggacaaacaaataaaaatacaaacaatgtagaaaagaacatgaaccaagccaagaaattttgactcagtaaacagatcaaaaagcaatatatcttagtggtcaaccctgaaggttctgcacagactcaaacaccaacaaacagattttgaaaaaaaagaaactgacgttttcaaggcgatagtgccagctgtttcaaaccaggccccttattcttactagagacttccatgaaaaccacagcaccttgaaacattccttttctgtataaactgagttctggcaacacacaaccaaagtactctgacctaatacatgtacttcccaccaggtttttgcaattattaagtgagacaatggaagaaagagctttcaaaagcacaaagcattctacaagttttaagtatgactgctaccttccttgcaaaatccctatgagaacagaaatagctggtggcttcaattctaagcattcggagatcaagtaacccacaataatcattatctatttatacagagtgatatcactaagaatctatctggtctttgtcctgggttcctgacaggaagcttctaaaacccttggaattcccggaatgatataagtatttttgttatgctaatgtggtaattcaaggtgggtccctcaattatttcaggatgaagactaatcatcagaaaaactaacttcatgattagaaagttgaaacttcgagccagcccaatcaatctccaagtatgaaagaggggctggagattgagttcaatcacacaggcaaagattcaatcaattatttcataataacgttccagtaaaaactctagacaccaaaactcactggagttcctggttgctgagtaaatatagcgcttcccggtagatcatctaatcccagcactttggaaggccaaggtgggtggatcacctgaggtcaggagtttgagaccagcctggccaatatggtgaaaccttgtccctactaaaaatacaaaattcagccaggtgtggtagggtgcctgtagtcccagctactcagggggctgaggcaggagaatcccttgaaccctggaggtagaggttgcagtgagccgagattgcgtcactgcgctccagactgagtgacagagagagactctgtcttaaaaagaaaaaaaaaaatcttatttaatattcacaaaaaaaacccctaagcgttattagacctttttgcaaatgcagacattgaacctcagagaggtaaaatggttcctcaaggtaaaagtgacaaagctaggagtcaaaaccagatcccatttcagagttcttcatcacacacagtcctgatatcactagaagcaatgagttattaaaattcacaattccttaagtcatcctcataaatgagtacaaggatggtcattcacatcttcaacctgtgtaaataatttaaatgctaatgtcataagcattttttccttcagggaaaaggctaaaaagaaaataaaaataagcacttttactttcatatttgctacttactaatcctgcccagcaaatatttttcaaagggttgaaaagagtactcttacctccagtgaagttcagcggcattgccacgtcaacagtatctgtggcagttaataagcactctccactaatcagcagtgaaagctcttcaaatccaaggcatgtgccccacacaggaaaatagtctccatcatcaaaactctttgcaagtggaaaaagagaaaactaagtttattcaaacttttcaaaataaaaattagccatatcttttgtcataaccaaataggcacctgagttacacatggatttctgaagaattctccaggatccataagtaggctatcacttaatctctcttcagaccaagctcccacacaggctggaaaacatgagctgtggacacactgtatatcttgacccaaagactataaaagcctatagattactgaccttagctattaaaagtttgaaacaagtatttcaaaggctaaaaacagttatttagggaaatgtgtaagggggattggtaagattctagggccagcaagattaatttaaaaatcactgttaatagttgaggagagaaacagcaaaggtttgagctatggtacaaaggcagtcccactgtgaacattacaaaggagaagtcagaggctcagaagctctgcttgacatgg

SEQ ID NO: 50748 - DNA, 1821 bp, Homo sapiens
tttagtagaaattcctagctgtgtacaaaaaaagaaaatccgcaggattcttcatggtgcaccctcctccctcccacctttaagagtcatatgagtctaaaggaatgaacgaggtacctcaaccaggtacatttcagtacgacctaaatggtgcccagcccgggttcctccttgcaccaaaagcgaagcacatctgggggtttttcccggcgggacgcgccagctggagcgcggcggcgggaggcgcccagcgccaacacccagctcctccccgtctgctgcggccccgcacagcctccttaccgatgatgggcttcttggcggtgtcgccgtggggtctagacagctcgaggctcgccgccccgcagagtagcaggcccagcacgcacagcaggcagcccggactggccatggcgctcgccgcctcccgccgcctttcaaaagctctgcgggcgggcgggggctgcggcagggacacctcgcggcagcgcactcgcgtgagactcgggtgggcggtgctccgcagcgtgggcctatgggaaatgcagtcccggcgcgcgctaggcggccgtggggcggcggtgggaggctctgggagtgcagccggcgctgcgcgcccgccccattgctctgtccccggtccgcgaccgcgaccgcgaccccgacccccacgggccgcctaagcggagactctggaaacgcctggggcgggtaccgggtggtctccgcgtccttccctttcaactgttacgtcgatgtggacttcagtcacccgtacaaagctgggctggccaacccaggtcctcgagaggggaggttgggtgtccccggccgagtttggtaaccaggcagcggggaggctggcaggggattctagaaggcgcctgagaactgcgcgccaaccgcaccgcccccttgaaggtcggggccctatctccgggaatggtgacaacgttcgctgtacggacagcctgtgcccctgaatgtgaatgtccacacttgctatttggggggtcgcggcatctgtaggaagtgaagacgggacggcgataggaacacacgcacaggcgcatcactagggtcagaactgggccaactccgggcgtctactttgaagcgggcacgcccaggccacgcctgcaaacggcgtcagcttcctctgatcaaccgcggtcagcgccatccaccgaccaccactaagcctatccaccggggcagaaaagatgactggttcctattcgttaaaactgttgattgttcctaaatacatggatatatagcttgtactcagtgaaagtttccatctataagggccaactgaaattcagcataaaacaagaatatttgaaaacctgctacatcaatgctcagtattaagggtgaaaacgtaaattggacagtctttttcacaagaggtttaaattcagtaaggaaaaaaggcagaaagcgtgactcgtagagacaacaggaacaattttagcatgttgcaagaagagtaaatgcagtgaatagtctggtttaacaagaaaataacgcttctgtagaagggtgtggtgagaggtaagcaacaaaggatgtgatgaaagacatgaaagggccgagctggttttgagcatgattaaatagacaagtagccttgtaaatatgaacttgtggtgccagaataattgactatccacataggaaaaattttttacccggcgttacacacaaaaataaactcgaggtgaagtgcatatgtaaatacgaaagcaaaatattatactttgataagaaaatatataaatatatcttcctaacttaggctgttggaagagtttc

SEQ ID NO: 50749 - DNA, 2946 bp, Homo sapiens
gtagctgggattacatgcacgtgccaccacacctggctaatttttgttattttttgtagagatgaggtttcaccatgttgcacaggctgttcgtgagctcctgagctcaattgatccaccatcctcagcctcccaaagtgctgggattgcaggcctgagctactgcgacctttggaaggcactgaaaactctttggaagacagtttgttatattactcaacactgaaaaatacacatctaatttcatccagcaatttcaccggttgaatttatcctgtaaatttatattcctatttatgcacaaagtatgaggacatgaggaatgcccagtcagtgatggaagaaaccacagccgccttgttgactgcatcttgtgtactactaggcaaattgtagagtccaaaaaataattgttgaatgaaggaatgaacagcaataagccctaagtccaataacaggttagatacattttaatatagtctaatatatccatccagtagaataacagcagcccaataaagagtaagatggatgtataccagttgatatgggatgctcctagttcaaagacaggtaagaaaggcaaaatagaaatcacacacaaacatgcttgtgcaacctctggctgtttaaaaagataaatgagtaacactaaccagcctctgggtatgtgactgacaaactaaggtttgaggtagggagcttttttcctttagaaagttactgttagaaacttacttttcacgttttaggattttgtgttacctagattatttttaccataattttacttaagttaaaaacaacctcaggctgctctgtctctatggagtagccattcttttgtttctttacattcttaataaagttgctttcactctaaaacaaacaagagaaaccctcaaaaacctcatactgagacacactggaattttgtactataatatctttcctgctaggcagctgtgtgacactgaacaagccacttagagaaagggctagatctggtcgaactgctgaatgcttactgtgtgccaggcactgtgctgggcacagcttgttttgttaaactggttaatgttcaatcttcacaaaaaatcaatgagacaggcatttccatcattatttaacagataaggacaccaaacctaaagtgacagaactcaaggtcgcatccctctttctgattcctatctttccatcaccttttctttcagtgagctgtaacataccagaaaccaaaagaactgcccgactacaacccagactcgaactatactgggttgctttactgtcttgacacttaagtgttactagtaataatactatgttgctactatatggcttcagaacttcagttttaccagcaatttcattttccccgctatacgtagttaatctggtcacgtgtgataagtctgagcttccaacttgtaagctgttactttgtttgtaccacaggctttcctgcagggagaggaaggcatgtcccccaaactttgtaggttcaggagactcatctagcgcaggagttctccatgcttgagatcaaatgggccattatcccatgactccaacactttctagctttgtcgtttccatgacccagagaaactggaggaccagctctggattctcggaacatctacagcctcagcgcccacgccgggtggttaggggcgcgttacccgccagggtcctgcctgcaccctgggcttcggcaggggtcagatatccggggtcgtggggcgggggacggggcgggtgaggtgcgcactgccgagcgccctgggcacgcacgcttacccgccaggccaggtccagatcgaaatcccgggcgcgcaggaaccgcagcaggaaggagtcggtgagcggcagcggcgcgagcgggacgccagcttcccgggcccggcgccgcagcgccgccaggcccggctgcagcaacggagagtggtccggtagcgcgttgagctgcggccccgccgagggctgggatcgcgcctctgccatgcccgccgccgctgctgcggccgcagctacccgggcacccgggaaaagcgcgcgccccgcgccaccctcggccccgcctctgcggccgctgcccgtcgcacaaccactctccagcctggcagggcggtctccggcctcgcacgccggacccgcggcgagcagagctgcctcttaaaggaaaccgcacagtgtccccacgggtgctagccacctgtttagcagctttagttagggaccccagctttttcccagcgagggaagccactgatgttcaaacaccgaggaaacgatgtcaaagttagttgggatgatttttacgatctactagagaatctttttttttttctttttccttcctccctctctcttccttccattcttccttccttcttgcaatcttggagctgaaaggagccttagaacgagcctttaatggccagtggccgacgcgctactgagccctctcccttctccttccatcagattccagactgatgacccctcgcctcgcactggattacagcatgcattctaaaacacgcattccataatgcctccttggcagcctcaccgcttttctcccttcctcccgattcgggaaaacttctctaatcctggcaccggcccctgttactgacacaaataaatgactagcgcgtaccctgacccccttccgcaccaatatttatatatttatattttttattaatttattatttacttatttagagacagggtctcactgtcgcccaggctggagtgcagcagtctgatcaaggctcacagcagcctccaactcctgggctcaagtgatcctcccgcctgggcctcccaaagttttgggattacaggcctgagccaccatgactggcctccatatatttttagcaccataaacttactctgttacactccaccatcactaaactttaagca

SEQ ID NO: 50750 - DNA, 957 bp, Homo sapiens
tgcatttttctcattaaaaaaacatgccaacaagagaggatgcaaacagagggaccagtccctctgagattaacaccttattaaaaacgatttcagtcgactgaagaaactttccaggaacagggcccaaaagagaaaaagtagaaagatctttaaaaaaaaaaatcataacttgttatcagctttcagttaagctggcttctgaccttagagttctttaaaaaaaaaaaaaaaaaagttttcaaatctcttatcagatttccaccagcacaaccagccaatattcctggcttttgaactttttttttctgttaaaccaaaggtatctttccaagtgactcactaaaatcaataagccttaactaaggttattactgaaactaaggacaccctagacagctccaaagagtcgcaaagcagttctcacaagatgcaggaccacaacaaagatggctcaaagaaaggaaagttttactagcctcaaacagggaataacccacgtttctgtacagccatattctctaggctctcagcttctcaactgaccatctacctacaaagacccaaaagcctcatgtgctctcggagatggaagaagacaggcaatcaaaacctgtcgttgaaagggaaaaggatcagtaacaaaagagtacctccaaaagtatctttttagaagtataactttccaatggtgtacttattcttgtagcgacttaatccaataactctcttcatgaaaagcccaggaggtaattttccagatttagaataaattttcaccatataagcacgagagttttcttggagagagcatagaaaaggcaatctcaatgattatccaagacagacagacagacagacagaaagaaagaaagaaagaaagaaagaaagaaagaaagaaagaaagaaagaaaattcactcctaagaataggctgagatagtaaaatacttgttgc

SEQ ID NO: 50751 - DNA, 2825 bp, Homo sapiens
aggttgggacccgtggcaatgaatggaagggcaagggaaactgtctaaccagaacttaaaaatgcctcttggtgatttacatgaaaagtggcctctcaagtttttctattattcagtgcttctaagatactgttgcactgtaaaccacaaaattaatcttatgattctacaattttactttctaaatgatcacttatttgatggtttttgaagtacagaaagtatttggtcatttaaattatttccttccatggactctgtatcactgagacaaggaatctttgcctttattgtagatatttcaatgaaaatgtcaacacgttgcaaattggcatactttgggtttgccaatatgtgataaagaactttttcaatggaaactttccctcttttcagggccgaaaagacgctctgcaactatacttaagtatcctaggcaactttattcattcaaaaacatcagagcggagtcaaaagcacaaatccatgaattgggcggcgaagtctgactccagagattacggctgaactgggtttggaaagactgaacccgcgccggtgctcctcctgtttgcttggacttaagtttgagtaccacaactctaacctgccacttcagctgcacgggcaggcttgtggggacccagcaactccgtccagagagcggctgagtcagccagccgtccccacggctttgggcagccgccgaaggctcctgctaggcccggctggctcaccgggaagttccctgcctccgtcccgtcagcctccaggagggcgccgccggccgccgtgacttcagcaaggcactactatctccgtcagccgccgcctcggccatcttcctgcccggagtgcaacaaaatccggctctggccagccttccagctgacgccactctgccagggccctgcagcctcggagcgggatagaaggaagccgcagaaaagacgctgaaagttggcgctcgctgacgccccgacgcgctccctccatgacgcatgcgcccaccggccgtgagcgcgggtccggtctccggtgacgtggcggtgaggaggcggagccaagatcagcggcgggagggtgggggaggaagagcgaggtgagcgcggacgtcagagtggagagcggaaggtcagggaggctcggagcggaagtgagactagggagtctgtccgccattgtggacccgagaagcagagagcgagagggggaagaggagcgtgcaagcggaaaagacgggcctcttcctccgactcccgagcgcgaggccctcattttgggttctcagcgaacggcggcagcggcggcggctggaacaatcactcggccaagggcgacagccaactgctgtgagtgcacggggagaggcccaggcagcggcggcggcggcggctctcgggttgcggtgaagaatgtcagccactagcgtggatcaggtgagggagcagaggccccaggcttggcgaaggcccgagccccggagctccaccctcgcgcggggcttcggctcctccccgtcgccgccgctgccggccccataacggtgccccgggcgcaagttgctgcggtgtagctacccgggccggggcgtgcgccctggccccgtagcttgcgggcgggcgggcgcggtgccgcggcgggtgggggcaaggaccggtcttaggggccttaggacagatcctgagggcggcagacatggggcggagaccgggcgagctctgggagacggattccgagtggcgggtgggaggtttaaaggctgggggtggttgggaaattggtggctgtggaggatatggtgggtttttactcctacgcggatagtctaaaataacttgtctttgataatgcctttgattaacacactttttcttttcttcctttttctcctctttaccgcatctttcgtcttgcaacacagagacctaaagggcaaggaaataaaggtgagtttggatttttttttttcttattgctcaatgttgccttaatgttacttttaaactctgtgagggtattttgtttgtttttgctccctcttgggaaaaaatgtaggattagggaaaatattcatcatggctaaggtagccaagttctatccagaacttcggtagttcgttgctttgaagccactttatagaaaccaaagtagtacgagaaacagtttccttgtcagttaagcaggtattggtgtgaacctggtggtatttctttggttttccagtttttctgtgttatgtaacttatgccacaaaaaatttctacatgtgtatatagacaagtatattcttaaagtggacattttgtttgacatgtctggattacactggaaaatggaagtctacatagtattccatcacattaatgaaaattgtactgttaatcactgattctattgaagtcagttgtaatgaggcaacaacatgagagaggttagaactgagtaggcatgccatcttgctctattgttctgattgcaaggtgtgactctatctggtattttataaagggctgagaagaaaatagtttgtgacattttttccaggattttataattttctctttagtaaaagtaccattgaaagtaaagtgtttttttaaaaagtgtgttttgtattaatatggaacagtgcagtcagctgactgaaacattatgacattagtcatgtgacatttagttaagtatagaacaataactgctttcttgggatagtgccaattaaataacatcagagcaaattatatataacattttgtagtgcttgaaattacactaaaattatgctttctgttgatttcagtaacacagtgttagaaattaa

SEQ ID NO: 50752 - DNA, 791 bp, Homo sapiens
gagttattcttccataagggtcatttgaggtgcttaactgactttacctgtttcttggaatggcttaaacattttttttttaatttataaaaatctgctgggtattttaccctactcatacatgaatactgttgaagttagggaaagatatcacagctccattctctgtactttggcctttgttgtattaaatgagtagggatagtgtttggtctgttgtgaattgctgtctcagttatttacgactgtctaatagatttctccaaaactcattggcttaaaacatacagtttacagtttttgcatgtcagaaatctgggcacagcttgtctgggtcctcagctttagggcctctcacaaggctacagtcaaggcagggcttgaggtctcattgtgaatactctgctggtgaaaaatctgcatccaaactcacggttgttggcagaattcagtttctcaagcgttgttggactaagagcctcagttccttttggctgtatgccagaggctgcctatactgtgttccttgccacatgggactttcccacaggaggcttgcttcatcaaagtgagcaagctgagagggcaatagagtaagctgaggaggcagtagctaccaggacagaagtcacagtcttttgtaacttaattacagaagtgacactctgtcgcctcggctgaatttttttttaaatttttaaatttctttttcttttttttcttttttttttccttattctttaatttgagatactggggattgaacatctgctgaattctgttgattagaa

SEQ ID NO: 50753 - DNA, 1463 bp, Homo sapiens
agggaaatgtttgtgtttaaccttagtcttccttgtctattctaaccccaactctcccaggggaaaaaaagctgctttttttttttttttttcctctgctctactttcagtaccactaatctattaactcatcaaactccaagcaaaggtagaggtaacaaaagcagaggaaattgtcatcattgattcctcttctccactgtgtttcctctgtccaacacagcactcttttaaccagccctgacttcctctcaggtgtcaactcaccccatcttctgccctgtcgctgtgctccagccacactggcttccttgtcttccctcaaactttcaggtgcatttttacctcagggtttttctgtcctctctgcttgtgtcagatgtttcctttcttctgcacgggtctgctaaagtcacactttattagtgaatatgtccttgatcactgtctaaaatagtaactctgtcctctattttcttattctctatttacttcatagaaattttctaaagttaatttgtgtatggctttatctttataaactgagattcctgagggaagggactttgtcttctttattgctgtaaacactgcctggcacatagcatccttaacagctactgattgaatgagtcattgactatcctccaagctcattcttaagttgtgacgaatggatcattgctgttgatgctgcaatgatagccttcattgctagggagccagaagtcagtctgtgaaactggtgatgctagtaactgcttgaaagcaagccatgcgacttacatttttcttaccaaagggaaagttgactgcttgataatatccccacttccactttaatactctatttggctgctcttgtgaagctgccttctctcccccactcccttcgttcgttgttttctactttccaaaattacctttgactctcatttaaaccagactttttctgggtcagataagggggaggaatacagtgtgatttactctgagatcatagagtgctggaaaggacctatgcaggccatttaatctcatcttcctgtttatagatgaagaaacagcctggaaggctataactttcccaaatgagtgagagaatcagaacttcaaaaaagccctgattttctagttcctacttcaatgtgaagctcatctaaatctgtacccttcagattttgggtttttggattagggatgttcacctggtaaatataatgcagatcttccaaagtcaaaaaaaattggatatctgaaacactctggtgtttagaatttcaaataaggaatactcaactcgtatttagttgttgactgacccaacaattaagtgcctctatcatttttcttatttctaaaatgagaaacatccttactcagaattgatcagagaattgaacaaaaatgcacaatgcataacatctttttttcttttttttgagacagagtcttgctctgtc

SEQ ID NO: 50754 - DNA, 896 bp, Homo sapiens
ctccctttggctgccaggtaaggaatatccaagaactgacagcagcatagcatttaaaggcatcagtctggtacaaaaaaaatgaatatagaagagatggaatcactgggtattgagcagcagggaaggaaatgatttgtgctgcctgctgatatttaaaggtatattatgcacagtaagaacagcttagttctccggactccgtggctaacccactctagaactgaaggtacataatatgcaggataagtttatctcttagcatggcctgggcaattatttggtattgattttcggaaagttttgtcttacatgtcagcattttgttggcaaactttgcaacataatccagtcaaatcagcgcagagatgagtgtgggtagagataaaccctccgcgggcgagtcctttgcgtggtgggtaggtagcccttctacattaagaaagctcttgcaactgtgccgtctcgtcaggggaattgtaatcttggggaatccctgtgcctgattgccgctctcctcccaattgtgcacttttgacctctgtattgattctgttctctcatcaaaagcgctgatgtaattccatgtgctgggatcatgtagtgatttgcatttaggagctgcaactgtgcgctgaccccaaaccatttcatcagaatgaaagtagaccaaatggcagatgcgtttccccttaatattaaagtctattgtgccatttggtatgtttctttattgtatatagaaaaaggacatataccatccgatctggattttgatttaattccaaacaggaattgagaagttctttaaaacataacagggatcagaagggattttattgaattccacattcagtgcaataaatagcattcctatttgttaaagcttaacacaa

SEQ ID NO: 50755 - DNA, 838 bp, Homo sapiens
aaaataatccttatgccagagtagcgtattctggggtggcattctctgaatatctgcagttcatacaactctttccctcctagactggaagctgaatgagggtagggatctttctcgtgcatccttctaactccaggcctgacacagaggaaacactccatcatttcctactaaaaaaaataaacagccctcataggcaccagtcaacagagaggggctcagttgcaggttattcttggctggtgtaattagtggacaaataggcaaggtttaaacaaacagcaaaagttccaaagtttgaaaacttatttcccagcactcttctagccttgctgtgtgacttcaccttgagttatgaaacagttatataaccgagatccccagcagagcactgcacttgaagctgattctgttttgttcaaaggaaacccagattctaggtacataatgatggcaccccggagctattatcagtgtatattgtggctttggtgttgataatgagtgtgctcaagtacattccattcctctctctgttttaatctcaacggcactctggttacaaagcagtgagcgtggccttatctcacgcttttgtctgctttggtgcttttcagcgtattcttgggtcaagggtgagattccattcctggttctcagctgtaactcacctggaacaaacccttctttgcttttcctgtccccaattgtgcttttaaaaaaggcaggctttgggactactccatgttctgtcctagaaaatttcttttcactcaagtctgtaaaaggaatgttcaaaacgtgataactatattccttttggtcacaccccacccag

SEQ ID NO: 50756 - DNA, 1296 bp, Homo sapiens
actcttcagagtcaatacaaaccaaacaaaccaaaaacaaaaccagtttgtgctcttcagttttcattttttaaatcctgaccaagagagacaagacagggctcacatagaccagatattttcacagactggacttactgattacgacaatactttttgaaatcaagagtagaatcaccttagtccatggccttgtatcaaataaaatgttcaacgtatacaagagtgaaaaacataaaattccaccagttttccaatgtctcatgctttcgaatttattttttaaagtcctaacacatgatgggtgatagaagcttctttttactgtcagagagatcaaagagaggttgagaaagaatccataagcagatgctgcccagtgacaaacctgaaagaagcagacagtggggccagatgttggagtgacctttggtctgcagatcacgttggcatggtgttgatttagatagttgttggcagaagctttagctccagcagcaggggggggaaaaaaactaaactacggaattctttcctactctttcccctcactagaaaacccaaaaccactggtcagtagtgctgatggctgtcaaagaagttgaattcaccacgcgaccctgccagtaggtatcacatcaaaagggagttagctgagtgagtaagaacatcttcaggctgtgccattttgcatcccactcaacttttaacagctgtttcttgagtgaatacagacacaaaataattatatgaaaaggacaacatattcaatatgcgagatgatatttacagttattacttagtcattgatagaagagtcaaccaggaaaaatgctggcacatctgaaacctgaatgacctgttataattagcacccagtgaaagttcccttaagttgaactctgaactgtacactctgaagacagcacaggaagtaggttttcattaaaaagaatgacccaaattagtactgaagaaacaaaaaaatatataatggtgtgttatagttttaaagactcctatcacattatgtgattatcctgatcattcactcattagaaatttaaaggatttttttctagtgaccctaaggttcttaatattgcaaacacttgtaaataagccagatgccctctaatcataggttctgacagaattttaaatttcagccatcatacaatgctgcaacacagtacttaaatggaagcttgctttatagtattagagatgattgcaggccacatagttcttctgacacttttagacattttgtcactttacctggagaaatataca

SEQ ID NO: 50757 - DNA, 2158 bp, Homo sapiens
gcaaatatttacctgtaaaataattcctagctagtacaccatagaaaaagaggtacaggtggtgggctggctttgacctgcaggctgtagtctgctgagccctattctaaaagttacatcattcgtccacctgtgtgctttataccaggaggttttgcagcagataaccagagaaagaagtgtctagcttccatggtagtgcccaatgtctgtaattcgacttcatgtccaacttttaactcttttccctcatttccccccctctagtccttaatggaatgaactctttcttggtcttcaatgtggaggcagtttgggttttatgtccaatgagatgattttggagtttcagaagagccctgtccttcaaaaatgaagttgactgactaatgaaatgtctttaattgggtacatattttaatttcacagttagacaagcatgtcaacatgcaaatacatccagaaagagaatatgttgacaagatccttcacattaaggtagaaataaacatccaaacattttctaagctcagggtttgttttggaagcggaatttctaggtgccaggataggaagaactatcaaagagtagaggaaaggaaccagaatgggggcttgccagctttccatactgctgtcatgtggcaaaccacagaaagaacaaggcacggcgagaagattctgctaaatgctgagaaaacagaaatgttgaaaccatgcccctgcccgctagcatctcacaatctgcttcagtgtagcctctgcatcataaaatttagcttggaagggaccttagggatcataaaatccacatctttatttcataaatgagaaaactgagactcagagaagttgacactaattttctttgtaactttggacatgctgtttaatctttatgtttctgatcgccagagaaaatgtgaccttcaagcacttacggaaaataacagtgcattttctaagaactttcatcttcagtttgtgcttacccagacggtttaaagatttatgggcttagaaacacatctctgagtcagacgtacagtggggatttccagcacttattgtggagaccagccaggtctccagttgactcacttggaggatgttgacaagcctgagtcccaaaagtgagttcattttgtagagtcctagggtgagagctcaagcattggccaaacaagaggaagcccttctggttttgccagtcaaccaaccagcagagtgaaagaatatgggcttaggaatcagctgcaggcatgtttgagtttcagctcaactgctctgtagcagtagtctcagacaattcagtttggcttcctacactcagtttcctctgtgcaaggcagaggactaataccaactacagtcatgtggctaggattgaatgagatcatgaacttagagtctatcacagaaactgggacataataggtattccataaaataggattattaatgcccaacatgcttatgcttttatacattgatattatatgcccaaatttctcatagaaaaaggatagtgagagggaaagttcagaaattagttaagtctaaaggcattagtatttccctagcatgtatacagcctttataaggttcatggagactcccaggcctacagtagctacagagatcaacaatggtcagtgtcctatgtggcaccacttcaagatcatctcaggcccagttcttacatcagccaccattgcattaaccaagttcagcacaggcttttaccagcttcactcaggtgcaacttggcagtacctcacctctgatctgcattgctggcttcttgctttctgcctctgggcttctttgatactacagtgtgggacattccaataaaaccctgaatactcacacatgtgactctggagagcgtggaggagttaacacccacagaactgccttcatccaatatgggatgggaatctgtgcatgcatgcttcttgcccctttgatcctcccatggggacagttctcagacacatttcatgaagcttctcagaaagtcacaccagatactaagtacaagtaggggccatctccataacacacctttggactggtttctttccttccttccccatcctttgctcctgttccctagggtcgcattcccaattaaactacctatgcacaagcc

SEQ ID NO: 50758 - DNA, 1575 bp, Homo sapiens
gttctcttttaactgatgaaatttaagaatattcccctcctgaaatgctctatgaattctaggccataaaatatcaactcgcagtggcaaggcacacaatgtgtctgtgatgcataatgcataccgccaacctagggcttattacaacttacgctggagcagcaaatggaattcggtcccaaagctttaatatgtacgcgtatgtgtgggaaaaagacagaagaagcctttgttattacaaagtcccaaaggaagccagtaccccgcagcaagttctgactgtctgcactggaaatcatggagggggactcccctcgccatctgggtcgcgcgcggcccgcggggcccagggcgcatgcgtggcctggcggccgaggcgcttacctggtgcgccggacaagcaagcagagggccaggagcagcagggccgcggcgagggccaggcccgggaggcccaaccgctccagcgaaaagcggcccgtggccgcggacacttctcctgccatccggcgcgcgctaggccgcggtgggcagcccggggtctgcctgcgaacagcgcggtcggcgactctgcagcctgcggcggcttctctcggcggcgccccctagtccagggccggagaggctggcctgcccgcagcgcagacaggaatgtcaccgtggtctcccaggctgaatgacaaaagttcgtggactgccccctccccgcctatcctccacccacgcgtaccgccccgttcccccaccgtttccgacccggcagcttctggaaaacagcgcccttgatcctcccgggcaggaagaagggccaaggaaggggttagaagggaaagagttaggatttcccaagaaccagccctgaaggcctggaggtgggggatttcgcttcttagttggacgggagccccttgggttcctcacttcttagcccgcgccctgcgggaggagcgactctgcttgtccctcaagatgcttgtgaaggtgcccgctgcgctctgacaccggcgatctcttaggtacgacccagcggggttgggctggcggcagaaaccggcggagtgcgcgacctcgaacccgtttcgcgcccacctccttcacccccttacatcctatttgctcacaagttttggttcaggcctgctgtgtgcagaggcgcgtgccagagacacggaatacaaagacctaggccgtaagcctttagaagtcccgatgaggcacacagtacaggaagagagtgagacaggtaaaaagagattgcagaacagcgtggtaggggacgaaagagaagtggttcaagtactacaggctgtactcagaaagaataagggagaaacttttaaaatacctttttctgagtaatgaccatccactgggtactttacccacgtttttactttctatttttaatgtgtattttatagaagacataatgagactcagattaagtaactgaacttggttgctcacttgataaatgtttaccattcccactgataaatatcggccgttctaaccacggtcctattcgaggacttgtgtgctctgtcaatgcaacacttctctggaatgggtaca

SEQ ID NO: 50759 - DNA, 1169 bp, Homo sapiens
ttaaaactgcagacaaatatttcttatgaacatagatgttcactgaatcatttcatagagaacatctgcctaatctataataggctgagtgagaaataaactgttgctaggttcagatattaacatttagtttttgagagttactacagcatatcctatgccatcttgactaatacagtggttaaaatcatgatgtctaatttagagaaccctaagtaagaaagttggtttgacatttcctttcagtctcccaagccaattctgtcagctgtttcctttgcttcagtaaagtagtataacaacaacaagcagaactaaaagattctatccctgaaaaattctttaggattatggaaattatctaaagagcaaggcttccctgtcatccagaatttaaaattctctaggctgaggatggagaaagggagaatgaaggaagtaatgaaaggagctaggtagggtctggatcagggccacacacatgaagtggctttgttgagagcagctgcattaataacaaccccaaggagcccagccaacgccaactctctttctgtgggctaccagtatctcccagcttgagtaaatattttcaatcagtagtatccaaaaggtcaaagtccacagactgacaagtttctatttaaccaaacaaatagcttgagcccaggggttatgataactgttcttcctcgtgacttttgaaaatttccctttggcattagatagcaggtgtgatgccggcctgtgccctgatgctttgctatgaactactttagctccataaattttagctccatattagactttagctatttagttcaaaatagttctagttttccatttgtgtttgaattattttgacatatagtgttttattttaaaatatttgggactattctggatatctgattggtattgatttctaatttaattatattatgtcagaaattatatgtataatttaatcttttaatagtgaaacttgctttatggcctaatacatggcctattttgtggaatgttacacgtactttttgtaacaaatgtgtatttggtagtattggatagagtattctataaatgtcaattgtttcaaggcaattattaaggttgttcaggtcttccctgtccataatgaatttttgttgtctacttgttctattaat

SEQ ID NO: 50760 - DNA, 1622 bp, Homo sapiens
aggaatctcccagccctgagcatagctccggaggcagagtcacagcctgggaagtgaagcagagaagagctcagaccagcctgctctttgctgttcgggctgtggtgtagcctctacttttttgttacttttccagtgaagcctgaagaaactgcattcccagtaaccagacaatggaggaaagctcgtgaagaaacccctttcttgactttatttctgcctggacggaggttctgcacttctcagcgtgcccccaaacatataggggtaaaaggaggggtgaggagcttctgactaagccccaccctcagcccactgcatccccggccccagaatgtgccatcctcggcgagtaaagctttcagcggtgctaacttgattgtgttcctctaatgttcacacatttggcacaatctagtattttcggtcctttatttttaatcaggttggcaaacgtctctcatctctggctctttcttcctgtccacacagtggtaatggcttgtgtaattattacttgctacatgatctgctatccctgtggatgtttaggctcatattatctttaaccccattcacctttgacagtgaacttttccccggcatcctcagctggggatcagctggcgcctgagtttgaagggcaggaccatgctcaggccctgaggactataggcctcattacagcttccggactaagagtgatcaaagcctggaggggagggttaggatttcctgcaggcgttcataaggctttacagaaccaatcagagaaacagaatagtttccagccacctctatgagtaagctgtcttccagaggggcgagtaagtggagaggaatcccaatattggtaacaaaccatgaagtgaccttgttttgcctttgttcaaggaacaaagactctcgtaaaaccccacagagcagtgtttaccaactgtgtaagatcacttctgaaattactttacaatgaacctaattctgaataaatatctaaaagaatatgtggataaattatgtaatttgtaattttgttttttctgattatacatatctactaatttgttgtctttggacttggttctcttgtcttctcataattactattactcacattacaaaacagcagcctccctcttgtctttacatggcatgagtcaacatccctctcttctgccattcatttacttatccattcatgcaacaaatgtttgtgaaagtttgttaagtgcatggacataatgatgctattatttaaaatgatgcagagatccccttggtacattccatgtagagttcataaaacagcttacacaatcatggttgaagcctggccaaagagcaacgtgaagtcacttgatctctatccagctcattccatgaaattcaaaaggtcactaccaaagtgtacttggtcaggacaatgtataggagtaacagttgccccactctcctcttactatagtggtgcttgttcacctggttttaggttcacctcttccttttgagagcctttttaagtgtctgctgactctaagaaaaacccacctatgcaggaacatgctgatataacctagagagtccttggtgagagaaaggaaagttttaaaatattagaagga

SEQ ID NO: 50761 - DNA, 968 bp, Homo sapiens
agtatctataccaacttgggagctgaaaggatatccagtatgacaaaacattttatttctgctctgttatttgaattaacaaatctcaggcaggaccttggtatttaaaatgaaaatttgtgacatatttcaataataattctcacttagaagcattataatagcactgttttactaaatattaaatcatcacactgaaacagtaataatagaaaacaaatagaatagaatctattcctatgaatgtaagtgacaaaacatttcctgcattgatctattcaaattttacataagagaaatgacacaggaaatgttgaactgtgtgactaaattgcagtggtctgaaaggcctgtttcaaacacatagcatcaacattcatatctacatatgtgatcttgatatttgccttggtaattgctgaaaaaagcaaaatcagcagtcccttagttctaggaatttggtctttgataccaggaaatagcttcagctctgtttaaataaacattagggagatctgtaaaagataaacaccagtgatgagaatgttaccctaagatctctttccacagatttcttaaatgtacagtttatttccctagtcatgctgtaatgaagtatggtctgtcttagactaaccctaaattttgtcacctagtactggaggttcgattgtatcacatgcttggacagacaaatgaataagccgtcaaggcttttctgatgaggctaggtcttctaatcactctcttagcgtcctacacatctcatttgtagtaaacatcatagttgtaatcatatgtctatatatttcttgtttattaactgtatcccctattacaccataaatttcttgaatccagatgccatatctgactattcttctccgtatatttactgcctggaagtaggttctaaatcagaataaaaataaaagaaatattagttaaatgggtgaataagcaattct

SEQ ID NO: 50762 - DNA, 643 bp, Homo sapiens
ggattatctcagaaaattcaggccatatggtggccatatctagggaacatccaccttgttttattggaataaattattgttaaaatgaacatactgctagaaaggctgttaccagtctgcaggtcataaagataaaaaagctaaaccaacctctcagtgctgaattggcaagtgaaaagatgcattctgcacacaataggtatgcagtgaatatatttgactgacaagaaccctgctaggactagcagtgagctatttaagccctgctgtttcttgttgactttgccagccttggctgcggtgtgaggattctgtaaccattaacaagagccccaagctacatctcctcttcctccatttcaaagtttcgtaaaccatagtgtcaggcgctgggctctcatcagtgactgataggtacacagggtctgaagaaaacatttttgctttggattatttgctgagaataaaaatttcatgtgcctgtgtcaacaggcttgtaactatggaatttttaaatatattcattaaactgtaaaatgatagtcttgtattgaaatcgacctgcttttaacctatgtgttttaggcatctggtgtctaaaaattcttccgtacaacacaaatcaaagtagatgaaaccagtt

SEQ ID NO: 50763 - DNA, 2478 bp, Homo sapiens
gagttaactgtaactttgagaagttaagttcttagagcctcagttatctcacataacaatcctcagcggttatcagattaaagtaagaacgcgaaatggtaaaatcaaacaccagcaattaccaaaccagaatactacttgctcatgtggggacatctgtcctgccaggtgttggaggtaccttctgcactgccctgacacttcagtgcactaagtatcacgaaaggagttgctaactgcacgaatacctacccccgccctcccaaaacacagtcttaaatataaaaatgggaacactggtctctcttgaattaagcctaacacaactatgtctttccgctcttaggagacacgcaggtgcacaaaactaacagaaagttaccaaagaataacctggagagatgaaaagatgagatgacacccattaataatactggggttagtaaaagtcagatgtgaggggggacaaagaagaaatgagcaaagctaacagattcacgggacacgtgggggtagagcgtgctaaagcgcctcactgggacccactactggatctgacaagaggcaggcggggcgcccctcccaggcggattcgctgcctcggtacaggggccgcttcccgcggccttcccggctccactgctttgtctgccgcccgtggaccccacataccgctccagagctttaggagtccagagcctgccacaccatcagggccacacctacggatgaggtagagacccaggcggcgcggagcgagcccttcggttcgcagccccggccgcggcgatcgcaagcaaccggactaactcagggagccaaagagcgaaggcgctggcgggcaaaggctctgcagactcttcccaggtgacctgacgcctctgtcgcttatgccctcctattggctgataatgagtccaacgtgaggataaagtatccaatcagtgaaggtctttttagagtgaagcgctcataggtggtttagggaaatacactaagagtcaagggactgatccaatgaggacccaggaacactatattggccctaactactcgccgtccaccaagccctaaccgaagaaatttgattccggctgggaaactgtcacaccttcacaacctcaatacccagctttgtggggccagcaggacttctccggtcctgcattcggtaattcaaattgagtatttctttagcaactcttgcaattctaataaaggcaatacctaatattttattcgcttctgtgagtcttaattcataaattttttttgttttgtgttttactgtggacgttagcactacattaggcgttccttggattttcgtttatttcttcttggtgtccactgtctccctagcagcttgaaagacgcaaagtacagttttcgtttaagtagcaatttattttggggaagaggtttttttttttttcttgtaaggaatttattatcacaatcttctcaaattcatattttaaaatatcttctatgtagtttatcaaagtaaggatttatatacttgttttatggatggcaatcacttgaagtttttgtttaggcatagattttattttttttttaatttctttaaatacaaacctactcttaacccgcaggcagatctttgagaataatgtatccattgcagtcaataaccccaataaacagattctggattctctccataacagtttgattcggccacgtagctcatgtattaaagtcagaaggaatatgagaggcctctaataggaaaagagtgtggataacaataaatatcccagattgtattcaatgctaatatctcctatacttcttgaatttaaaaaccaagcagctacttcttgaatttctttccgttcccttgttctcggttatcctcttgcttccaatgaactcaaaataggagcaaaataagctaagtagaaaacaaataggccgggtgcggtggctcacgcgtgtaatcccagcactttgggaggccgaggtgggcggatcacttgaggtcaggatttcgacaccagcttggccaacatggtgaaactctgtctctactaaaaaccaaccaacaaacaaacaaaactaaccaggcgtcgttgcgggcgcctgtaatcccagctacttgggaggctgaggcaggagaatcgattgaacctgggaggctgagattgcagttagccgagatcacgccactgcactccagcgtgggcaacagagcgagacggtctaaaaaaaaaaaaaaaaaaagtccaaagggcacagccaggttaaacataacccatttggttgagttactttcttcagtatagttattaaaaacaactaaaaaaaaatcccaggaaattaaacttgctatttttgttaacgttaatatattaggaaggcaggtacgggggctcacgcctgtaatcccagcactttgggaggccgaggtgggtggatcacctgagttcaggagttcgagactagcctggc

SEQ ID NO: 50764 - DNA, 2238 bp, Homo sapiens
aggggtgctttaagacattttccttttaataaataagtaggaaacaacatataatctcgtaaactcgatgctaaagttcctctatggactttggaaaggctggcgaaagccagcgtgcctgaaacacaagcttcattagcttagcagtaaataccctccggaaagatctcagaggaagaaattagtgccctttgacagaatcgccaccgtccattgctcccaccctttcggctccaaagctcctgctctttcattcagcctcagacaagcactcacttctcaggaagtattccctgagacattatggaggcgcccaggctcccacctcgattccattataatatttgattaagtttgtgtttttgtttagtttgtgttatctcctcgttatcttgtaggctcacttagggcgtggctcaaggcttttaacaacctttctgctgtcatagttgtcccccaacaagccgttgttgagtaaatgagttaatgctctgggtgaaggaggaaagccctcactaggaagagacttgtgccacccggggcaagaacatcagagatccagtgacagcccagcgacctccgggatcaattgcaatgggagggtaagagagacagccaatcagcaacagcctcttcaaaagccatacaaaaatacggacaggtttcctaccctacataggaatctttcatcacgcctacgcacattactacactgcataagttagctagaaatgtaataatcatattttcacgacaattatttgaaatccagagtgtcctagagtattcaaatctttagaaagcacgtgccccaaatgaatcggactgaacagacgctggaaccgaacatggtaaagtaaaatacttatccatgaggcactttgtaatccccgcactcctgctctgcctaaagagaaacatctcggatgtgaggtccgcataggcattagatctgccgggtggacacaggtccctacagcgtggggtgaaatgggctccacatgttaggttaacaaaagcttacgactcgcagcctttttcaaggtaatacacatctgcggctacattcagaatgtgggtgtccctaaacccctaaagcatgaagctgacaaaagcacttcccaggacaggacggtgaaggcacaaagcaaggtccgcacaaaagcacacgcccctctcagagctccgcgcgtgcgcacaccgactgtgactctcagcagccggcttgcggagcggttgccgcgtcctctgccgagcttcttgtgcccgcctccgagcctgaggaaacagctgattgatcagcctggctcaggcttggggcggggattggctgattggcagcaacgccacgggacagccaagctagaagcctgaggagccggagagggtgctggctgccgcgcggccgaggtgagtagggtgggaactcggaaaagcggttggctagcgggtgatgaagtcggctgcaggcctgacggcgatgggatgccctggaaacagtcagaacaggagctgaaggagctcggttcgggaacgcagggaggccggcgggatcctgggccggttgagtgtttgccccgcggccgggaggcagagactgcctcggctgagggcgcgtgggtcgggggctccggaggagctgagggaagtcggctgacttgccctgaaggctgagactcgcccacccgccaatctacccctacacctcctgccccctcccccgaccttcggtccatctttcggacccccggttcccgcgccggccgccaggcggcggtcctggggagaccgcccttcgcggcggctcccttgggtgctgcgcccttaacgggctcaggagccggactgcgcgggtgcaccgccagccggcctccgggaggagcagtgcgctggctgatccgccgggaagtttaaccagcttcctgtggttgctgtgtcgcttttcgcctcctagaacttcccagtgtatcttctgaccatgaccagggtttgcaggaaaccccaaagccggcctttgggcattaacaacagcagcattttattatggaaatcttcaaactgtggagaaattgaacgaaggatataaggaattcactgtactcattacccagtttcagtaattatcaatacgtgggcagtcttgctcccctaatccgggttattttgcgtttttgagacagggtctctgtcacccaggctggagtgcagtggcgggatctctacccactgcagcctcca

SEQ ID NO: 50765 - DNA, 1046 bp, Homo sapiens
accccccaaaagaatgtaaaaacatctaattgtttttatattgacattttaaagtgatacaatattttggacgtattggaatagatgttactaaaattaattccatgttttctaaatgtggctactagaaaaccgaaaattatgtggcttggattctgtttctattggacatcaacactcttctgtacaaataatatgttaatgtgtttgatttagaagtttgcaccatatcccttctaatgagttggacctgggaagatatagggaatggcacagtggtaccttgtttacaactgatatcaatcaagtagagtggagtggccttttcttatcactttaaaaaggccaatgattgatagaaataaatacaactagtattttagtacttgcaagacttgctgatgtcttatgcagttcaccactgtaggaacaaaaggcctggctcaaagctgacctctcccctgtgttagtcaggactccaacagccctaactgggcttctgcttactcacttgcaaggtgagtcattagtagataagctcggactgagtaaacatctgagggatgaattacaagagccaagaagctaactttgatttccttgtaatttagcattgtgttttccaaaagattgagttataaggtaaatgtcaaagataaaaatatgaaaagataggtttttattcatcaaaagttaacagcaacaggcacatattaaaatgagtatggcaaagccttttacaaatggctttacactcaagctttctcccaagaaaatggctgttgcaacaaactgtaaacaattaataaacagtcttttacagtaacaagggaaatacaaatgaactaaaagaaagcaccggtttctcttaaaactagattacagttgtgcttactatacataaaacaatttaaaacaaattacaaaagtggaatgtttgaagtttaaaattagtccttatagtttgtcctagaaaacatctgttcacatcaaaaggcccgtcaaagggtaacgtttcatcaaagggagggacaagaaaacaatgc

SEQ ID NO: 50766 - DNA, 512 bp, Homo sapiens
aaaagttttgtaagctaactcctgcagagaacaagttcaggctaatgtttaggacaatcagaggagtcagtggaagaagggaaggcctgaagatgactaacagattttagtcatagcaggagcacgtgctcatttctctgattagatcacatttcacaaaacacactagattacaatttcaaaaagaattccaagctgtgtgataagcagaacctattataagcagcaaagaataatgcatttttctctattaaaaaaaactcctctaaattatattaccatggtggcttaaagagacatattcttgttttgtaataactataggaccaagtctatagcaagagtccattttcaactacaacttacacatttgtcaccttttatgaacagcatgatgagatcgagaggataatctgctgctcttaacactgagctgcctccagtgttctaaataccatactacaaagcttccacatcactggatcaggatataagtatagataccaaaacct

SEQ ID NO: 50767 - DNA, 882 bp, Homo sapiens
agggaggagggagtggggagtgctattgagtatagagtttatttttgaggtgataaaaaagtgctggaattagagtagtaaaggttgcacaactttgtgaataaactaaaaaccactgaatcatacacttaaaagcgtgaatttatggtatgcaaattctttctttaaaaatgcacatattcaaacactttagaattttaacttggtgggactcctaccacaatattaacttatgttgccagataaatgtgtttatatgaatcttaaattaggctgtcccttggcacctctgtgcatgtaagtgaatgttccatacacgtgttactgattcacaaagtttgggctctgcgctggccttcatccaagttggagcacatgtcagaaatgcattccttttccatgtggctgtccagttgtttagcacaatttgttgaaaagactattctttccccattggatggccttggtacccttgtcaaaaatcagctgaccacagacacattagtttattcttctactctcaattctattccattgatctatgtgtctaagcttatgccagcaccccactgtcttgattaccattgctctgtactaagttctgaaatcaggaagtgtgagtcctactttgttctttgtttcaagattgtttgtgttattttgggtcccttgcaattccatatattttttcaaatcactttgtcaatttctacagcaatcagctgggattctgaaagggactatactgaatctgtagatcaatttggggagtactgccattttaacaatattaagttttccaatccatgaacatgggacattcttccatttatttagatcttcaatttctttcaacattgttttgtagttttcagacaatac

SEQ ID NO: 50768 - DNA, 2586 bp, Homo sapiens
tagtttctctcctaaaatctccttatcaaattaaaaacaaaactgattcctggctatgaactttgcagacttgttcctctgatacccagtacagcccagccacagaaacgaaggagtcggggagactacagcaacggggcatctaggcctattgttcagagggaaccgcaggaccaggcgagcgccgcggggcgcgcgggagctgggggaggagaggcgcgaaccccgtacagttgtgtgtatgggaagggggacaggtatgttgcaaggcgggggagcacaggtgtaccctggggccacgactaaggaataaagactcaacttccagaccgaaaaagacaagggcggtcattcctgaggcttaaactgctgggcacagagggtgacgagcctggggagggtctgatgagaggatcccggaacccaccagggtggggttttggggaggctggagaactgaggggggacagccaggaatattcaaagaaaaggctctgcaatcgaaaggccagcctagaaatccccagacaatggacaatgcgcgggctgggggttgtagaggaggtgaagctgggtgggcagagggaaacaaaagagagaagccctcaagtgtgggcccggcggcggcgattacctgagagagctgccggggattggggcagccgaagagagcggagctggagctgaagctgatggctcctcggcggctgaggacgtgctgggggaccggcctgtccaggggcagtaccggcagctggtaacacacttccattgaatacgcccgccctgcctccgcgcggcgcccgccctgccgcggccgccggcccctgcagtgggagggggccgcggctcgggggctccgggccgagacgggggcagggcgggcggggaccgaccccgggctgggaagccgcgctcacgcctccccaaccccagccctccgctcgggccgccggcgggaaggctccgcggcggccgcggcgccaattaccaggaccggcgcgcgcctcgctccaggcgaggggggacggggtgcaagcggggccagcacaggcaaagtcggaaagggaaccccgccgccctggggctcctcggccgagaggagcaggtacccggactgcagagttcgagcgcagcacgaacggagcaaagcagtgcaagaaaagacagctggagccagcggccagacccagggcgcgcgggactcaggagcagcgaccagctcgggccgccgccgccgccgccgccgccgccgccggagtcctgctcctcccctcccccggagcctgacttcactccgccgccggcgcgagcccggcgtaattcacactttgcagccgcggaccttgcgccaaccacggctgccgccaccgtgacgtcacgacgccgcgccgcaggcccagcgccccgcgccgccgcagcgcccagggagactggcaagcggccgagggcgacagtagccttccttgtgttctgcaccctggggctctgttggagtcgcctcccgacaaacgttttcccccatctatctcatccgcagttcccttcgcgccccgccgtgactcccttccctagctcctcgccagccaaggcgcgtgcgcacgaggccccaccgtttcggggcatccccccgagcgctaaattcgtgcgttccagcgcgcctaggctatggggtgtgctcgtcccgcgctagaggcggcgttccggcctgccgaccccagaaacccaaagcacccggcgcagtcgccgtcctcagccctgaccgcggggtcactgctggcttttccctccttgaattcccattcatgggtttcgctagagaccgctgcggcagtgacgtcagcgggccgcgcgagcaccgtcctcctggctacgtcactgccagtccctcggtggggccaggctccagcgctcgcctggcagatgcggccccggggccatcccgagcccgaggggcggagaggggagccgagaattcggaagtgagaaggggacccggagacaaagggaaaaaaccaagactgagaaagaagtgagagtatgggtgaaaagaatgagaaaggatgatactgagaagacaaagggaaaaagtagactgcatgcccctctaccaaaagtgttgtttgttgactttcgatttttcgaaagcgagaaaagataaagagctcttgacctgttttgtaagctagatgtgtaatttgagtgttcattttgtcacatttctcactaaacggtcaaagctttcagcatcaactaattgtttctaatgcattccagcctttgggatttcagcctgaacaacctctcccctgctggcaaaattattgctttggttcagttcttagggcatccacccttctactgatttgtgatgactagccactgacaaggtggaaggcctttgaaagcactgcataacttccactgatgatgagatcacataccaaatgcacataatccggtaaatgagcaaaagtagaccttttatcatcttcccatggcatgtttcttttctcttgctaaaactttatacctcctacgtggatatttttctacctgtctgctttctactattaaaagaactat

SEQ ID NO: 50769 - DNA, 617 bp, Homo sapiens
tttgaaatgttttctcttgaattaccggagaagatgcagccttgacaagttttatttaagaggcttggaaggaaaaaaagcaaaaggaagctacctctctgaagatcctgagagagcagagtctcctcttgctgccgtcccctgaggcgccttggcaggcggccacactggatctccgacacgcgcaggacactgcctgtcatcccagcccagcccccatgcccactctcccaagaattgtgcaacagggcctttgtaacctgaggcctgtgaagtctgtggaggaatgtgacccagagccaaggggcgttggtgccaccagggctgagaaggagctctcctgctgtttaccctgctatcccatgggaacctcagaagggggaaggttatgctctaaaatgcatggggagtcaagtccttggcacagctgtgaagcaagcactctagttagtgtcttttcccctcatctttgctgacctccggaggcatgcttcatgctgctccagagagtagaacccaatgtgctttaatttttattgtatttgtataaatatatggggtacaagtgcaatttttaaaaatgcatagattgtgtagtggtcaagtttgggctttta

SEQ ID NO: 50770 - DNA, 2162 bp, Homo sapiens
aaaagagaaagtgttttatattattgaccttggatctaaaaatgtgagattcggtgcatagaaaaatctgttgactgcttaactgttcttgccactcacctggataaaacccaaatacattcacaaccacacaaccactgagatgaagaggccatatggcttgtaattagactctcactttcggccaagatattgagacatttattacatttgctatttagtattcatcacatcttactgcccaggaaaaaggcaccaaggaagagattaaattcatccttcccctttttgccactcaccactcaagcttcatcctacccctttcccccagtcaaaaggaatcaatttctaaaaataatacatggaaaacaatgcttgcaactagtcaagaatgctttgcttcttctttatatgaaaatatcaagcaagcaccatcaagctcttgggccagagcagtaagacaggcttgtcagctctgaatgctcccccaaaaagcagctcaaagtgaacccaagatttctttgatttttggccatctaggttcagtgagcaaacttactggtcaggtttattgagatagtctttcaatagcaaacatttgctgagcacttagtatttgcctgatgccatgccaggggctagaggaaatgaagacatagttcctggtactttggaccttacaaactagaaggggagaagggaagacaaatattaagtaaataatcacatgaagaactagttaatttacaggtacaataagcctgccaaaggagaagcacaggggctgtgaaagtgagcacttggggcctcacctgcgtgcaggttgaggacactttcccacgaagtgacatttaaagcagaagactttaagaaggaggaggagttgaggggtaggggattctggggatggtgcactctagaagggaccaatcttagtacaagcaaagaattgtcacagcctctccccatattcttgtggataagatggtgaatggagctttgcatgccaggcaaggcaggtagagtcatattgggctgttctattgaatagttttatcaagtaatcgaatgaagcagaagttgtgcaatgactatttttcaaagaaacccaaactgagatatgcttagacaaaggttcaaaccatcaaaatgaaacatgataagtggaagtagctggaatccccatccccaatgtactagagaagtgcaagagtggtaggattacctaggaaaggggaaaaaggacttgagagactccatggtgaaaaatgcaaaaatatagaggggaggtgaaatattattcagccgtaaaaaggaatgaggtactgatacatgtggatgctacaatatggatgaacctgggaagatcatgctagatggaagaaatcagacacaaaaggacaaacattgtatgattccatttatatgaaatattcagaataggtaaatccaaagaggcgggaagtagattggtggttgccagggcctgtggggcaggaagaatagggagcaactgtttaatggggactgggttcccttttggggagataaaaatgttttgcaattagacaaagtgtgagtcatacattaactgtatatgtactcaatgccactgaattgttcactttaaagtggttggttttaagttatgtgaatctcatctcaattttcaaaatatatagtaggggagagggtagaccaagatttgactagaaaaagaaactgaacacccttccttcagaaaaggagagtcctttgttctctgcaaattcacgcagcacaacgagtggaggaaatcacaggcctaagccaggcattaacatccacgaaaagggacagggcaaaggtgactcagcctattacaccagctaccttgagggcagtctacgccaggagctaggacagagggctgtggagtcagacaatcctggctcaggcctcagctctctaagatactggttgaggttctcggggtaattcgcctaactcctttatctgttattgtttttctcaaatattaaatgatacaaataagtatgacctgagtttctacctcagaaaaagaatgttaccatcacctttagagctccttgtttgctcttccctcctcagacgtaatgatcttaaatcatgtgtaaccagttcttactattctttttagt

SEQ ID NO: 50771 - DNA, 3705 bp, Homo sapiens
gcaaaaatggcaaaatgttcaccaggaaacaaaaataatctcatgtttgtgcagtcttaaggaagccgctttcccacttaaaaatccagcccttttcttttctctaacttcgtattttatcttccctaattttacattttattaaagcttttacttttgggaactgctatcttacaggggagatttaagaaataattccaatctcccttccacaaatattactataataacattaaaatagaaactcagtttgcccaaaccaacatgatgccttcttggttaaaagatctctaagggcaaaacccaggtcgttggatggtttttacgctacgctaacaactgagtgggaatatggcagcaaaccttaacaatttataaacgctatgaccttacaaaaataggccgacgaagcaggattataagcctatctgggattgaataactttttaaaattaaacataaaataggaaccagatcaaaaagacattctatgtgatcttcttccctctctttgcttagccgggggttggtgaggggactttctctaggaacttagtgactctgatgtcttagtagatgcggtggaaccagctctgtctacagaaccccgggcttcagtggcgtcttcctaacccggcttgcctgccgggggcgttccgagaccctcggggccttcccttcaccccgcgggagttggaccggtggcgctggtaaggcctcccgggctcaaagtgcaacggacactgcagaaatccaaactgctggcattcgcggtttggggacgccagaggaggtaatgatttctggtttgttaacctcaagtgacaataatgccgagccaggcaggagctggacctacaatcttctgatgcgtggtcagacacgttatcccttgcgccactggcctaccacgctactccttcagtcgccgttggattactgtgtgttgagaacacactcggcaaccactttaaaggacaacgcaggctggtaaaggaaaagtacgacaagggggggcggtggaatcgcagggtcttggcatcgcggaccccagacacctgggttgagggcctttcccgggtcagtcaggctagcgagccggagcgttctgtctttctgcgcacgcgtagagcacacaggccggctctggggctctgcgctcctcggattacgcatgctcagtgcaatcttcggttgcctggactagcgctccggtttttctgtgctgaacctcaggggacgccgacacacgtacacgtcccttcgatagctcagctggtagagcggaggactgtagctacttcctcagcaggagacatccttaggtcgctggttcgattccggctcgaaggagacaagtgcggtttttttctccagctcccgatgacttatggcactttccttgggtgccttcagtgacacattgcattccaacgagcagtttgaaagtctagcgctttctccccattttgggcctcccagcctgcacggtaattctttttagccattcgccctgcgggaacgtgtccgggcaggttcccagcgcagctgtgggtctgcgcttggccgagcgactgccgggtcacgacttctgcgtcttcttaacccgtctttggcattgcccgggccccgagtcacacaggaggcagcgccggctccagggggccaggcggggaccttctcctcagagccccgggcagcttctgcgacccgagggctcgcaacggctgccgtgaggaggtggggggtccgcgggaagaggtatctggcgctcccggaacctgggaatcagaaagagagaacacaatactaaaaacacgaagcctaaaaatgacacaatgttatggagacaaggcggcacccgggaagctgtgcccgctcccttcgatagctcagctggtagagcggaggactgtaggcgcgcgcccgtggccatccttaggtcgctggttcgattccggctcgaaggagagacacccccccccccattattttgttgctttgaaccaaaaaagtctgtcttcagcgctcaatgttctgacccttctctaaaggaacagataataagccgtgcccagccgtgggggattagctcaaatggtagagcgctcgcttagcatgcgagaggtagcgggatcgatgcccgcatcctccagttttccttcctgtcccgtacggtttttctttcgattctcagcccaaactagagctgaaaagtcagacgaagtcaggtgaagagtagggcgagctccagcttaccactctaaaacttcccagacaatgagtggtgggcgctagcagtttatccttctagctttaaatttttagacccatttaattggggggaaattcacgaaactggttatttttgcttcaaaaatggcgacagattgccgtcacatgtattatcactcagaatcctttatgatttgtgataagatgtctgcatttccagggactcatctgaggctaagctgcccatagttcggggagacccacagggaaaacaaaacaagaaacagagaacttggaaacggacgctgattactttgaacgtttgctcaaccgaggaagcaggaactgttcggccccatctcaagtccgcagggcggactgcctggctctgggcagatccgaggtggataggacaaggcaaaaggtagccctggagaggtgagtggataaagtccctggacacaggggctgccgttggaggaggttgtaatgtcattgtcctcctgtggaagttaactgtggagaattaactagagaccagcgctgagagagaattaattggataaaagttctatctaggacagtccttgagcgtaattttgtgaagcaaacacaagacaacaacaaaacgagtaaaacctaaacacacatccacacactcactgaaagattcagagattgcacagaacacaaagacttttctggtaataaaatctccctatcctaattttctagaaaaaaagctgttgaagccaccgcgcagttcttacaagacataacacaaatcttccacacaaaggcagaaatacagtatcaacctttgtgaggagtacagcaaataaatgatgtttctttagggtcctaggcaacctgtatgcttttgttaccagtgtatacaacatggtatggtttattgctatctttcattttctagggtggtctccatttttacctcgttttattattttcaatagtcttttagttgaatgtattgtaaattacttgaaatataacatcaggatgttcataaaaacaaattcacaaagtaagaaaaagaattattttatcagatgacatgtcccagtttctagtttgggattatgggtgttctagctggctgaggggaggaactggcagtgaaactttaagtgaccgaaagagcaagaagtaagtagtaagtcaaaggaataggaagtaatgcgcccaaaacccagtggaggacacacgtttcggggaggtgacctgggccaaaactcaaaggatatctcagagtcagcaacccaagctgggaatggaattcacatacaaagctcaaaggtacaaatcaggaagcagtaatgcatagtggttagtcaggcaggctgtaaaacctgatggcctttcttggctttgctacttgtagctgcatgaccacaggcaggttgcttgacatttcggtgcttcagtgtctttgtttctcaagtggggata

SEQ ID NO: 50772 - DNA, 2907 bp, Homo sapiens
ccctgcaacactgtctcttctgaggaaaatctacattctatagagaatcccttccttttgcaggtcttttccctgatccaggagagatttaactaagatttaacttctattctctctgaagcctgctacccggaagcttcttctgcacaagggcattggtcttcacaaccccttatctaaacccagacatatcttactataaattccaggtccttagataatatcttaactcttttaaccaactgccaatcagaaaatcttcaaatctacctatgacctggaagcccccactttgagctgtcccatctttcagaccaaattaatgtatatccccacatatattgattgatgtcttatgtctccctgaaacttataaaactacactgtagcctgaccaccttgggcacctgttctcgggacctcctggggctgtcacaggtcatggtccccatatttggctcagagtaaatcttttcaaatattttacagagttttactctttttcattgacattcatcaactgggctcttactcctgtgggattcatgctgttttcctgtgtagcctccagggacagttctaagaaaaagtaaaaggcagggagcaagaaagaacagagagaaaaaaaaagagagagaaaggaagatagagatcagctctgtaatcccagagttttgggaggccaaggcaggaggatggcttgaaatcaggagttcaagaccagcctgggcaacatagcaagacccttgtctctgcaaaaaatttaaaaaattagctgggcatagtggtacacgcctgtagtaccagctactcaggaggctgaggtggggggattgcttgagcccaggaatttgaggtttcagtgagctatgattgcgccactgcactccagtttgggcaacagagtgaccctctgtctcttaaaagaaaattctgtttcagaggtttttgtttttttctacaaatactgctaaattaggttatgaaccccactcacttatagagggcagaactgaaatcctcctaggtgaagtcactttccaagaccacaaagggaggtagatgcagaagctgggagaaagcctgactgtctctgactcactctgcagcctctcactacatcgtcggttactcaggctcaggcatctgagtcatctgtgtggattctactttcatagcagccccagggatcatttcctcctttccttccccactgccatgacctgtgccagggcttcgcgacctctcacctggactattggcaacagcctctgatctggtttttagccagccaccttcatgctaatctaacccaatcatcgctgaaagatcaatctaaccaaccactgctctcacggaagtgtccagtgagaaacttttaacgacttcctgctgcttaacttattaagtgttaaaaactctttagcacagtatccatggccagccaatgcttgagcgcgtgcctgcactccagctcaagccaccgtggctctgagatcccctgcatgcctgtgcatgcccatgttgctgcttctgtgccttctcttggaaagccccagccatgccccacctaactacacgtccatccctctgagatcctcggtgcagcagttcaaacactacccccacccatgaagcccttctgattcctctgaccctgaaatgctgtagctgttgtgaaaggaaaataaatattggtatcccaaaatcattaagccaaagggaaaagtcaagctgggaactgcgtcaggcaaacctgcctcccacgttattcctaaataagatagctacaaagatttaaacgctacatacctcccttacaatttgcacactgggaaattccttataggccccaatatctttaccctaaaacagttttgttgaattttaccctgacagtgtaaattgacagcttatcttcacaggcatggtacgaaggacagaactctaagtcatctctctgctcacctgagacaaatgcatatctgctttcttcctctaatgtaaaaatgcagactcactgagctaaaggaagacataaatgactattattcctctacccaccgcccagccccaacatgtaaattatgtatttggtgaaaggctgatcaaagactcagaagaatgcaactgtttgcctcttatctacccacaactgaaattttttttctctttccccaatatccattcttttccctttaaatattaaagccttcgaaatcttctttggagaaagatgcaggcctgcctcctggcacgcgcccttaaccttgacaaaacaaactttctcgattgagacctgtctcaggtactttttggcttgtactctttatcacattttattttgtactatgttctgtgtgtgcatgtctcatctccactcttatactgagctccttgaggccaatgacctatgtcttgttcatctttcaatacccagagcctcacacaatggagacacactacacatatccaatgaatgtattttgaaggaatgaattccttctaaaagaaaagactctgctgcaatgtgcatgattagtctaagtgcttttacttagatagcaaggtcttttgcagtagaaacttaatctttcctagaaaatatcccacatattgtactcagacctcccctccatagcccatgaattgataaacacaattaactgcctaggctgggtgaaccaaagtaactcagtaaaaaaactttaccagttcccgtcctccctgtagttgctaaataaatattgaaaggactaagataattctctaaagatccctgatatgcttatgaatatatataacttattattagttaatagagcttactagattctcaataagctctccgtgcacacagcactaagaccacacataactgacctacacttcactggtaatttaatt

SEQ ID NO: 50773 - DNA, 780 bp, Homo sapiens
aaagtaattgcgatttttgcaattacttttcatggccaaaacagcaattactttgccaccaacctaatattaagagagtttatataacaagagtttcagtgctagtccagtgtcttgcacagaatagttgctccataaatcccagctgattaagcaataccacaaatattcttacgtaacaagtttcagagctagtacagtgctttgcacagaatagttgccccataaatcccagctgattaagcaacaccacaaatattctttcatgttctatttattgcaataaatttatgttttgttacttgtcacagtgggaacttgagacatgaaaaaatagcaatacttgttatgaaatccagagaagagatgttaaaacttgcagtattggtaaaactacaaaacacatcttcaccttagctatgaagttggcttggtgcagctgccaaaaatagtacccaggcctgggaagtaaattgcgtaaaagcaatgaaccaaatttccaacaataaagctcatagttgagtgaactagggatgcttttgtgattttctgtgattttgttatgctgttttttcttgaacttgagactttcctgtgggacaattttacttggtagcaaaaccacaagttgcacagagcacttggccacatgtctgggaggaaacgcagttgtcccctgggggcagacagccttactagaccagaatcttgagcctcagggtacattaggtaacactggaatgaccttggatatacagaatgaaaagagttcagctgtgg

SEQ ID NO: 50774 - DNA, 386 bp, Homo sapiens
taatctgacagagataaataagtgacaatcccaggcctccaggagcttgcagatgtggcagactgtaataaaaatgtggacgggctctggaaggtgaagggcattatgcacagcagaggtgaagactttgtactggggaggagaacaaggaggatagggatggttccttcacatttgtccagtccacattccactagaagcacaaagccctggcacggcacacttggaccattgtcaagtgtctgtcagagaaaaactccccagccttgaccttaactagggctataagcactggccattaactgtgtccatggctgcagagatagttataacaatttacaagataccttaccttaccagaagatgaagatgaagaagaagaagaa

SEQ ID NO: 50775 - DNA, 1421 bp, Homo sapiens
ctggaaagatgttttattactgaaacgtttacaagagaaagttgtttcaaagagcttacagatttagtcttacccacccaagagaatggcattctctttggctcagaccacaacaaaaacaattgagtgacttctgtctgctttttcaaacaaaacgttttctcacaggtctacattctctttaaaacaccactataaacacctggaaacggaaactaaacgtagacaaaacgaataacattgtgttgctgctgcacgtgaatacactttgtgcatgctaagtaaggggtataggctctctccctctctccctctatgtttcaagctatataaaaataaacaaatggcataagagcagcgctatggtacagaatactgtatttttttaaattttttttgtgctaaatgcagattctttttggccaaacgcaccgttttatttcccaataatctccatgagtttcctgttgctgtgagcttgctgtgctaactgctcggccctggccatttccaagacttcccggaggaggtggaaggtgagatccagggagatgggaggctcctcggaccgcctttctctctccggtgcctcctggtggccgccgagggcattcctagcgccgcgctccgcgagagccgcggggctgtcgagcgagcgccgaggcagcagcagctgctgcagcaacacgcggaaaaagttggcggtcgcctgttccggcgaagggcggctgccgctgcctccggcgaggagcgaggaggcgggcgaaaggggagcggccgggctcttgttgaggttccccaggcggaggaagtactcctctcccatgcggagcaggaccggccgagcctgcggctgctggggctgctcggactgcggcggcggctggaagaaatccaagggctgagggtgctgcggcgcctgccgagctcccgggaccggcccgcggctcaggagcgccctgcatggcgggcagggcaggagagccaccagcaggactcccgcggacacaagcagcggcagccgcatgttaggggcactcgctgcggcacagaggtgggcggagggcggaatgagagaggggaagagagaaagaaagagttggttagagttcgctcagctgggaggtgcacacggggtcttcctacgggactgccttagacgtgctgggctttggcctcagtgattcggatgggcgctgtccgcggtgctgaagcgcctggggagcggggaaagggggcgcctgcagggctccgcacctaagctcatgcgctcaccggccaggagtgacccttctttctagactctgaaaggacggtccctgcgtcctcttcctaacgatcctcaaaactaattttcccgatcctagagaagagccacagatttaagatcccacccgcgctgactacctcccttccggata

SEQ ID NO: 50776 - DNA, 965 bp, Homo sapiens
tttttttaagtttgctctgtaaaagaccctgtaaagaggattgaaaacgcacagactgggagaaaatatttgcaaaccacgtaaccaacaaaggacttctacctagagtacataagagctctcaaaagtcaacagcttttttaaaagccaatttgaaaagacattaagagacatatttcaccgaagagaatattcagatggcaaataagcacaggaaaaatgttcaacatcattaggccctaggcaaatacaagttaaaactacaatgagatgtcactacacatctaccagaattcatttttaacagtgataatcctaagtgatagcaagaatgcagagaagcaggatcactgatacattgctgataggaaggtaaaatggaacagctgctctgaaaaacagtttggtagctgcttacataaccaaacaagtgcctaccatatgactcagcagtttcactcttggacatgtattccagggagatgaaagctaatattcacataaaaatttgtacacatcttcaaaaagctaaatatggaattaccatatgacctagaaattccacttcgaggtatatacccaaaagaattgaaaacaggaattcaaacagatacttgtacaacagtgttcattggaacattattcataatagccaaaaggtgaaaacctacatttccatcaacagatgaatggctaaacaaaatgtggaatgtacataaatggaattttggtcataaaaaggaataaagttctgataaatgctacaacatgggtgaatcttgaaaatatgctaagtgaaataagctagacacaaaagaacaaatattgtatgatttcacttataagaaatatctagaataggtaaattcaaaaagacagcaagattagaagttaccaggtacagtggggagggaaaagtagagagttattgcttaataattacagagtttgtattggggtgatga

SEQ ID NO: 50777 - DNA, 2867 bp, Homo sapiens
ctgattgtaggccgtttgactcatacttaacaccatgtagcacttacctcccagagcctatgaaaatgaaataataatcggtatttggctaatttgtactgagtactcatacgctccaggccctcgtctaaccctcccttggacgatattaactcatttatcttataaccaccctaggaagtattattatcattatctcgcaggccttaaaacggcctcaacaagtaaaattgctgaaggaccaacagtggcacagtcaggattggaacccaggcagtgtaactgcagagcgtggcttagtttcagcactgtactagattaattgaactagactaggttctgtaactgcagaatcccggatctccgagtcagctagctcactagggtcggtgcacacccgcgcccactcggggtggcttcattgccagagccactgactcccaaaacaaaacgaatcttctacaattagctctatgtgtatctttgggatgttatctttctcgggccacaactaggaaccctgaaagccgactatgactccagtgaaactatttggccctaagaagggtgattgtctaaacatcttcacaacggatttacactgaaattgtaacacgcacttgattggaaccccacaccacaggcagtcccaggaatttgtacccgccccggtcccggaccgcgcccctggacaaaccctccggcccgcccctccggattgagccccaagactgtccccggaccaccatcctaagaccactccctgaactgccccccccaagaccgccccctagatcgccccccgggaccgccctctctagaccgcctgcgagactgtccccggaccgccccctggaccaccccctaggcggccccccgagctgtccctggaccgccctctagaccgcctcccgccccctgcatcctgggaatcgtagtcccaatcctgctctggaactagcagtgcggcctgctcgggccagctccgcctctatctggcgccagcctaaaggtcccgcttctaatcccatcatctctccataccgccctctgccggcctttcctctggtcgcccggattgcgagccgcttccggacgctccggaagcgaacctttcttttccggattgggcatcccggcatctgcacgtggttatgctgccggagtttgggccgccactgtaggaaaagtaacttcagctgcagccccaaagcgagtgagccgagccggagccatggagggccagagcgtggaggagctgctcgcaaaggcagagcaggacgaggcagagaagttgcaacgcatcacggtgcacaaggagctggagctgcagtttgacctgggcaacctgctggcgtcggaccggaaccccccgaccgggctgcggtgcgccggacccacgccggaggccgagctacaggccctggcgcgggacaacacgcaactgctcatcaaccagctgtggcagctgcccacggagcgcgtggaagaggcgatagtggcgcggctgccggagcccaccacacgcctgccgcgagagaagcctctgccccgaccgcggccacttacacgctggcagcagttcgcgcgcctcaagggcatccgtcccaagaagaagaccaacctggtgtgggacgaggtgagtggccagtggcggcggcgctggggctaccagcgcgcccgggacgacaccaaagaatggctgattgaggtgcccggcaatgccgaccccttggaggaccagttcgccaagcggattcaggccaagaaggaaagggtggccaagaacgagctgaaccggctgcgtaacctggcccgcgcgcacaagatgcagctgcccagcgcggccggcttgcaccctaccggacaccagagtaaggaggagctgggccgcgccatgcaagtggccaaggtctccaccgcctctgtggggcgctttcaggagcgcctccccaaggagaaggtgccccggggctccggcaagaaaaggaagtttcaaccccttttcggggactttgcagccgagaaaaagaaccagttggagctgcttcgtgtcatgaacagcaagaagcctcagctggatgtgactagggccaccaataagcagatgagggaggaggaccaggaggaggccgccaagaggaggaaaatgagccagaagggcaagagaaagggaggccggcaggggcctgggggcaagaggaaagggggcccgcccagccagggagggaagaggaaagggggcttgggaggcaagatgaattctgggccgcctggcttgggtggcaagagaaaaggaggacagcgcccaggaggaaagaggaggaagtaatagtttctaactgtcggacccgtctgtaaaccaaggactatgaatactaaatgttaagttctaggcaattatacggggactcagaaggacctggccgctgccttcattgagtttaaagggacaggattgcccttccgtcaagaaagtatgtaagtgttggactgcacaaattaatgtttttcccacaaccgagactttggagattaagaacttatttgaggatttaagaattagggaaataatttggtggaaaccgggaatgagttctattcttaaacagcctttttttttctttttaatgttggatatacggcgaggtagagttggccatatttcagagacttagattgacgtatatgtttctgcattatttttacaacaagtttgtgtatcagagcgggagtgcgggggagggaaagaaaacaaacagtttcagaattgaataggcaagtgactgttttaaagattaagtaataaagatgtcttatctagtgtgacttttaactttctgactactgggtagaaattgtacttg

SEQ ID NO: 50778 - DNA, 2102 bp, Homo sapiens
ctcatagaacattattttttgattcatttgtcaagttggcctgagctggtttgattaggaggtgaaatgtttatatagctgtccttggtcttcctgtccatcaatcttttccagtttgatcgcagtaaattcatttctgtaaaacttaatatctcccataaaggattcagatttcataataacagattactaaaaatgcaaatgtttagttgttactgtctttggatactttctgataaagttgagctttatcgttaatcagcttttccactgggacatggcagatatggcacagccaagccctcccggagcatagtctaatcatggcaagttttaactattgatgtaagagttttaactattgattttgctttcatcaaaagcaaagccattcacacagtatttaacaaaaaccctcgggctctgctaggttcttgtttactgttaaaacagtttaaaggcagggtcttgatcacttaaaatactcttagaagggaaagtaacattttaaaggattaacagtggaaaaagaatatccctgttcctcttccttcccccaagtcctcaacatgtgaaaaatagagttgataagtaaggagatttaaggcagaacccgaggcctacggagcagttaccttctacggcaatttcaagggtggatggtgcgagcgccgctggggcagctggcgttctggttcttactccgtgggaaaatggccctgagcccgactggcttgaggcttagacaggtgaccccgcgaagcgggtgggcaggcgcggccgaggggcgggaggcgggcagcctccgtgattggccggcggagggggcggtgtagcgacccgaggagggaagaggactccaagcgccatggccgctgccgcccgagcccgggtcgcgtacttgctgaggcaactgcaacgcgcagcgtgagtgcggggccggcgggcgggcaggggaccgcagggtgcccacgcagccccctgggtgtgacccgctcagatcctgcgcagtcttctccgcttactttcaagaattcggagaatttggataccgccctgggctcccaccgcgcgccaggcggaacagcgaggtcacagagtgcgcgatgcagcctctcagggcgcagtgaggcagcctttactctgcttgtctaccgttaaagaaactgaggcccagagaggacctggtcccacatcgtagcaggcagtggagagcttggcacggtggccaagacaaattcatgtatgcaattgacacatatttattgggcatatattatgtgccaaaaactattctaggttctggggatacaaagatgaaaggctctggagcagtttgaggtctagtggggaatgggatgaggggacgaggctaaaaccggctatagcagactgggtgtagaagggaaggatggatgtgagaagtcgcagagtcacacttcctggcatgtacagggagtcagggtattcaatgtcatgacacgcctgcctcccagcagaaatgtgaggtacatcctggtcacctgataaatacttgctgactgtgcaagtgcacaagtctgcctgggaaacatggaaaagtttgagctcacaggtgcagatcagtaggaggaaaggcgagggactggcgaggaacgtcaggcagagagaagagcaacaccagcgatggagatgcagtcccaggacacaaaagacaagtagacctacctttataagaggaggtaaagatggagaagacggctgataaaagaccatgaataagaatatagctaatacgatgagcccggcagtgtcttacacactttgaatggactatcagtataatagtaactctaatcctttcactgaccctatgacacacggtattgtcatcctcatagatacggaaataaaggcatggagaagaatttgtccagtgtcacacagctaagcaaatggcacagtcataatttgaacccagatactctggcttcacagtccttgttcttaggcctgtagtaaggaatttgaattgtgtgctgtagataatggaaagccattgaataatatttgtcaccattaaacactgataccttaaaatgtcccatgacaaaagaattaca

SEQ ID NO: 50779 - DNA, 2669 bp, Homo sapiens
ctcctcctaagtcctctgtctaggtaagctttaatggctgactgaggataactttttgaaaagtttccttagactgactaggactcaaccaaagacaggggagccatgaaagctcagggacaccgtagactgagtggtcatagtgattttttccggagggagggacagggctggagtgcagtggcataatcacagctcaccacagccttgacctcccaggctcaagtgatcctctgtcctcagcctcccgagtagccagcactataggtgtgtgccaccataccaggctaatttttttaacttttttgtacacaataggtctcactgtgttacccaggctggtcttgaattcctgagctcaagcaatcctcctgccttggcttcccaaagtcctagggttatagatatgagccacagtgcctggcattcactgcaattttaatgtagcttctggctttatggcatggtcccagtgacactgtccaccctgcaaggggccttccaaaaggttctgtttgtttagcccaggaaagtgttcaggaaaatgtgtgggtccatctctaagaatggtatccatgattttcagatgaaactgtctgatacccttggcgatttgattgctgaccatcagtacacactgacaggtgtttactcttctaattctactgtggtcagactgtcactttcttttgtttgttttgttttttgtttttgagacagagtttcactctcattgcccaggctggagggcagtggtgcaatcttggctcactgcaacctctgcctgccgggttcaagtgattctcctgcctcagcctcccgagtagctggtattacaggcacacaccaccatgcccagctaatttttgtatttttactagagacgaggtttcaccatgttggccaggctggtctcaaactcctgacctcaggtgatccgcccacctcagcctcccaaagtgctgggattacaggcgtgagccaccacaactggcccagactgtcactttcaaaagctattccacgtagcagcagatccagcttaacatttgagaccactaaaatagcactaaattaacactaaaatagcaacttaattaggtatcattctgaatgcctcagtgcacatgcaatactgggaaatcacagatagcaaaatcttaattggacaaaaccaatttcttagttttacaaaaatgggaggtaaatggaatcttttggatataagttctgtcttaaagtaggaagccagattttcctcaggctgtattcataaaacaccccaaggcatctgctgccttttttcctctgatcatgttttcatgattcagagaaatatagttaattttaattaaactagccctaggttcatttggagtctacgtgattgagatatgtgtatattcacagatcgataggactttggtaggaatcttagaaataagcttgtccattttgcagatgaataactactatggaattttgtttgtttgtttgatggcagtgactgttttacaggaatgctgtggccacttcagagttttacacatgcaatagactaatcttcgcttattagtatctccaggatttaaggtagtgagaagaatatactggctcctccaaagaacgtcaccagaaaggttattcaatgtagttgacatttgatgaaggttcttttctgttcagcagtgaaggattggttttctctggaagaaacaaccaggccagtattcttgaccaaacacagcccatactggtggcagctaatagcagccctgtgtacagaggctttcaactgccatagccaggctgcaaggggagcaggcaagaatatattaatcttccaagctggatttctaaaacccctggaaagaaacatttacatttcaaatcaaaacatttcattactgaggagcgctgtctacccaaatgagcacttccactccctggtagacaggccagctgaaatgttgttatttcatgaacgtgctaaaagtagatgtctgaatttatttcgttcccatgttaatgagttgtccttcactcttacatgcctataaataatagcacatcattgcttaacatatcttaattctgagagagtttagcttttttatggcagagctgatatgtatagggacatatcacaaactttatgtccttgtcctgtttaaccaatcactgggggccagaaacgcgaaacagaaactcagctcaggcttggcttcaaatacttctaagagtcctgcaccgctccaccaaagataaacaggatcatgtcaagggcctttgagctcatcagataagactctctcccattatgaacaacgtaacttgccatcatctgcagttacagcaaacactgaacttcagttcttgaccctgcacaaacacatacataatgagaccctctgccttgctatggatttccaaaattccttagggtctcttaaaaatctgctgggatgtgaaactttgtctttacctcacccatactcataggcattgtccctcacccctctctcatctgtccctctatcctttcttcctgctttaacttatcttttaaattgtgataaaatatgtataacataaaatttaccattttaaccatttttaagtgtacaatgccatgccattaaatacatgcacaatgttgtgcaaccatc

SEQ ID NO: 50780 - DNA, 1951 bp, Homo sapiens
cccttttctcctttgtgaagcttaccttctagtgaggggagacagtgaacatctataaataagatgtaaatgaaatcatttcagataatgattagtgtatgaaggaaaacctgcataaggagatagagagtgatctcacggggaaagtgtggagagatctccagccagggtgttgggaaggtgcatgatgataggccaatgctttctaggcagaggggaagggccctgaggcagggtcaacgttagcatattcaaggaacttaaaagggatggtgggactaagtgaggtgttagagctggggcaggaaacagagccagatcggggtagccttagaggccatggttttgttgtaattgccacaggcatttatctgcgagcattaaacacaggaatggtaggattcagtttatactggaaaaaaatcactttggctgctgtggggagaatgacctctggggggcaagaatggagcaaaagtggaaacagacctttcaggaagcttctcaagctggacaggcgagtgatagcagtgtcctggattccggttgtggtaccacaggaggtgagaagcgctctgactggggcttcattttggaagtaggactgacactcctgctgatgagttgaacttgcagagcaagggaaaggggaatcaagtgtggctcctgggttttgcctgagctactgggtgtcatttctgagatgagaaaatggtaggagcggtggggtgggagagtcagagttctatcttgtatatgtgaactttgagactccagtatccccctccccaccatcttcactaattcagcagataactgttgagcatctacttactatgtaaagccctctggtaggcgcagggcagagagcagtgcacacagctgagcccctggcctcacaagtttcccttccactagctacactcccaaacacatgccagcaatagaaaacatgcccagagacccatgaaaatggaacctcaaaatggacattcctcagtttcatgcaggtgccaggggagtcatcgctgtacattttagcccctgtccccgagaagctactgaccagagtataaatagaagtaggatgtgctggatgtcttcgctgaattgactcaataatcattggagaaattaacaaatcactggatttgcttgggaacatagagataaaaccttagttaatagaaaaaaacggagtcacttgttgcacatagcatgaacattaatgttctactgaagtccttttgaatatgccttaagtccaagttgcaaaatacatggtcttagacttcggggacgacccagttctctctcagagctctgtgtgtacagagaacctggcagaggtggttgactgacctagttttgtcatgataagggtgttttccccaagattggtttcggcagaaggctgttgccagggcgtaaggcaaggggcagtggctttcgaaagctctgtggggaaagaggtatgatgtgataaacctctgagatggggatcaactcatatgaagtatacaagaaataccgtttttaaagatatggcgtttatcaagtcattgattcttatgaccaagttaatttccataactttgtagcttttacaaactgccttttcaaagccctgggtaacttctttcatttactgtttcaggaaagggtcaccaagcttgcaccctgtccccagtcagaagaggatctggctgctctgtttgaagcttcaatgaaactgtattaattgtcattttaactgaaagaattaccgctggccattgtagtgctgagagcaagagctgatctagctagggctttgtcttttcatctttgcgcataacttacctgttaccagtataggtgggatatacatttatcttgcaggaaattccccaaagctcagagtccagttccttccataaaacaggctggacaaatgaccactatgttagac

SEQ ID NO: 50781 - DNA, 2712 bp, Homo sapiens
agatctcagagtacttgcagatttactcacattttaaattgaattaaatttttaatcttataaatgagtaatataattacttcaggatttttttcaaacagatgagaaaagcattactgtgccattcaacttgcctaggccacttgatctccataaaggtctttattttgttgagattttaaaataatgtttattgggggttttctctaactacagacataaaatatattcggtaccaaaaactgttaatacaaagataaacacaaaagaaaatcattgttcatactgcaccatccaaaagatagctatgtaaaaattttgtatatgttattccagtaattttgtatgcataaatatatgttgtataactagctatatatgtgtacattttttacttagaaatggtattattaaggtgtaattttaatttctacagaacattcaaatttttttataccaagtgccccaaacataggcttaagatggtgccagtagaatttcagctacaccttgcagatcatagctagctaaaatttcttctagctcttcaggagaatcctggagatgagggcagaagctgggcatgaatgaggcagagaacagctaaactctgccaatctgagatccttcaggaaacttcagtaaaagttgttaatgagagtctcaaaatatatttagcatggcaaaaacttatatgtatacacatacacatatatttttccctcaccacccccacctcagaagcagtctaggtaagtttgagaacacttataatatattaggcaatgtgatatgacattattagaagagcattaggctagggttcaagggccctggattttgtttcagttttgtctgagtcttagttcattcaactaaggcctcttccagcttgaaaatgctatgaggccgggcacagtggaggctgaggcaggaggattgcttaagtccaggagttttgagaccagcctgggcaacatggcatggtgaaacaccatatctacaaaaaatacaaaaattagctgggcgtagtggtgcatacctgtagtcctagctactcaggaggctgaggcatgagaatcacttgaacctggagggtggaggttgcagtgagctgagaccacatcactgcactctatcctaggcaacagagcaaaactctgtctcaaaaaaaaaaaaaaagaaaagaaaagaaaagaaagaaagaaaatgctatgactaggttttatgtattacctggtccttaatgtgagattttcgaattgggaaaattcgatgtaaaataatttgagatacaaatatgcattctccccccatctctctcaaatgttcagtgcctttgctaacagtagccagacgtctgaatgtgactcaccaagaggagtgtttggtattcatattgatgatgactctgtagaggaagaatttaaaggtcaagcatgaagaaacagatttaggaagacttggtgtttttatctggatacccatcattctggcccttacaattagagattatggaaaaggtgagttttgtgacttactagctattaaaagaggataagctagattaggcccatttctgtaaatcaaacatttcatgtttcagagacaataattaagtgtattttttctgattctgtatcctatttttctatagatgtcctttaagaaaaattcttaagagtcgcagctccatttatgtggattaaaatacctaccaaggcaaggacatttaatagagtggtattcaagagtttggaaaatactatgttcataaaactatcatcatacggtggcattttcacttaaaatacatgcatatccctaatttattttttgatacagaatactgatttgttccaaataggtcatgtttctatttattgttgagtgccacaataaatagctggctcgttttgcactcctgtccctctctatggcattgttcgagtagctgtggacacagctgtggggtgttttcaagtggtcagtgaagtaagtctgctcttgtaaaatacagacaagtacagtatcaaaatagcgcgaacgcgcaaaaattgctttcctggccttttaaccctgagaaagattaatggttgtttggattagaaactgtaccctaatgagggggctgttgcctctggggagtaggtatgagaaaggggactgttcacctccaggtcatcgttgcacaggctgcgagtctctgacgacccgcaacaccactccagacagctgcccgggctctgccagtaagtgcctggtcctccgggagctgttgaggggaccaggccatcaccatcacaatggcctgggggaggcagtctccaggaccaagcgcactttgaatggacagaaattggttcttaaagccctaggttgaattactggcagctgggggtgggagggtctagtttctcgtgctattattctactgtttttccaaccactccaatcactctcagaataaatgcaatcgcctaacaaattgcaataactgttttgagatttcgtcccctctgaaatgcctcatgaagctatgcgcacaacagctaacttcaaagtaaccccacttcattctttctggctttaagtttttgtctttttcagttgggtgctttaaattgattttccaatttataaaattggaaactgattaaaataatcatgagagaaaaggaagaaaaaaacaactaatcatcctattaccca

SEQ ID NO: 50782 - DNA, 1219 bp, Homo sapiens
caatgaagtgcagtacaagatcatagctcactgtaacctcaaactcatgggctcaaaagattctcctgtgcctcagcctccccagcagctgggagtatatgcaagcaccatcacacctgactaatttttaaaatttttttgtagagatggggtctcgctatgttgcccaagctgatctcaaactcctggcctcaaatgatcctcccaccttggcctcccaaagtgctggaattacaggcatgagtcaccacacctggcctgatgtagacatttttatgactcttggttcacagtgtcaagttacatataactcagaattgccttaaatattgcttcccctctcattcaatcttctcttcaaaataaatactagtgcaaagcaacaagaaatgaaacaaagttcatttgcaagtatggaccagactagactatttgtgccaacctgcaagtcaatagtggttttttttttaatgtcagtacagcttaatggttcacagggattacaattttcagataaacttaggaaaatttggtgttatatccttgcctcttcggtgaaactttaagaccccaaatctcttttttacttactttttttttcttctagagccctctgtggccccctaagcctgtaggtctgtgtttttcagttttgctggccgagaaaaaagacccaagggagtaacatattattttctacaaggatgttctaaaactgctcaggcctgtgagtgaaatgatttgctgcactgcaagggaggtgagtgagaccaaggaactacacccaccaagatcccttccaagggtctaagttgcttctctaatcagaaacctctcaaacctttgcgactgtgcacataggtcccatgatggctttggcaacatttacctgggaccagggtgaacttcgtaccatgtattgcatatgagaaaagaaaagaatgtttgtcaaacaaaccactatgttttattttattttattttattttagtgttgctggtaggtgtgtagtgagttctcagtgtgtgtgtgtgtgtgtgtgtgtgtgcagttttttttttttttttttggacagggtttcactctgtctcccaggctggagtgcaatgacacgatcttggctcaccacaacctctgcctcccgggttcaagtgattctcctgcctcagcctccccagtagctgaaattacaggcgtgttgcctctacgcccagttaat

SEQ ID NO: 50783 - DNA, 1210 bp, Homo sapiens
gaaaaccacaatctgccttgcaaattaagacgagatagatttttctctgtgtctatatataggtgggtgggtgggtgggtgggtgcatgtgtgtgtggaaagaagaagagacagaatatttatcttttctataaaatcataaagtgaatttagagccatgcttctcaaattttaatatgcaaaagaatcacctaggaatcttatttttatgcagattcaaatttagtaggactgggtaggccccaagattttatgtttctaacaagcttccagatgctgctgctctgggcacaacatattgagcagcaaggatttagagaggatctaatgtggtgtttctcaaagtggagtcccaggagcagcagcagcagtctctggaaaattgttggaaatgcaaattttattgaattagaagctccaggtttagggaacattaatctgtattttaacaaccctctccccaccatccctcactgcctccgccccacgtgattctaatgcaccctgaacgtagagagcctctgatttactgtaactgcccctctgccaatttccagaagaaaccgaaaccatagaaactgtttgacctacccaaggtcgcattgcttgtgagcaacagagccaagattgaatctccggtcttttgattccctagctagtgcctcttccccacagggaatgtctttccaactgtcgagttttaaggatcactttcattcctttctaagtagtttgtggaagcttgggctgcctgagtcagtcttttattctgaaagacaagagcaataagttatgatatggagagaatctgcccagcacgtgacagtcagctcatgcaggaaatatgccagcgaggtttcaaaaaaagagagagagagagagactgagctggggattggttcaattccttcacctcctccaatctgatagattccagagtgggtgggagggagggaatgtttctgagtcaaagccagaccatcctcctgtcaagaaaggtgcctgtttccagggagctcagattttggaactgcttttttcctgggccatagaaggcacctggatgcagtagccgtctcacctgggagaaagatgctctggggaatcctgggaattgtaggaactctaaatgcagagacctgactgagaaactctcaggtgcctggaaatggggcagtccccagtcctgggcctgggagaattggctgcc

SEQ ID NO: 50784 - DNA, 890 bp, Homo sapiens
aaaaaaaaaagaatgaagaggaagaggaggcagcacaacagacccttcctcaggcctggagatagtggggctagggtctcacagcttatcagaaatctgtgacaccagcatgggagagcaatccagggcccacacagctaaatccaagtccgtgcaaagtgtgctgggtgagattggcctaaggaaaggggaaaagagtgggaacaagtcctttcacccagagataagggggtgcaagtgttcaccggcccatggcataatgggaaggaagcgtttgcacggaccacaaggtggcacagcagctctgcccacagtcggccagcttgggatgggaggaggggtgaagaaggtgcccttgaccgggaatttccagcaattttaggaatgtggtgacttgaagccttggatagggcttagggggaagaacacagcacagagtgtgtctattgtctaagcagcctctggacttagccctgtttaggccattggttaattttcagttaactctccatgttcctgagtacttgtcactcctttgggagggctgaggagggctgccaaggggtccagtcccagaccctgttacccacatagacactcagtgctgtggggacctgaggacagagaaagatcaacttgggccaccagcctcagggaaggcttcctagaggaaacagccttgaaggggagacagatgaggcctcaagtcagagggtgaaagaggagatattgctgtgccagcatcagagaagggagcacccgctgctgggagcagagctactgacacacgggaccaatgggaggccgagctgcgtagatagagggcgtcctgtgctgaggagcctggaggagcagctgcagagtcaatctgccctgcaaggtgggtgggc

SEQ ID NO: 50785 - DNA, 555 bp, Homo sapiens
aaatgctgaccaacgttttggactggatccacagagaagcacactgagttttctattcagctgcctgagccctgggcattcttcagagagaggccccagttcatcttcaaccagactcctccgagctcaggattcacctcagtcaggcaattgaatgattggcacagggtctggggacatcaggagttaatcagcagcccccagtggacaagacacagctatttctaaaatcacaaatgccccagtgactgttccaagtgtgaccacacttcccaggtgacaacattcagataaaggcaagcaggaaagcaaacagtgggaatggttttattgcctcaccaggactagtttggccacaacaaaccctgctgagggtaggcttgctctcagtttctcagtgtcttcacccacaccccacagtcccccatcttccctgttcaaaacacacacacaccccttttctttctgttcctttccctggtttcccccacattctgctccttgacctctggcagggcctgagtcctcaccatgtcctctgcctgccagggctcc

SEQ ID NO: 50786 - DNA, 2098 bp, Homo sapiens
caatactccctggaagcagatgtcctccatgaagaagaagggaaatgggccccacaggtggtgctgcagagtcccactcgccagccacggacaccacggacacccaggacagtgtagacgggtgggacaatggaccctggatggtgaaggagcaccagattcaaggcagaatgcctggccccaagactcagccccacacttactggagagagagagagagagagagagagagagagagagagagagagagagagagagagagagagagagtgtgtgtgtgtgtgtgtgtgtgtgtgtcattggtcaagctgcctgagtttctttgagtctctatttcccctcatctgtgaaatgtggattaaattacctgcccagccaacctcacaggctgatgaaagatcagaagagagctggtgtataaaaggactttgtaaattgtgaattgcacttctaacatatggtgttatgctaatccactccattcagaaagaagcagatctgggcgtggggagaagtgactcaggcagctgaagacaggagtgagggctgaaaagctaggcggtgactgaaaatagaaccgttttcagagctcccgtgccaggttcctgggaccgggctcgccagcagctggcaggcaggggctccaggctggccaggccccagctacctgctccccagtgctgcagcccgaggtggccagacgccccacctggtcagtgcagtccagcgacctctgctcacaagcaagaagtggaggatgaggaccagttttttgaattcaaatgactctctctcctggagccgcctgcttgctgccaaatgcagcttttggcttcttgcctgcattcctaccagcaaaattagcccacagatgaaacctacaaagcacattggcccaggagaccagaggccctgcctgcatgctccagccccacgagggaagtgtcccctgcccatcctgccttagctgagccccagccctcctattttgaggcaggtaacagggccggtacccacaggactaagcactactaagccatcaaggtccggggcaagctgacctgtgtgggtgtaactaggcacagacttgatgtttcataaacaaacattccttcaaggcatttctgctgctagctcaggccaaggaaagcaaggtaataactcaaggaacagtgacctcaccaggaaagcaggctcctcagtctcacacacaaatcccacatccccatatatcccagactcagtgtgtcatgaaaaatccccaagaggcactcccctgtaaagggagcaggtagccagttgagaagcaggctgggagcagggagggagcttttttccagctgcctagagataccaccatctcaggagcaaggagtgggcagtgcagagggtctctgccctctgtgggtcctgccctcttgccaccacagaaagaaagcagaacaaagccgaaactatttgtcattttggctctttcaggtcctggccaggctctgtgacagcatgctgcctcggcagccactgggagctggagctggagctgggaactgggagccaagcactgggccctgttgtgaaaccactcagcctggtcctgtttcatttcccccatctgctgctttgttcttcctcaggatgtggtgagaggtggagactggggaaggaagtaggaagaagagaggcctggaagtcctggctgtttattccctgatcctccaccctgagaagagagagggcagaaagccaccctgtctctgaacctgggtaaatgcaccccccaggtacccacctgtgtgctggaggctacttgaagctacaggctaaacccacacatcttcctgggccctccagttgggccgcagtggactttaacacattaagacaaatacaactgtattaacagaagctaacatttatgctttacatgtgctggacactgtgctaagtgcatcaagtacctcagctcatgcaatcctccaaacaacaccatgggatggctctttcatttaccctattggtttacagaggcttagagagttcatgaggttgcttgaggtcacatagctatgggtggcggcccagagatggactcaggcag

SEQ ID NO: 50787 - DNA, 2399 bp, Homo sapiens
actcccttcaggactgaaaggtttgtctccagaaacctgcaaggggtatgacaagtgccaaatgtgggtctggggtctcctaaagaaagggctgtgacatgaccagagcaaggagattggctctctggaatagcacgcgcgcgcgcatgtgtgtgtgggtgtgtgtgtgtgactgggttttgctctgttgcccaggctggagtgcagtgttgcaatcatagctcactgcagccctgaactctcgggctcaaggaatactttcaactcagcctcccaagtaacttgaaatacagccacaaaccatcacaatcggctaattttgtgttgttgttgttgttgttgttgaggccaggtctcaccacgttgcctaagctgttctcaaactcctgggctcaagcaatcctcccacctcagccccccaaagtgttgggattacagatgtgagccatcatgcccagcctatagcaccttttgttagtgagtttaggaaaagcaattgagtcaccctaaagccttaatctttacaagaatcacctgatgagtttgtagaaatacaaattcctgggtccctatctcagattaccataggttagggtagaggaaaaaaaaaaaaaacacagggaattcagatgctatcagtccaattggccctaaattgtcagtgagtgagtgaatttcacttgacttcctttcactttcacttcatttcacactttcacttcatttcacaatggcccatgtttttctggagaagaagctgaatcctaaagggcagccttatttaaatagtgagacacatcattgaatatttacttgtaatttatatattgcctgtttctggaattgctgaagcagtcaatgcttgagcaggattgcaaggagagatacatattagggaaaactagaagatgggggaccttacatttgtgagtggctggtatcggctcatccccggttttcacaaatacacattctcatgtagtcctcccagcaacctcattttctaaatgagaaattggaggcttagagaggttcaataacttgctcaaggtcacacagacactaagtgtgtttctgtctgctttgatcccatatcggtccaataccctacagctgcaacctatctgaaactctaaacaagaaagcgtgaaatcacttgtatttaaaattaacagaaaaagaagaaaaaaaaaaaaaaccttttgaaaatgtttgcaccagatgactacatgagcatggccagcaaaacctctcttgaaaggggaaataatttggctgcttgtggtttagaaacattgccccaccctcaatgctgtacctatcaagtcagcaagctccctactaactgtgccctccacttgagtcatgaatatgccagcaacaggaaaggaaggggaaattccattaaacatctgaagtcttgtttcaggaatgagtgactcagaggccactgacagctcccggcccttatgaagaagccacaggcaatcagtgagcacttgacggaacttgggcttccagagcaccaacttctagaggatggttgatttctgggccccaagtctgcagtcaaacatttcagaaacctctggggcaagtgctttaacttccctaactctcggtgtctttgtgtaaaatgaagataacacctactgcacagagaaattgtgaggcacaaaataagatagggaggtaatgacattggcacacagtaggtactggaacgatgggaactcctgattgccaggagaaaggaagaagcataataaacagcagtcagttaaagtgctctcctcttgacttcatttcttcaacaaccataagttgagcgctcactgaatgccgaagacacaaaggagaaggcaggtgggcagacggattgagctcccgtgatgatgcaatgtgatcagtgcagaaacccaagaggagcaaagaggcagggctggggaggagaactgatgagttctgcctggggcatcagaaggacccaggggagctgggcttgggcagggccaggagtaagaggtcactagctagacaaagaaaaggtgttttaggcaaagcaaagagcataaacaaaaccacagatgacagagaatgtgttcggggattggaaaatggtccatttgacaggagaaaagtgcatgatggggatgggtggatgacgagcctgagaaggggaggggcttggaatgccatgctaagcccaggattttgactctggctggcagtggggtgtcataggacgctcacaagaaaagtgaggtgctctgaggagatctctcagaaaagccctcactggcagctctgagaatgacatgatggatagtgccaacatgttgagagtgaccgaaaaaaacaaggagggagaaaaacaaaagaaatgctaagagcctgga

SEQ ID NO: 50788 - DNA, 1812 bp, Homo sapiens
cgcgacctcttcgccatccttcaagtaccgcataggagcaggctgggcggggacgcgggtcagcctcctccagcctccggcgaatgctccttctccccgatcctctagccgcttccctcgctccctctggaggcggccgagtgcggaacgcacgtcctcgacagggcaggacggagggacagcgggggcggaccgcgacccgaccccgaccccggcccgcagcgccgctcttagccccggcccggcccggccagggatacccccaacatgtcaggaggcgcgatcccgccctccgccggcttctcccgccgcttgtcagcctccctgccctggccccagcccggctccgccacaggcgcccgacccctgccctctcccccgcagctagcagttctgcagggctcgcagtctcctgcagggttttgtccgcaccgccgaatctcgcgcccagcctccctcaagagccgccgtttgaatctgcgcacgcggccctgaacctcattggctgtgggggccgcacgcgaagaagcgagggcggggaggggagagcgcgcgcggctgagggcggggctggggagctggaagctgggactggaactcgcgggagtcggggaaggagccgggagccagggggtggggccgcgggtggggccgtaggtggcgcatgcgagccgagctgtcataggacccggaacgcgccgagaggcgcaccgcgcggggcctgctgggagagcgagttcctgcgctcgccgaggagtgggtccggaagcggcgccggagcgggtccggaagcgggcggtggagaagtccagttgccccaaaattcttagggtgagcgaaccgagtttctggcggggtgggtggtcccgcggcccaccaagggaacgtctccgcagcctcgcctcggcgacagctcctggctccttaggtgtcttccgcctcactagttaggatgcgcggtcttcagacttgagacaaatctaaccataaatttgcgcggccgttattttttaagcaaaaatgtgagctatttttacccagacatcatagttacgagagtgacgaagactctggcaggaaaccaaatatcacctgttttcctcaaaaagcagcagaagagtgacaagtgaaaaaagttcctagcgggagacgtgcttggaaccggagataatctgtgtctaccgctggtcttcaaggtgcttaatttcgtgcccgctctacaggaaataacgtgcgcggcggaggagccctgtcctggagaataacgcgtgaagaagacagtggactgggcatttcgtccagatgaatgagcatggtagttaagtgtagaaggtgaccttcttccctctggagagaccagggaggggggaaccaccggaggagtttctagcggttgcagctacttgaggttccagtctaataactacgaactgttcatttcaagtagcattaaagtagatttgctacagtaacaattacacttggctaaggaaaatttgcaaggcaacatggtctattgcatagagcactgagccacatgttaacactgtaacaaacacttgctattttgaaattttacgcttcatcttttgcaaatcagatgcaggtgcagagtgaattaagaggagctgaattaagagagaagcttgcatgcactgctgtcaaaacctaaacacactggcttttttttttttaacagttccttttttcaaggtatagattctgggaaggtaagggaagataaaacagcttttctttttctctcctgtttttttttttgttgttttttttttgagactaggtctcactcta

SEQ ID NO: 50789 - DNA, 2182 bp, Homo sapiens
ctactagagcccgagacacagcatgcaccaagcagtgtccatccccgtccacatgcactggaatgagacattcctggcttttattggcccgcttaatgtcctccagagtgtcatgcaaatacaggaggcttccggagcggtccttgccatagcccacagtgttaacatgctctggttctatgaggaaggcgcggtcacccagtaaggcgcaatcgaacagttcgccctggttcatgtcccggagaagcttggcccggcctgtctgtttgtccattccatagcgagctaatatgggcgacaacaatttgcagtgatagttggaaaggcccatcacctttaccagttccgtgttcttcttgggtgcccccgtaaccccgagcagcgcgttccgcagcaggttgtgtagcactacgtccgggtcggtcacctcctcaacccccagcagctgttgctgctcgtgccgctggccgcactcggtacactcgatgctgacagaaccggaggccgggaaaaatagacgcgcctgacacttcggatccgggcagctcccggaaaggattctccggtctctccgcttcaaaagcccccccgaagcagccgccgacgccaaggacgacggagtctgtggagcctcagggggaggaggtggcggcggcaacggaggcggcggcggcggcggctgagacatagctcctggctctcgtgtctcgctccgcgtcccaggcgaccctcaaaagctcatagcccagacccccaccaacccgactcggtccagtccaggcccagggcgaagcactttcctttccctaccagctcttcctcctcctaagcgaaggcggaagcgccggacgttgtttctcttcttacttctccactgccgtagccgttgccccgaacgtaacggccaccaccccaccccgcactcacactcactcactctcgctctctctccctcagacacagacatacacgccctcattgagtgtgcgcaggcgcagcttccgctctgccctctgggaattagagtcttccagcctctgtgctggccatcaagccctaggatcttgagtccagaaggaactacaagtaccgtgaggccaagcggttcagcgctagaggagaggaggaagaggacggcaacaggaaaaggggcgaaagaaagatggtgactcgcgttgcctgccggtagttgtagttttactgggctctccttcgtcgtcttccccactctgcagcccaaggcaaagagtctgagagaccacatttcctaggatgccgtgcggtgcgtctagctgcacttcctccttaggcggaggggaggattcagggaagcttggttaaaaacagttatggcagtgggagtcgaagcgagggtctgaagttcacgactactagaaggggaggggagtggaaaggctctcagtgaaaaaggtacagtaaataaatgtccagggatattgggggctgggaagttgaataaatggtctaatctaggctggaggccataagggggaaaacagttgattctcggaagctctgccttctccccctctctagtgcgaatcactgaggcgccatttgatttctcgtttcctgcatgttttggcagtttacagtgcaaataacggtaccttggatgtctgtagagttttgtgtgcatatacaaattctcttaactaggtttaatttcatttgctctttaccaccctactccccagagaataataagagccatcatgtgttaagttcttaatatgtgtctggacagcatttgcataacacgatatcatttgatcttaaaaaataaccttcttaggaaacaggcccagaaaggaaatgacttgctaaagttcacgcagctgataagtgagtggatagacattcagatctcaacctgtcttctttttacagatcaggacataggcaggaaaggttaggcctgtattacatagaatagtaactagcatttgcttactattgccttatagtttacatatttaataatatgttcacatgtatcatctcatcctcacaccagtcctgtaatacctttaccaggtggtgttgacttcatttacaatcagggaaactgagactaaaaggaattaagtgacttgcccaaggtcaagtcaccagttatgctggatcccaatctcaaaccttgagagtgatttttacgctg

SEQ ID NO: 50790 - DNA, 1584 bp, Homo sapiens
acatccattgaaccatgtaattcttagttctccactcagcttctctatctgttaaaagagataaacagatctaaaacgcagcttctgtaattcaagaatgagtaataaggagctgtaaagtgtgcactcagctgacttggagattaatgggaataaaaaaaagagtcagtagatctaaaaagatgtgtggaaaggaaatttctctgcacacaggatctgccaatttgtgaaagttctcgactgtttataaacacaagggccgtaactctgctaatgacaaaagtggaaaactgtccaaataatgctaaatgaatcacagttgttctcaattatttggatatttaattcactcctctgagtttccagtttacaccaagccaacccccccaacaccacgggcccacccggggggtcctgatccctgcacacaccaggtcatctctgttgggccccggcgctctggcccgcgccggtcttgggccccagggtagcggccactgcgggcggagcagagggaaacaccagagtctgtgactccagacaggacccactgtgtcctcttgaactttgcacagcgcgtgacgggggcagacggtgcaccgtggcccggcctttcgcgggggtcctcggggaagagagaggagcgcgggtttcctcggaggcctgagcgggacgcagcctgcagcccctccccgcacgggctgcccccggcccgccgctcgcgccgctctgctgggatccggcgccttccccggctgtcctcggcctcccgcgcgctccgcgggaggagccgccagcggccgtgacgcgtcaaggaggaaacgccggcgcccggcggccctgccgggaaggaggaagcgcagtgcgttcggctccgcgcccgccgcgccgggagcagcaccgcggggccaggtaggtgcggggccggcgggagggtccgcgcgcccgggactccgacggcggcccggggcgggaggagacggggcggggcgagggctgcccgggcctcggccgctgcctgtcctcggaaaaagccgtacctccgcccagcccccggctcccggagagtttgtggtctttgtttccacgaggtgaattcagatcctgcctcgagattcctaaacgcccaaggggcgtcggtggctggaccttgttaacccccacgcagccgccgagcctggaggaactgggaacgccgagcagggagaccctatctgaggtcgaaagtgggtgcaggtcacctgcgagggtcggggagggggcagccgccagagtggggtggatggaatcgtttaacctgttgtcagcggatctgtagtaaaagaccttaatacgttgcgtcttttaagttctctgtaatttgaacccttacgtctcttcaagtgaatctggccctattaattctcacagttttagctttggaatgtacccacaagaagtgctttgagatttttagattctgtcatttttagtcatcgttacttggaaagagaaaagagaaaggaatcatctcttgaaacttaaaacgctttcattgagttgtgcacagtgacttctgaaccatgagtagaatttcagtcctgc

SEQ ID NO: 50791 - DNA, 880 bp, Homo sapiens
gccctgaattcgtgtgtgactcctaccccgcccgaggaaaatgagattatgccagtgtcttgaatgagcgcggttgttttgagatctacactttagcgggaacctggggagagtgccttctcattccttgcccccgcccaaggctctcttcaccttccccgcgggggtcctctcgttttctgtctcccaaatgctggcttcccgcctttcctcccccgcttatttacttaattaaggccctggggctgcaccccaccggcagctccttcgggggtgtggccgaagagctccgagggcggggctgaccgagccatattcgggcgtggccggtggtgattggtgagggcggggcctgccgcagggggcggggcctgcaggtttggcccccgcagggagcgcagctggcgccgctgggagctggtggcgcggcgcaggtcccggccgagtgtggcgcagcagtggcggcgcttcccattcgccatgcgccgggggtgggtgcccgaaggtaagcgtgtggctcatcgagcttgcgcgaggaacccttggcggagaacagccccggcactgcgcgggccaggtggagggaccccgggggcgcgggaggcaggtgtggtgtgacgggccccggtgccatttccgcgcccatcacgagcgcggggcggggcgcgcgggcggcccctcctgtgaacccctgagaggagaggcgggctccacacccgggcgtgctgcgacttcgcggcactcattcactgcacttggtccgagacagaaaacgtttgagttgttccacacacaccccctctaaatgtcgagaagccccaggtactgtcaagtttgtatatcctttaaaatatagtttgtggttcaggacaggaggaga

SEQ ID NO: 50792 - DNA, 2012 bp, Homo sapiens
cagaattcaagctactgaagcctcaaaaataataatacctaaaatatttcaaggataagccatgacattcgtcttcttgacagttaatgattatttcagacgaagcaatgcatttcaaatttgaagaaaaaaaaaaacctatacgaagtctcactgatgaaattttaaaatttgtttctatggccgggcgcggtaactcacgcctataatcccagcactttgagaggcctaggcgggtggatcacgagtggtcaggctggtcaggagttcaagaccagcctggccagatggtgaaaccccgtctctactagaaatacaaaaattagccgggcgtggtggcaggcgcctgtaatcccagctactcgggaggctgaggcagagaactgcttgaaccccgggaggtggaggattcagtgagccaagatcgcgtcactgcactccaccctgggcgacagaacagactctggctcaaaaaaaaaaaaaaaaaagtttctgaatagctaacaggttttcccagcctcccagttgctgaccggtttcttctgtattatgtccagaaatacacatctctatgtaaatacaagcatctccgtgtgtagcaggcatttagcctaagggcctcctatacttgcacgtgttgttctccaacctccatgccttgactttagcgcgtattacgaaggaaggtccaggaacaaatactgactagctctacgaatgggtcgagactagtaatgactcagtaaactgcgctcattacagtttcaaagccactcacaaagtacggttaactaagggtcgtcctgacacctaagggataatcaccttcctatttataaaacgctcccttttaaggaaaacaagctgcctaagagcctgaaaccgccaaggccgcacgcacaactttgctggggacacaagagagatctggccaagaccgggtggagcacgaagcctcccgacggtcccttgcaggcacctccttaagtcagaaggcccttgcccagtttctgagcagaggacagcgaaccggtgttgacggagaaaggtcagctaagccttccaggtggttactcacaaaacgcgactgcgcaaatggcttgtggggaaagctcgtgggccttgggggcaccgggagcgtagccttttggcctacgcagcagccgcccgctccgctgcgcccggggaagggacaggggccgcgctgggcacccatatggcggaggaacccggcacgtagaggagttggacctaagaccgcgatcactctcacctcgcagagcccagctacgggcccgcagtctccgccgccgccaccacaccggcatgactaacggctcttcgcgcttcttcctccctcgccggtcgcgcgggaaaggaagagcgacatcggaagacagctcttaggcactccggtggccccgcctcttccggtacgcggccccgcccctccgcgggtgcgaaggggggctgagtgcaccggctctggggagggggcggaggggagatgagacccgcaccttagccctcttccctggttgcgcggtgcggcgacgctgtgtgccacacagcaagtttatgtgggggctttgtgacttcccgcaggggcttttcaggctcaggagtaactctgctagagctagtcaatgtttaatttaccagtttgcagtggatgcaaacgagcagaatatgccctaaaaggccgggcgcggtggctcaagcctgtaatcccagccctttgggaggcctaggcgggaggatcacccgatgtcaggagttcgagaccagcctggccaacatggtgaaacccccatctctactaaaaatacaaaaaaattggccgattgtggtgacgcgtgcctgtagtcccagctacccggaagctgaggcacgagaaatcgcttgaacccgggcagcggaggttgcagtgagccaagatcgcgccactgcactctagcctgggtaaggctccgtctcaaaacaaacaaacaaaccaaaaaacatatatatag

SEQ ID NO: 50793 - DNA, 2254 bp, Homo sapiens
attatgggtaaagatccctcgacttgtcaccactcccagggaaaaatggatattgttgaagggcaaaaggtcttaagctctatttttataatttctggcttatgggaactggtggagtaacattttagagaccaggtagtagagcctccgtgtgcctccgaaataattaccagcaatcaaaaaactattataggcccaggcctcacgcctgtaatcccagcactttggaaggcgaaggcgggaggatcgcttgaaggcagaagctcgagatcagcctgagcaacacagcgaggacccatttctattaaaaaaaaaagaaaagaaaatagctcatagctatttttgagaccttgggctgctgactcgatttctgaaaacagctgcaatccccagtttgggattagttgaagacccaaacaaggtgcatgtcgacactgggctcaaggtagggtgtgtggcatatatgacaatacggatgttcagaagtgacaacttaaatcaccgcttgttgttctccccttacatcacccgggggcaaatggattaaagcgacagaaaggggagtgaaagccccagcggagggcttaggctctacttgcagatccaagacgcatattctgtccccctcccagtcggtgaaagctcttcacccctttcacctccctctccctctgggtctcttaaactccgccaccctttccctcccctgcgtctcgccagggacctcctcactccttagtccagggcttcgccgccaggatttcttgctgctgtttcttgtcgtatttgtagatttcatcgatactctgagcttcctgcatgttgttggccagttcccaggttttctgggccataccgctcccggacgccgccatcgccgaggaagcggagaagttgtcgtctctacaaccaagacgcaactttacctcgctaggtttccgggtgtgggccttgaccctccgcaccacgggaacaaactcttacctagactcttggggcagccatgacacctagaaccggaggtgaagttggtagagaccattcagggaagacagggacctttccgggacatgacgatataaacagcagttacagtaatagcgagagacgaatcttcttgttgcttaaatgagaacatcttgtctcggaaaattatatgtgtgaaatagaacaaacaaagttatagggtatgggagtggtatagtcttccgcaccggaagaagggcatgtaacgttattccagaaactggtatttgccttctctgcttctaatgcgcaggctcggcctccgccatattaaaggtagctggagccttaagagcgggatgtggagggcggaaagtgtttttgtgtgggtataggtaccttaaatgagataagtttgttgaaagactaaaaggtaaggctgtctgttgtacaactgagctaaaagtcgttctggaagctggttgagaggaagataaacatggcattcccgtttacttcaagatgactcactgtacatgcgtaaaagctaacgggctcgtggtggcttggcacttcacttgcagatgggctttttctatcgatgcgaggaggcagtgggtactccttgattgcttttttgcgctttggtaaaagttaacatctacgtatatataatgtgccattactgatctgaaaatgtccagtactcagttctcgtaacaggttacagttaaatctttggcactcctgtgaaccgcatttgttcccaaagcgtaattaatctgggtaactggtttgttttcttcctacagttaatacaatgtttaatttttttattagttcacgtgttttaggttttcttttttctccatctcattcttccatccgtgcaagattttaagtttcaagacacagggagcaggtctgcgttccttgttttatctcctagcacctagcataggtgttcaagatttttttttcttttatttcctgaaaagatagcatgacaggccaggcgcggtggctcacgcctgtaatcccagcactttgggcagccgaggcgggctgatcacttgaggtcgggagttcaagaccagcctggccaacatggtgaaaccccgtctctactaaaaaaatacaaaaaaaaattagccgggcgtgatgatgtgcgcctgtagtcccggctactcatgaggctgaggcaggagaatcgtttgaacccaggaggcggaagttgcagtgatccgagattgcgccactccagcctgttagacagagccagtctcaa

SEQ ID NO: 50794 - DNA, 1371 bp, Homo sapiens
gctaggagtaatgccctgagaggtatgccaacacttttcctctcactaccacccctccccatttttctttccaggctcttacactgttcctaagctggctggtgcatgggaggctggagaggctgcaatagatttagcctgagaagtggcccccacagtttaatagcccctgggcacagcaggagaacgagttgaccaagtccccggccagcgtactggcgaaccgagagcagcgggcagctatgcggcctccaggacagcagggggcgatgtcttgccgcgcggccgcctgcagtgggggcggggccgtacccggcggttggcgaagggcgagcggagggctgggcctgaggggcggagccccggcccggaggtctgtcatgctgttcccgctccaggtggccgctgtaacctcttcggtccgcgacgatcctctagagcactgtgtgtctccccggacgcgagcccgctcccctgagtaagagtcagccagccgcggatggggagcgtgagtggcgaggtgtggcctggggtggtgtaggttgagggtggagggtcctggggctgcattcgctgccccggagcgggggcaggggcagtggctccctcggggcgtaggtctcgaggcaactaggccggcgacgtgccagagttacaggctctggaatctgggggtgggggtggggtttcttgtcggcagggggtctcgtggcggctgggtgcggtgggggaggtgcccgagttaagggtgtggagagttgggatttcgccgccgtgaggccggcatcggtgactacgagttatgagggttgggggcgggagttctgtgagcaggggtcttgcagctgccggggtcggggaggttccctggttacacggtccggattcctgggccactgcggtcgctgctgcccgcggtgttgttgatagctggttgcctgacgacgcttcctagtcagccacctccagggcccgggggcgagcggttccttggttcccatgcgccttctctccccaacggccaggccccccctgctccgtcaagcctccccgagcgcctttcttgcccctcggtgcttgttattgttaacgtgggagcgcttgtgcgcactgctttgctagtaaaacttatttaatcttcaccgtagctcgtagctcgtactgttgtgaccgtatttccccccgtgattgcccgactgcttgagcttgaacctcttgtttctaactgccttgattttaggaatcttatgtgggactcaaatccagttgtcagtacatgttattaatgggactcatcttttgagagaggctagctctcaagattgtaggattaagacgcttaactaggattgcggggaagactaaattctg

SEQ ID NO: 50795 - DNA, 525 bp, Homo sapiens
ttttggagagcatacagtgttaaagtctggaatggatgagatcgcatagactagtacgaagaatggaacttggcatttaatggaggatggacagacaaagatgagctcatgaaaaatactgaggagaagccagagagactggaggagaagcaggagaatgtaggatcctgaaacctgaggggaaggagtatcaaggagacaggatcatgtaaggtgaataccggaaaatgtcagttggatgaggtcattggtgacctcagctagagctttttaagtggaatgattgccgattaactttggaatgaggattgactaggaggcaagatgttggagacaataggcataagacttttagaagacccttggctgggaaagggaagggaaggagagggatcaggagctggaagagtccttagaatgtgaacgtgaggagctatgcaggagaaagaggttcaggctctaggagagggagagtgattgttgaagtgaaatctaggggatttgagggaagagttaggagaagct

SEQ ID NO: 50796 - DNA, 1712 bp, Homo sapiens
gaaaattctacctgtattttctaacacccttttattgaaaagaatcattcatcttttcccttgaaactggttccacatgttggagaggagaataacaatattcccagtcttcaaattcttaacttcagaatcacctttgatatccttcccctcttccactatcaatattcaactagtcactaaatttttcttctgatctgtttttcatatcacctgttcatttccattcctacctagttctggccctcataatctcagtcctagattactgaaaccatttcatgagtgatttccctgccattaattatttccctcttcaatctctctttcatccccctgccagattatttcctaaatcgtctccttcattctgcttactgttacttacaagataaaatataaactctttaccctagcatttaaagcacttcccttcaacagtctagccaaaatgtgccatccctcaactatctaaaacttacctaccaagactcaatttgggttctcaatgaaaagttcctctccattgttctcatctgcctttgaactaagcatttacttagctaagtactactcaaatcagaattacgttcatacagttgcatataaattatttcaggtgtgttaatgttgccttcacaaccagataaagtttcctaaggttaggaatcaagtaatattcatttttgtactttcctaccttactcaaaattaagtccaaagcaggtgctctacaaacacttgacctgagtgaccaaacactcaataaatgcccttctgaatgcaaacataacagatgatatcatttaaacctgctgaactcaaattctattctaggaactgaatgatgtgaaaaagatgtaacccctgtcctcacagagttaataatttacaccaggagagacagatatgtttataatgaacttcaatgcaatgtaatgactacttcatggctgaaatgaactaactacatagaataaaagtttgctaaatagaactaatttcaatagggacaagaacagggtgttagctcatagaaaggcttcacatatgatgaaatattaattcaacctggacctagaagggtaactatgtagaaaaggaaggagaaagaaaagcaattgagacagaggggcagctatataaagtaatggaaacatacaactgtacatcatgttttcacatacttggtagtatagccataatgaaggattggcagacaccaggaagaagggaaaagaacagcagtaggagataaagctgaaaagacagactagaaaaaagaatgtgaagagccttgacccttaggtttaatgtactactttcgaaaacagggatccgttaggtcttttagaagattgatatgatctaatctattttccaaaagacaacactgataatatctggagaacatactgaaataggaaaaaatattgaaatcagagagataaactaaaagtctactgctataatacaagtgaacaagaatgaaagcctgaagtaagtgacacagtattggggtggtagggaaatagtgtcaaggcaaacttgacacgcacagcatgttacaggaattttacaaagaaaaacctatgagaaaaaaacaatgccaatcataagataacttcctttgtgtatcaacaggatatcctttccacagaggaaatatatatatgttctgtggggaaaaaatatgtgtatgtgtgtatata

SEQ ID NO: 50797 - DNA, 2067 bp, Homo sapiens
ggctgcacctcttgcaaaccccttctcaagactgtcaacaaggaaacaacttcagcagcctatctccccaaagtacctcgccaaacgaaaaagttattgttaattatgatacggaacctttcccacacccaatcttgacataccagccccacctcaatttccaagctaataaacaacagctcatcttctgcttcatcacaaagggtggtatccagtccgcacctcacggaccaccaacaaaatcctctcactctcaagtcgatccctcgaacccaggtgccccgcgatcctaagccctgccgcgtttcccgagcccagctcactgcccttcctcctctaccccgcctctgccccacatccagccgagttcctgtcaactccagacagggaacagagggctccgcgagggcttcccgaggtcagaggcgcgggcctcgggcaagccccgggcgaccccacccccccacaggcgcccccctccccgccccacaacaagcaccccatcccccgggcctcctccccgctcacctaacgccacctcgcaagctttgcgcagctgggagtgatgcgccttcttcacttccttgtcggccaatatcttctccagagcccgggtcaggaacatgttcttcgtcttcttcccctcatacatggacgcagagaaggaggcggcggctcgtccgacccgcggctcccagcggctggaggggaggaggaggagaggaaggaagagaagagagaaaggagagggggtggaggtgggggattggaggcgtggagggcagcggcaggatcaggaaggggcgggcgagcgggaccagccgcggtgtcggcgaagggcgtcgaggtcctcgccgcccccaagaagccgtacctcgagggccgcgcccgtcgggcctccgcttctcccggcccgggggtcgcgtcccggccgcccctctcactcgtccctccggccctggtggcggtgagggagcccggcccgggcggctgtctgccgggaactgagggacgaggtggcggcggctctcagaggcaccgcgagagaagggctaccctggctactgtggggattagcacccgccgcggccgcgaactggcccccatcaccgccgacctgccccggccgccatgttgggaggaaacgacgcgtcacgcagcggccgaacggctgcagacgaggaagcggcggcggcggcggcggcggcggcgctccctgcccagagctgccgcggcgccgggaggctgggggcggagggcggcgcgggaggagcggcccgagccgcagcgctacggcggcccggcggggcctccagcgttcgcctgcagggcggcgtggggcgtggcgggcctctggtggcaccgcgcccagcacttcgggctcttggtggcggccgagctgcgggaccagagatccccccactcggcacccctgctcctgccgagtgaacaggactcctggctactctgcactggctttctaactttctgatgggggtgcagtcctttgcattccaggggtcacagcaacacccgcatcgcccgttctcagccgcagggtctccgcctgcatcactcgactctaaaatttccttccctagtgcacggaactgctgtccaggactctgctctccgactacctcagggaggattctgttttgggaaaagtaagccaaaacctattgataagggttcaaaaatgtttcacttttttctctctctgtcggataaatcggtcaactctagatttcaggtcccttctgaattgactcagttaaggtgaatggttgtgaatgaggtcccttagagttctgtgtttctgtgcctttaatactaagatttagtccaggacatgtaaaccagtttagaatggaaaagctttaagtacaaacagattaacacacgtgaccatgtgtttgctttagtctgagtgtagaactcaaatttctgcagtatttaatttctacagtttccttctgagcagaaaaagaataccataaaaatatttgcaaacattatatatggtgatctagggtcacgtctccaagttctaagcttctgtggctc

SEQ ID NO: 50798 - DNA, 448 bp, Homo sapiens
tatttaatgtcttgaattttgttttaatataacagttaagataccaataactggcagacaactgctgataccaaggcactaaattactatttcaataaagtttataagccatttttctggaaagaccacccactaattctatctacccactgccattctcaagagttaaatcttgtttgcgtggactcatgccagggcattccgggtggtaagatgctatttgcttttgatggtgcaagtgtttgcattccttcatgcttaacatcaatagtgcacaaaaaagggagccgaaagccattttaaaagaaattggattatagagaacatacactgatactggctcagaaactacagcatgagaatcccaggagaaacttgttcctaaatagcttgttgtttttgaactgatttgtctcatgtaattcaaccaaagattgttcttcatttc

SEQ ID NO: 50799 - DNA, 1289 bp, Homo sapiens
ctttatattcctgatattatgttgacctaatatgtatattaaaagaacatttggaaaatgattatgtttatatgtttatattgaaaggatgttgactgttaggttatatcgaatgaaaattcctttttcagaaattaaactctttaaaattgaatatgaaaagccttacattctgcttttctttaatttacattatatcataagcatattcttttttcccactatggttttgttattctgaaagttaaaaaaaaaattacatctatcttacaagctaaacgcaataagcatattcttacataaaactatctattagtctaattctaatggctgtgcattattgcagccttatctgttttagtaccaattagaccaagtagcctcttattattcaccttttaaaagtttaagactttaattttggtgttaaatcataacatagagttgccatacgtgatttaatgttaggcttttaggttggatattcccaaatagtttgtcccaggctactgatcattgggattggtgacagaaatgctgggacctcagcgttccagtccttctggtaactggttgaactttcattccgtgcaagcagcctattctgggttcactgtgtactgtacaaatattgttatttcctttatttgttttgatgtgaaggtgttgggacacactggttaagattgcgtctgagatttgaggcttgagagtaatgctttggagaacaaaaatcacagtcagtgtctcaatgttttcctcaggctaaagtccttaaagggttaaagtatatgaactattttaaagttcttaatacattccagaggaaggccattaggcatatttaccaggaatctcctaaactcttgccagaattaagtattctcttaaaatctataaatgaaaagtaaaaatcccacaaaattatttcatcatattgataaatataaaatgaaactttttgtccttgaagttggatttcctggtttaccagtgaatttctttaatcactaataaataatttttacatatatttattagactttttaatgatttttttgtgttcctggccatatttctttcggagagtttattttcctattgacttgttgatatttattatgtattaaaaataatgacttgtatcatttcatattgtggcaaataatttttagcaatttttctcttgtcttttaatgttataatagcttttttattacagagaagctatatttttctctttccaatttcttccattcattttatacagttttttctctccaatatta

SEQ ID NO: 50800 - DNA, 2356 bp, Homo sapiens
ctgggcatggtggcaggcacctgtaaccccagttacttgggaggctgagacaggagaactgtttgaaccttggaggcggaggttgcagtgagctgagatcaccccactgtgctccagcctgggcaacagagtgagactctgtctcaacaaaaaaaaagaaacagtttgctagtgtcatttgtttttgataattcatcccttctttattaatttgaactttttcttttcatcttaattactatgtataatattgtcacagctaatatttattaaatctttaatttttaccaggcattgtacaaacatcccattttgtttgcaagcagattgtaattattaaccaacttatacatgagaaaactaatattgagggagatgtaatagattgctttaaatccctcagtttgtaagcctggggagccaggattgtacctactccacgttcgccaaatgtaggctgcactaagttaacgattctcatctaggcaatggagagttagcctccattaacatatgttatttctgttttagttattgtagttttacatgtttaaagtagataaagtccttccttttgttcttcttttgcaaaatcaaagagtttaactacatcatacaataactagctgttctaaagcatgccttcttatatgattttttttttaagaacaggtttagcgtttcaatatttcaagaaaagcttgggagaccttttcccagaatacaaaaaactattcatcagcttctagagattatttagtttgcttatacagaaagtatttcatctagtgatttttatagagtttcttaaataaagcttaaatcatattcacaagaatcttataaattagaagacagaattgaaatcttaacttccagttattttgttcagaatattgggacatctagattcagagataacacaaactgcttgggaaaaaaggaagctgagtaatttgtaagtaagtaagtaaatatctctccacgatgtcacaactacaaaaatgtattagtatttctcaagaattgtgaatcagatgtctgtatttattttacttaaatctgaatttctgaaacttgtcattttcaagtttcactaattttttttatgtttatcaagaaagtatttgcattccagtagtaagaatacaagcatattttaaaaaagaaatttctggaaagatcacctaatcgaagaagaaatataaagggtttattagctaaggagacaaacttcaaataatatcaagaaaaggtaatcaagaactagtagacatctgtacttggagatcacaaaagttgagaaatggccatgtagggtctgttgttccaggagaaagtgacaagaatatctcagcctgaagaacctgcagcctaaggacagtcaaatgcaagcagacagtagggagaccttggaagtggaagtcattaacctctgccaggggtgcatttcctgacacctgtatgttcctgtggccccaccacttgaggccaagtcagtgatcaacgtggggaaatcaataatactttggtggatttgcctcactagactgcattcctgggagatgacaatatgaatgaacatgctcaattcaaattttgcttgtagtcttttctattcccaacaaaacttccacctccagatccctttcagtttccattcctgtcttctggccagtgccccacctcattgccattattgtagaaacctcttcctacaggatatcaccactgtttctcctagttaataacctaggaagctgcacaccatccttcatccctccttctgcttccagcctgggttaaggcggtcacactcatcatgttaacatctctgctgcactcttatttgtccacatgactgtccaacccaggagttcccatctggcgggtagtgggatacatgccactctgggcggccagacctttcttgagatttactgctgtagatattgatagagatacaggtggggaaactaattgtgaatggcccacagctctcctagactatatacttcccctgaaagagcaggaactctgctataatcacatgaaataattgaaattaaggccttacttacattaacttatttaaaattacacaacccctttgtgaggtaagtttatcttaatttttagatggaaaaacttagttttagagaaggtaagtaactacagttaatggtgtaggtatgattggaacctatctgtcacattccaaagccctggtggcccatcttggggcactaatgggattcaaataatcactttcccactagtttctggaggccagggagtatgtacctggacttcagggagcagtttcaatggtatctgtcttatacacaagatttat

SEQ ID NO: 50801 - DNA, 689 bp, Homo sapiens
tttaatttctatttggttctttttataatttctattcatgactgggtttatttttatttgtttcaaaagaatttataattgattatagcagcatgtatgtgggctgctttaaaatccttttcgaataattccaagatctgactcatctcagtatgagccttaccttttggtgttgattgccttttctccttcagcttgattttcttgtatgagacatgatttcttggtattttgtatgttatgttagcctctggatcttatttatatcttgtattttagcaggcagtcacaccgtttatgttgattacaaggtcctggcctccttttgtagactatgatttcaagagcagttcaattttcagaccctttgctttgttattctcatctgctttatctgatgctactatcactcctggtgctgcctaacagagtagaagtagcttcaccagtctggaatgctgggtgtttccaagtaggagaggggaatcccagacccatgagagcaagtcagttctcactttattttactagcctttccaacaatatttaatgcagttgatgatgccatcctttagaaaccctttcataacttggcttctgagataacactttcttttgttttttctcactgctcacttcttttagtcttgtctgataactttccttcttctcttcaacttttaaatatt

SEQ ID NO: 50802 - DNA, 763 bp, Homo sapiens
ttcccatacctgtaaatgtgtgtgactgtgtgtgtgtgcatgtacactcacacacacacaaatacacaagttcaagtgaaatctaaatgcttggtaaaacagtccatgtgcactaatttgcaagagttgttgtgagggtagagcttttgaataaacataggttgtcaaaggaaaaactccctctgtgtaagccacaggacaaaggttttgaaacacctttgttatctaaagctggaaagaaatgtcttgccttaaaagaatttgcacattcgtacctctttccacaaatacgtgaaaggacgtgcttttgaagataagaaaagtttaaattctacaaaaaaaaaaaatctgatttgggcagaactcattgctcccttttctctgtttctaccttgttcttctctgggtggatcatttactacttatactgtcagtgttggtgttgcttgtttacttagatccctgaagtcgagttgcacaactccagggggcattcagataaaatatcatgtgaatgatgccctggagttttgcaggtagctttgtcctgaagacagggacaaaaatgtttcatctctttacctcccagtgcctggtggacatgccttcggaccaagtagttgcacaattcattgttgcttagcaaatgaacaaatatgttcacctcactaaatagctgacatgaaaacattttaaaaatagtatcaagatatttaaacagtcgattttatgaatttaaaagacacctagagatactacaatt

SEQ ID NO: 50803 - DNA, 1300 bp, Homo sapiens
aaatttctacgtaagaaggaagaatccagcaagaatatccaacagtcaaatcacttgcccaaatatgaacgggtcaaagaactatgccagcaggccaggtaccagacagcctgtgaacaaccggggcaggtgagtgacgcaggctttctttaccaccactcatgtgcttctccatctctaatttagaaaattgtccacatataaaagaatgtacatttgtgtataaataagcttttcctagtggccttgagggcaagctcactgagacacctctccgcggacagaattacgtaactggttcaggctgggcctccccattactacttgggctccctccagttaaaaaagatgatgatctcagagaaagttctatgccaaaagacactggtttcctctgaggagaagattcctgttatagtccctgttaactagtcactgaagagttgccaaaaggctacttagtcaaagcacaggtacgtgctgagcctcttggcagtgaaccaccccaagagacatgatagggccttcaccctaggctaaagtcagaatgtcatcttacccccagtagaggacagagcctgtgaccaagcttgaggaatgagaagagaaaccatattctgtttgtttattgttcctacttctgctcacaaagattctggcatcaaatatttcattagaatagatcctcttcgttagtagaaatattactatagaccccagagctacccagaataccagttattatcagtaagaataaaagaaatactgtgtgatgaattaacattgcttttaaagaaagtgagtacgtatgaatttaaaccagtttaaaaccattgattttaaatgcccttgattgaaatgtatgctagctaaaagaaaatgctgtgtcatgacaagaggaactgaactttggcccaaatcattgcagctgagaacaaaatcagaggaaagtgaaaaatactaacacatagtgagcatttgtcttacatcaggcacagtacgcaggattttgtagcatttactcaatttaatcctcacaactgtagagtgaggtgggcattggcatctccattttacaaatgggcagctgggattcaaacaggagttgtctgattcaataactcaggccacttgctgccttccaaggtaagttacaataaccaggtgaagagaagttcaaatctgtgagtcttttttaacttaactgacctctagatatccacacaattcaccaacaccagttcaagatgtcaggctcatggaatgagtaggtaacaaagttattattaaaatggcctca

SEQ ID NO: 50804 - DNA, 672 bp, Homo sapiens
gtgggggatggtgggatgtttgttagttgccctttagtgaaacattgtctaattcaaatcctcattgtagagatgcaaaccctaagggtcaggaagaagaaagtttttattcattccttcatcaaatctattgggcatatctttgttgattgaaccaaggataagatgcactcagtagcagaaacgctcctacgtctgcttctgacacttccttgtttcctctggattttcagtctttttgaaaagctctctaatctttctcaacctgacttctattcacaaaaaatcctgctctgtgaacaacatataatattttttatgactaaggctctcgaggggatctgggctattcagaacaccgtgctgtgaacatagaggtggtaatgtggagagcaccgaggtgaatgtcctcagagcccagaatatatccacataagtaggtcatgtttgtctttgtttttcagtgtgagcgtgcacacatgtgcttgggaaacaaatcccagacatacggactgtgctattaatcatcaaaggtaagtgaagcaaaaaacattttagttaattgaaagatttagtcaacagacattttcctgcactgtgcccaaatatataaaattaaaacacttaaaatttcttttttcccactaagagttgtgaaaagtagccatttat

SEQ ID NO: 50805 - DNA, 2323 bp, Homo sapiens
tgccacagggggcaggggtccgcgcggtactgcgatgagccctactcggcgtccctctccgggcggtagcttgaggcaggcgcctcgcgcgtcccgggctcatcccctccgccgccgccgccgccgccgccgctgggcccgcggccaggagcgagtgcaccctgcgccgggggtgggggggcacttagcgctgctgtccgtacagcatcccacctcgctgcgccaggggtaccgggtgttcgccgcctgggctcgcggcaccctcgggagtgaagctgccgacctgcaaagcagaaagagggcggtcagcgaagagcggctgcggcttggggctagcgtcccagcgccccggggaccagggttaggtgaccccgaaccgtccctagagggacggaggagctagtcaggagcggagccccggaggactaggcagcagccggctgcagtctccagtcccggaacaataagcagcaggcggtcggcggagactctccctcattgtctgccgcggacctgcccccgtcccgccccttctgccttaaacattgcgtttgcttttatatgttaataattatcaacctggcagctctgactcagaggcagtgtcttttaatcgagtgaactaactgcagcctttccgtactcctactccattactcaaaatagaaaatgcccaaaagaacaaaggaaactttttcacagacacacaatgtattccctgtcccaatttttctaaaaggaaaaaagaaggtgggggtaaactacgtgtgtagaaatgtgtgtgcacactggtgtgcgttggcacgtgtgcgcgactagatttgaatctgtctgctccaccagagacacacattcaaagccgaaggcagcagcaaaaaggtcaacatgcttgcctctttattcccaacaccaaaaataaccccctgaccgaaagaactcttcaattacaaataccaggggcattcgaggctgtggcccgcactaagtcccagagcgcggtatcaaacgaaaccgaaaatccgtctgctttgccgagagctagggaagccacaaccaaacaaagagatcccggcacgctgtcagagagcgcgcgaggagcccacggagccggctgggcgcacgcgggccggcggggaggtgtgctattgactgagcgcaccccgctagcgtgggcctggggagcgtgtgcgcgtgcgcggccacacacacacacacacacacacacacacacacacacacacaccggcgtactggaacctctctcgcgatcccgcacccagcttgaattcagcaagaatcgaaaacaggtgtgcccccgtggtaagaccccgcccctaatcttggggacccccactccactcctccagcctggggcaaggacggggggcggaatatgcaccaggtgggagacagccgagcttcactacactgggtttcattttgcagcgcgcctttgtgatgctgctgagaaaagaaaggaggaagggcaagggagaaaggcagagaggctgggcggccaagggtggccgctccggcatctccctcggctgtgctgggccaaacccgctcccagattcccggcctgccagccactcacaatcccgggcttccccgccgctgccttacccaggcgccttcccggggaaccccaccagccgctgcgtgaggagccggggaatcccagcaaactctcgccgctcgcggggggcgtccgaaccccctgcttaggcgagcgccctcacagcatcgcagactcggatggacacgcggatcccggcagggagctcttggagcaggcgtggaatcccagggacaccccctgcgcgcacatcacatacacgcacatcctacacacacacacacacacacacacacacacacacacacacacacagagcccgtgggaagacaagaccgccggcgacagcccgccgcgctgcccgggcgctcaagccgccgctactcactagcgagtctgtcagtctgtctgcctggctgagtagagcggcgggaggggggcactgagctacgggaatagttgggagccgcgtgaggaggcagcctccgtccagccgaagagaaatcagtgaatgagactgtgactcaggctgaactcttccccccacccctcgcctgtcacccaagcctctcctccgctccaaacagacacacgcgcacagagacgcgcccggagaggagcagccgagggcgcaggcgcgagggcagccacccagcccagccctcccacagccagccaccccgctgcccttcacctgcgtggctgcgggggcccaagagcgctgaagccccgagggagccggtc

SEQ ID NO: 50806 - DNA, 860 bp, Homo sapiens
ctaggaccaatccagagagagaaaaaccatatagtaatttgaacaggaaaagcttactataaagaattattctctatagcaggagattggcatgattatgcaataatatatgtgttaccaactccatactccgtgggctgagatccatggctcagtcatggctactgaacggcggacaagttgctgtgatgccataatggtgaaacttgctagaaatcagtcctgtagggtgctggggaaagctgtttatgggaagatgtctcactaccgcgccttggctacaaaccaccttaggaggttgcaggggaaagccactggccactgagtgttgctggctgtgtatggcagcaggagggccctggagaacctgtgagccaaaggcgctgggggccagcgaaaccacgcgcccctgccaaccccgctgagactccaccgagccggaggcaaaactctttctcctgcaatgtttctcgagcgccctctactggcaaaacttcggtgccaacggcaaattcttgaaaaggttcagatttattttcgcaaagcagtcaaataaggtgaattcagaggtgagaggcaataaatcaataactggtatagagtccaacaggtaaataaacccaaaccttttattcttgcaaatctaggcttcgtttccttgtttttaaaatggtgggagaagtagggaaagaaaagacaaatttgaaatttctatcatatttcattagttttaaaccaaatgaatgctgaacttctcttttccattctttcctcttattacattaactctgacatctcgtgactgttgtcagtcttcggaaagcaagtatagataaaattttgttcacagttccttttgc

SEQ ID NO: 50807 - DNA, 822 bp, Homo sapiens
caaaattagcggggcgtggtggcacatgcttctaatcccagctactcaggtgtctgaggcaggaaaattgcttgaacctgggaggtggaggttgcaatgagcccagattgcgccattgcactccagcctgggcaacaaaagcgaaactccgtctcaaaacaaaaaaaacaaaaacgaaaacaaacagaaactctccactggcttccatacttagaataagaaccaagttccttgctttggtccttgagaccttggatgatctggccccaggctgcgttttggccctcgcctcctgaggttgcccctcaagtgtctttctaaccacacactggcttcaccgtccttcagacatcacaagttggttttgtctcctgacctttgtacctgctgtttgttctacctggaacacacctcccagtttcttccatatcaggctccctcactttctgatctctgaccaaatgatgaaagggtcaatgcatcagaagggcatgtaactgttatattggtactgtctatgtgccaaatagtgtttcaaagtacaaaagcagagataatatacttaaagggagaaagagacctcagtaactgataacaaaccagattaaaaattagtaaggaaccacttatattctgtctacaaggttggaagttaaaggatgaataaagatacaacctgcaaaatgaatccagctttagcatgtctatgtgcatttcggacaaagaaaacaaggcaaggaagcttaccagagacagtgtggggcattatataaaagagccagtttgtcttgagaaacgtatatgctcctaataacatagctt

SEQ ID NO: 50808 - DNA, 1008 bp, Homo sapiens
accagctgagcagtttgggagggtagaatatttttaaatagtgtattatccctaaaaagtcagcatagctcccaaatgttatatatttcagtatttcattgtctattaaacacataaaatccaggataaactccatgtctgaaggcagtcactgaaatgaagggaaatatgacaatcagttgaagaacttcatcaatgtaggtcagtctccctgtccagtgctgattaaattaacccacaagagaatgtgagagaaccatgctcaggaggatccattttgaatactgtttcaaaagaccaggacagtagatggtgctatttgatcacaaaaaccttaaagtgactaagctggttgcatcagacttcaataatccctgtttctgatagtgattatatggaaatttcttggcataaccagccatttctcatactcactgctctgtgaaattcgcagtgctgttttctgggctccaacaggtgtgacagggctgttttcagctgtgagttgcatgaggtcattgatgatggcttgcttgtcaactgatccagcaggggcgcctggcctcgtgtctgggaaaagctgtggtaattgactattctgcaaatcatccaaaatctcctccaagttgtccagctcactgccaggctgtagttgacaaacagaagagtttatccagtctactctaagagtagacaccacaagcccatttgcaatcactgacctaactgccataaggcaccacagccaaataaaataggtagattcctgcataccacaggcctaacagataattgatcatcttttaaaaaattaggttaacaaaggacaaataatttaatctcttggtcctcaatttcctcatctataaaaagagatggctgaataagaaagaaagctctcttccagcattgtgatttattggcaatttataaattctcctttattttatgcttatcattcaattaattataagaatatatatttccaattaattatgaatagactat

SEQ ID NO: 50809 - DNA, 773 bp, Homo sapiens
aacatcagtattctaataaattacaaggcatcttttcaaaatattttaaataaaaagtataattttaccatatttgcctaacacaaagttgttaagaaatggtaatacaattctaccacatctggagagaaattttcaggacactatcagtttaaaatatggtttgcctttctaatggagtcaaataccaagaagaaattctttttagactatttccaaacccttatcatacgtgtctcagcagcattagaaaggacccagtagtatcgtttggttaagtatcaaccatgttccactgtgtaaataagcatgtaacttaaaagtgtgtaaacatactggaaatttttctgttactgtttcctgctggttaggaaatgctgtagaaacaaatgtttaaccactctgctcggtaaaaaatgctattttgggtataatagcaccatcgaagtacttcctgtcattaataagttagtaataggttaaacacacactcagtcaatggctcttttctgaatcaaaataacaagacagttaactgtgcaattcagactcattaatagtttgttttatctcactaaataacttattgtattcccttgaaatgaaagaaaagtcttcaataagtttgtacagcaatcaataggagatacaattaacctgtatttggaaacagtgaaggtgagcaagaggtgaaagaatcattgtttttttcttaaagtaagtcattctaactttgatctaaatataggtaatgcacacttcctgtggtaact

SEQ ID NO: 50810 - DNA, 550 bp, Homo sapiens
gaacaaaagaaaaggtgaacagggaagaatctgatcctagaaatataagtgatttgaaaatacaaggaaaaaatatttattttttgaagcagctgtattaaattgctcattggcatgtacaggcataaatctgttatttatttatttgtttatttttagagacagcatcccactatgtcaccaggctggagtgcagtggctattcacaggtgtgatcatcacacactacagccttgaactcttggtcttaagcaatcctcctgactcagcctcctaagttgctgagattattggcaaatgccaccatgctcagctccatgcataaactgaaagtaaaattccagtcttctggtgagaacaataaattagaaactgatcctagcaaaaaatttatttttaaaaaagtacaattaaacatttttaaattatcaagtgatgttttaaaaaaaggcctttacataatcttctgaagtatcatttattaattttggtagcttacttaatctcatagtattaggtactcttaatcaattttttattaggcaactga

SEQ ID NO: 50811 - DNA, 1658 bp, Homo sapiens
actatgtgtaattttttcccctcatctgacataaaggatctacaaattgaagatggtctaccagaggaaaaaagcttttaagaagttgagtttaatcatgtcaatcccaaaagagcttgcttcttttcctcttctgtttcctcccatcagatgtaacaaaatgaatacaccacttggaatcttacagaatggtggtatgcgcatgcccatctaatgtagacaggcttaaataagaaatcaccactgctctgagaaccacttcgggcctaaagaaatagaggatacaggctccccaaaacgacctcagagttctgtaatgtttgctatctggtgttaactggcagtggaaaggcatctcagtgatgaatgtacgggaagcagcaccacgctgatattggcattatttattttactcttcttcctcagacaaaatttcttatttccaaaaaagacagctccaactggactctaaatctattacagatatcaaggttctaacactggaagagcagaatccaagtccgttttaaatgaacaacttttctctgctgtgtattttttctatgtgactatgttgaattggggtttccttttgtacaaaacaacagaaatgagaaacataggcaaagatgcaatttcatatctaaaattttaagtgtaaatatttgaaatctaataaattcattttctaggtggaagttcagattttacattcttttccagaacacaagttaaaacacactgcatacggtcttgtatatagctaagcactcttggccctcagattacattccttcatttttgatcaatgatgtaatgaatactggggtggtcacagtgactatctgcaaagtctgttttgctcccaacatacttcccaaaatgggagagaacaccttaacaaggccagtgttgtttatctagaggttacatcgcacaagtgaagatggacagatcttatgatggacaacagaacattcactctgacagaaaaattcctcatctgctcacataggggtacaaaatgaatgttctaaaacaagcctggtatccaatattctggctaaataccaagaagtcttttttggtctagagagcaactttctgtttttctgggctcttttatcttctttttttttttttttttttttcctgacaggaaaagctgacctgccttgaaagtgtgcatcatcttctgaaatagggatctgcaaaaaatattcttcctagtaaactaaaactcggtgtctctgtgtttcaaataacagctgataccatgcttacccaattgactcctaacaaccttcttccaaatggcagacaaagccaagagtaaacagctgggtaacaggtttaattgtctttccacttcactgggagacagtggatgtggagctaggtagagatctagacttcaatgctagtcctaccacttattagctgtgtgactctagagaagtctggagtctagacccaaacctaggttcttcttctgtaaaatggagataataactcaacttacctacagggagtgttgcaaggctgaaatgagatgacgtatgaaagagcagtgcctggcaccaagtcagcactctgtatgtgtgaattctcatttcactgtagtagctgacccttttgcttttgacagagtatatgtg

SEQ ID NO: 50812 - DNA, 3276 bp, Homo sapiens
gtcccagctactcaggaggctgagatggaaagattgttggagcccaggaggtctaggctacagtaggctccaatcatgccactgcactccagcctgagtgacacagacaccatgtctcaaaaaaaaaaaaaaccccaaaaaacaaacaaaaaaaagatgaatgtcaattagtaaaaacaatagctggcagtcatagaaaaaaatcagataccagaaattaaaatttggaaaagtcttatgtcatagtacaaaagcaaaatgctgaacacaagttaacaaaaagtaacgtgcacagtatttactgagtcacaagaaaaagacaggttatgcttacgcaatcttaaaaagtatggctgtgtgcaatacacttagaaaaaatttccagttgaagtggttaaataaaataaaagcaattctaacacctacgagctggttatcttcagttatctggaaatggcagctatgcaaagcaaatagataaggaattaatatataatatttctctcctaaataagaactttcaattagctaattcattttaaagcctcccgtactcccacttacttaagaacagtcagtaaagaaaacagttctaacatggaggaggaatttatttacatcctgaaatgctcatatggtacagcttttaattaaaaaaaaagcaaattctacatttacatatatagcaaatgtatgatatttttaagatattctttactgggctttctcgtacaataatgatcaggagtaaaactgtcacctgctaatcatttctggcacatagaaacaacagcataaagctttcttactaaaacaaacaaactaaaacaacacaatagagtatagcacataatcagaaaagtaatcattttagtctttaaatttttaatacagcttttatgtgtccttgaatttactctaattcaaaattttagcttgctgaaatataaaatggtactacaaattttaagctaatttttaaattgctaaaactgtattaaattacagattttttcctttttacagatctcttcagttgcctaagagttcatagctacaagtaacagatattccttacgttaaaatgtctaaaattaatgctatgtattaatttatgtgaaacttctaaaaagtctaacattttgatgttattttagatctacattttttttctggcattaaactgcatacgaccagagaaatcaaagtaaaagtcagactttagccaacttcattttaagctaagctttaattttcatttaagctgtatctttaaatgcttacatttaaattttctaaagcaaaaatctcatattcagtgaaggagcaatcaaacatattgtgaacaaaataaaatcattaagatgttacagtcccagcaaaggcagtatgaataaatgcagtttttcacatacatagacaaactacacttttaaacaataaaacatgacttacatcatgacatgaatagagatgctgaaaatgttagaatgcaaagtaccctcaaggtcaacaggattttcttttatattcatgttacatgcgctcctttattaaggtttcaaaaacaatacttatgaaaagcagtcactatgcgatgagagaagccattttaagacttgtaaatcaactattttactaaaaacaaaagtatatagtaaacagtaacttgaattagaagtggttggggaagaagccaacaccattgcttgtagctaaaactggacaaagtaaatacatttttttaaatctctaggaattttgaaaaaggagcaagtcaactttttcagttaaaaagcaactacatttgtgtttgagcagagaatatctgtgccaagtttagcccactgtgaattaaaatggctacatttgtaagcaggtttaaaactatgcttaataattaaaagaaaactacctacacttgaatatgttccacaatactacaatatattataatatgatatttctgactctacgctgctctaaaacattttcccaacttcttcttcctaattctaaataggaaaatgggtctttttctgtggaagttgatagaaaagtctgccaaaatcccctttgactattttagtcataaattttgctgttgctgtttttaggtgggggtggcaagtggagccttttttaaaggtgcttcataatgtgtatgactgtgtattcagatgtattacaatttaaatagatttttaacagcaaattttgatgcttatatctaattatttttttccattttaaataattcacaagtgaccaacacttgctttcttggcctgactactctaagcctatttaatctttaaagatcaaactccaggagtccatagttcagagaaacacatgctttacgaaagctgggatgtggttgcttaatacagagaagaataaagcactgaagtcatcccacagtggagacaggaaataaattatttttattcatggagtacaatgcctagaactttatagtcattaactacagttaccagattaggcctgaaaggtaaatatgattactttcattttacaaagaaactgtaaaaactgggatttctcagtttctgagataacttgcctggggtctcaatgatagtggcaaagcaaggattcaaacttatgatttcattttccaaattccattctcttttcaccctaccttcatccaccccattatgtagttgcagcatttatcaaagagctggctggaccggtcttttccaactgcttgcagggcatgttcaaagactggactttttttgggcagacctgaatgaatttaaaaacccacatctaaactgaaccatgcccagagtattcctaagcattcactattacaccgatgggtaccttggggtgccaatgctgtcccatcaccctgaagctgcatcagtcccagactcccaatagcagccactgctattgaagtacatttcctgaactctgccagcaatgggcagttctgggcactggcctagagattaagcctcttgcttcttaagagcaatcattgccttgctccaacactgccatgaataacctgctgggttagattctctttcacactctgttgggcgacatgaatacacatcagcagcaaaaaattaacacaaactttcaaaatttaacagaatttgccatttatcaaggcatggaagggtgagaaccactggcctaggcacaccagtggacacagccaacaaacccagtacacgttaatggtgaccactacctgcacttgtcaattcaccagtcctaaaagccatc

SEQ ID NO: 50813 - DNA, 3428 bp, Homo sapiens
ttttaatgacatccccaatgccgaagtttcaagtacactttgggaactggagctctaattaaacaagaaaccagtgaagccattatgaacaatgatgctttctactaccaataatcagttgacgtgatactgctcccatgccttcattctcagggttccctttcaaatttcattgtccccattctggcatagctgagtgaaaccgagataagaggtaaacgggtaacttctgtcttctgtgacccttagcatgtaaaccggacgctgaggtccaggacatgatcactacagcatatgccattttagaaaccggcctcggtgagttactgccacatcctaaagtggctttagacttcgtcgtgtctaagacaacgtctatttcggtacgaaagacatacaggacctcgagtgcctcggcagcctctgcgggtcggagcccctataagtgacacaaccccagaaatcaaggagcgggtgactcggggatggacaagagtagctggctctcagcgtctccatgactcccccgccccgcatgcaactctgctctaactggtcaggagaaaccccgcccccttccttcctccggtccgcacgattggctcaccgacacccggcaggtcagctccctgccttcgattggctcactgccccatcagtcagacgcaccgagattcgggtcggtgggaggggaaggcgtcggaggaggtggagagggagtgggattagaggacgaggtggcggaggaaggtgttcaggctcggtctctggtttgggaaagtttcccctaccagtgacggacccagaacgcgggaggcccagtccagctccgggccagcggaagggggctccagtccccgattcccgcccctcggtcccgcaggccccggaaaccactagagggaggggaagagggaggggccatctaaccagggaccgacccacccccggtctcggaagaggcgcctctgggactcccccgaggggaggaggcggggagcgcagccggcagcgacgaccccggccccctcccccagcaccccccaggggcccgagagggccgggtccccgtgcccggggcgtgaccgtcgcgaggcggccacagggcccctcccgcttcccgcctggggccccgagggcctgtcccttcaggggcggagagaagggggcgagaaaagggggcgctggcgagccaacccggaacctcccggtccgcctcccgcccccggccccggccccagcgcgcctcctgcatacacgcccgcacccagaaagttcagtcaggggcgagcccggctcggcgccgccggggcccggcccccggctccccgcccccaccacggcccggcctgctcggccccagcgcgccgcccgccccgcccgccgcagctccttcccgtccgcccgcggtgctcggcgcccctcgccccccacccccggggctgacacgggcccgggccacccgccgggccgcggctccccttccccgccccgcgctgcagctcgccggccgccccgacaccccgcttcaccttcacacacccccagcacttcccgagtcctgcctcccctcgcccggctcccactctccgctgcagccgctccgcgcttccattaaagaatgcaccttcccaggattcaccttctcggctctgccgcgctgcccccgaggggttagagcctcggtctccgccgaccccgcaccgggctgggcaatgggcactcgctcctcggggcgggggccgcgcccgcacccccggccgcgcctcggcgctcacctctcgcccgcgccgcgggctgcagcctccgcccgcctcgcgctccgggactcgtctcctgagctctcgcaaggcgctggagcgcctcctttctctcccggggactccgcgtctccccgtcgcttcccgccctccccacccccaagccccaactccccagcgtcgctgcgcctccgggatgcaactcccgttttccgcgcactccggcggcggtccccgcacacaaaaacagcctctcggaggcgcacggctctgtcggagctcggcgcaggaagggcagtcgcggccgggggtggggacgcggcgccccccgcctgccgcccgccccccgcccgccctcgcggccccgggggaaggcgcggttaccggctcgggtcggtcacgccgtcaggtgccggctgccgtcggcgctgaccttcgccgccgaagctgtagccgaggctgcggccgccatgttcccgtgttaataactgctgcctggttgtttatttcaatggagatcctcccccaactccctcctcctcctcctcctcctcctcctcctccgcgtctccgcacttgcggagagacagacagcgcgagctcgcgagcaggggagggggctcgggagccaggccgtccctccctctgcctccccggcagtggccgccgccaagtcctgtcaccgggaaaaggacggggcggaaacttgcctctcgcgcccccgaggaaggggcaaaggtggacgcagggttgtccggggagcagcccctggccgcggggtccgcagcatctccgtcggcagagtcctctgagaaggcggcccggggagaggtgaagaagagtaaggggacaggggacaaaatgggtgactgtggtagagggagggtgacctagaggtgactggaactgaagagagagtcaacagaggactgcatgggagggcaaagggcaatgccaaaaagaaaactagcgactgggacgggcctgggccgctgagttagaggcagtggggcctgggggctgcagacggcagggacggtgccccaggacgaagatcggggagagccgagttccagggtcgccagcagaggaccctcgcgcccgtccggccggacccttcggccagcaccctgcaccccctcgggcgcacctcaccctacccaactcccggtcctgccgctgctccccggaggcgccccgcatccgtcaagtcccctacggctccaacagggagaggcttctcccattgcagtcctagctccagaggggatggagaggcgcgactgtgggagctggaaggggcaccacccggcaattgcgggataaagcaaatgctgcacacagagtgtgaaacttaacctggttgagaattttcggcacatcatgaaatcataagtttgtattggaaagtccattctctagacatccgtgaacaaagtactgaggggacgtaggagattggcactgaaaatgcgagaacccccatttaagtgttacttagaccaatctgttttacgctttggaaaagcaagttttttttccaacttatacggtaattagttgaaaaaaaaaacttttgtttaatggcagttatcaaactatgagaggaacatattccctgattttaatcttataatgagaaaggtcacttgcggtagacaataagag

SEQ ID NO: 50814 - DNA, 777 bp, Homo sapiens
atttaaacctattttttatattaagagtatattgttagcacttttacatgataaatgtacttatatagtaagggagtatttaattctgatgccaaacatctggatgaaaagtaaaaagtcagtcaattatctagatatttttccaatacccagatgtttggcaccatgtcgacaaaacattaaaatccttgaccaagctgttcagcttttgcacagatgtctggcattatgtaggcaaactctctctgaactgacggacattttggcaggagaaagacagagcatttatagcatttattacatgctctgggtcaaaagtgttttaaaatttagcttgtgtgcatgagcaaccttttcattgtttcacaatgagtcagcagcacgaagaaaaaaatctatattttaggaacccttaatccattatgatgcaagtctgctatctatctctatttttggtcacttctcagtctgttggactggttgttgaccttgaaagcttagcataaagttgttgtttctttgaagtcttggtcttgagaatttgtaccctagtgatggttttgttttgtcttttttctataattaagaaagttctttctggctgataattttattaacagattgctctgaatatttaaaagtcatgttaatgtgccaatatccctgacaacagtcctgcctaaaatacatttaagacgtttaaaaaagatatttttatgtttttctgactatcttgtttcttgggttataattcttcgtctagctctgcattagtca

SEQ ID NO: 50815 - DNA, 7158 bp, Homo sapiens
agtgttgggatgtttacaggcataagccagagcaccaggcctagcactgtatttaccttcacaccatatcatctgatacttgcaaaaaatggctgtgaggagaacagtacaggtgatattatttcctgataaagagcagaaaaattgaggctcagacttgggtcacccagtaggtaggtggcacagcccagacttaaagcttgagaatgttagtttccttctacctaccctttaactatacctgctacctccttagcagtggtttcaaacatgcatgacacaatcaggagtaaataatatctgtatctagatccagaaaagcccatttgatgagaggcgaaaataaggttaaaatattatttaattttaaaattaaaaaaaaaaacaaatatgctccattaaaaagaaaatgtattcaccttttggtcactggtaatatcattccattaggttttctcaaggattcttaacgtcgctcatctttttttaagcactcctatgtcccaggcactatcctagactctggaaatacagactcgtaaaaatactccaaaatctctactctcacttgttacatgcaggagagaggagacaaaacaaggcaggagcaaaataatttgtatatttactgagacataaaggctccagagaaaaattaaaaagggaaaaaagcaaaggaatgagcgtgtgtattggggagcgaggggaaaaacgtaggatgttactcgttcaccttgcaaagtttatcatccacattcaacagctgttaaataagtcatcaaaatactagatacgtgggaagagaatttacacactcctgacattcccatcctctcctacttcaagaaacaaaattactcgattccttggcaccgctgttcagaacctcgatttatccatcagaccttgtttctttaaagcgtcagggcaaaaagttcgttaactggtaataatatcagtttaaaagacaaaaatgaaaacaatctggcgcgcctccactgcgccggtgcccggcggccaccgcccttcaagtcgaaagcagatgcctgactccggtttctcgctcaccccaatctcggagctaccgggggctcccctgtcactcggggcctgtggtctccaggccggcactcctcagacccgggggccgggcctcggccttccccggccctcgcggggctgacgctcaccgcggccgaggctggcagtccccccaagtccgcccacccgccccgagccagctcggcagcgcaggggccgcccccgcccgcaggcccctcgccggctgccacgtaacccttcgcgggaaccaggaactgcgccgcgcagcctgcgggagggggcggcggcgggtcaggaagggggcgacgcggcggtccccaccccctgcgggccgcgatgaggcccaccgggactttgcatctccgggccggccgccggggagctgccgccgacgtggggcagggcagggaaggcctgcacctcagggactgggggtctgcacccaccccgggcccgagccccccgcgtcctgggcggagaagccggggctggcatctggagcccgggcccgggctggaggtggcggggcaggcggttgggactcggggcgggctcacctcaaacatgagccccagcaggaagaccatcgccacacaggagacgatgtccgcgtgattctgcaggacgaattcgtggctcagcactggggggctcttggtgcttttcttgcgaatcgccatggtggggccgccgcccgcgcctgcaggtgctccgccccggttctgctcttcccagctgctcaccgactcgccgccgcctcccgctggctgctcctcacggccccgctgcagccgctcgctggggcttcacttcccatcccacagccagtacgcagccgccgggccgcccgggggaaaaaaaaaaacacaacagctagcccgcagcgggggcgagcatgcgcaccagggagacgacgctccctggtgccgcggccgcctccgcgagcccacagcgccacctggggaccggaggccgctggcccgcggccgggcgagcgtgcaggaatgtgagcggcgcttccctgcttcgcgccgggcccgggtttgggagtcgtttgaggcgcgagcttcctgcgcctgctcagcagcctgaggccgcggccgggtgccctcctgccctcctggccatccagggattgggtgtcagtggcctgttgcacattgtcacttctacaagtgactaacaccgtcaggataatctaaaactacgaatactacctgactccacaagggtacggtgtattctccagttttagcatctgccttaaaaattacctcagagttaagcactgctggggacttatttctactcttggtaagtttggactaacttaaaaaaaaaaaaagagctgaccctattctggtctgcctctccgtccccacccccatccccgtccccatccccacccctatcccccactggcctcagactgaagacgaagggatcagtttgggtttactggcttcacatatattcaaattaacaacatgttttagtaatctaagggaaatagtaaaagagttaaaaaggatcgtggattaagacacgtcctcctcttatcgttttgcccaaacctggagtcctttgtattctttttcctgaagaattgctctcctgtttacccataagccaaatgtagaaaccaaagtcatgctagattgagccctttcagcgcccttccacatccagtcatcaccaattcgaggcagacctatcaccccgcttccccactaccgcagtccgagggtacttgcctcttgcctacaatattacaactctggtgtaaccacttagtggtttaagaatgtgggttgttaaatcagaattctgccacttattacttgtacgatcaaggacaagttacttaatctctatgggacccgatttcctcatttttaaaaatgtattcatttatgtacttactgagggttgactgtgtcctgggcactggggatacagaactgaaatacaaattaaattattcctagggacttatcattctagtgtgggagagaatctttaaacaagatttcaaaagcgaaacagatgttaaattgagttgagcaaccaggagaaaaataaagcaaggggaataggaaagtgcgaggcacttatacttgcctgaagacctgcaggaggtgagggagcaagccctgtggatatcatctataaagtggggataactattgctcattttagtgattaaatgagatgattgaaggaaactgcttagcggggagtaagggctttataaatttagtcagggattattcttttcctccttctgggcaatcactagtttcatttcccttcagatcacctttcaacgtttatactagaatgatgcttctactggcagaaagtttttcagcgggttccctttcccttcatggaaagctagcatgatgaaatagccctttctgatttggtccttgcctaccccaacagactggagccctgcatctacaggccataatctctgtaccagcattattgactacacacactatacagttgcctctccatatctgtgggtgccgcatacactgtggattcaaccaacctggagtaaaagatattcaagaaaaaaactgcatttgtactgaacatctacagactacccccccatgattattccctaaataatatagtacagccaactatttatttagcagttatgttgtgttattataagtaatctagaaatgattggaggtctgtgggaggatttaggatattctttaccagaatattgcatcatcttatataaggcacctgagcatgggtggatttcggtatccgcgggggccctggaaccagtcccctgtgaagactgagggacgactgtacatgccatgacatgctctcttcccatgctctcccctgcctttgcgtgtactgctgtctctgtctggaatgttttctcctgtcctttcatagacacagcaggctcctgctgttccttcatgtctcatttacacatgacctcttcgaaagcttcactgaattctgtgacctaagcaatttatcttttatgattcaattgcatttttgaaatagttttattgcagtataatttatgtcatatagttcagctatttgagatattcaattctgtggtttttagtatgtttgcaaagttgtgcaacaatcaccataatataactttagaacattcttgtaatctctaaaagaaaccttatacacattaccagtaactctccatttcccctcatagtcttggcagcccttggcaacaactgacctattttctacctctctatatttgcttattgtggacatttctttttgttctttctttgtttcttttctttctttttttgagatggggtcttgctctgttgcctaggctggtgtacagtggcatgatcatagctcactgcaaccttggactcctggcctcaagaaattctcccacctcccaaagtgctgggattacaggtgtgaaccaccatggccagcttggacattacatgtaaatagaatcatgatcttttgtgactgacttctttcactgaagataatgtttccaaggttcatcgatgttgtaacatgtatcagtacttcactcctttttatggccaaataatattccattgtatggctatagcacatcttattcatcagttgatgaacatttgtgtacaagtttttgtttgaactcaattcctttgggtatatacctagcagtggaattgctgatcataaggcaactttatgtttgacgttttgaggaactctcacactaatttccaaagtgaatgcactatttcccatcctattagcaatgtgtagaggttccaatttcttcccatccttgccaatacttttattttctgtcttttaatcttatctgtcctagtgggtgtgaagtaatatctcattgtgattttgctttgcatttccctgagcactaatgatattgactactagccttatcaggtgctcagaagccatctgtatatctttttttgtagaaatgtctattcaaatcctttatcatttctaagttggattaattttttaaagtttattgagttgtaagggtttaaaaatatctattctatatgtccatgttgttctgtaatttattttaaaaaataaaagatagattctagatcttagcagatatatgatttgaaaatattttctttcagtctgtctttttactttcttgatggttttctttgaagcacaaaagtttttaattcagcaaagtccaacttacctgttttctctttaatcacttgctattgttgtcctatataagaaatcagtgcctaacccaagattccaaagatttactcctgtgttttcttctaagagttttatggttttagctcttacacttgggtctatgaggactcacttgtattttgtacataatttcattttagcaataatcatactatcttctattgtttgcaagtctgtcttcccactagactggtactcctcaggaactgggagttgtttcatttttccagctcctactacctggtgctatactgtcaaatatttagtggtcattatttattgagggaatgaaaagaaaaaatacctcacataaatgagaataaaaccttaagatagtttaaccaagaaacaaacataaaaatgatatatggctctacaaagttactcattttaaatatatttaaagaagacttgcaatgcaccaagcaagtcctgagttgtaggatataattattaacaagacagatttagtctttgttcttgaaacgcatacctggaatagaagacagacagtaaacaatgaccaatgtgatggatatttacaaagagacagtgcaaggtgcagtagaagtgttctaggtcatttggaaatgaattgctctactaatgtcagtttttaaactgaaattggtcctttcaaaccttagaatctggtgatttttcactcctttgtgagaagaccacattggtcttctttcagctgcttaaacatatcatactctggccagccataggacttgagatgaccattgggtttttgttgttgttgtttgtttgtttgtttttgagatggaatctcgctctgttgcccaggctggagtgcagtggcacgatctcagctcactgcaacctctgcctcccaggttcaagtgattctcctgcctcaacctcctgagtagctgggattacaggcacgtgccaccaggcctggctaatttttgtattttagtagagatggggtttcaccatgttggtcaggctggtctcgaactcctgaccttgtgatccactcgccttaggctcccaaagtgctgggattacaggtgtgagccattgcgcctagtgaccactgggtttggtaagatggaggttgtgtggttatgttagtttgggttgtccaggaaatagatgccaagaaggagttagaagcataagagacttattggcaataacatttgtgaaaattaaaggggaggggagttaacagggaaaagcttcaggctgtaatgtagatctgatccctgtgaaaggaaggaagaaggatcaggcaggaagagcctcagactgaggtgcagctgagaaagttttggccagccttgtgtgtagagctccagcacagagacttcccattgaggatttccacattggatggagatgatgagtccttggaccgcgacagtgccctgtcatgcactgtgggctcctaccctgcactcttgctatcttccacagaaggtcctggcttctgtcaggagaccctctctccacaaatctctcttgggctttggtaattatctgtcttgctccttcagggaccctattgtttatagccttggggtactgcagtatcatttgccgtttccttacccgaacccacacgcttgaagagagtgcctttatacaaatttccccaaatcatccaatttaaacatgccatttgcttctgctaggaccctgactcttatggagtcactagtgacctttaagacagtattttctttggaaatggtagaaacaaatggctgactggagtgggttcaagagagaatgggaaatggcaagatggaggcatgagtataagcaactcatttgagggga

SEQ ID NO: 50816 - DNA, 4024 bp, Homo sapiens
gaacttgttaagtgcttttcatatacgttttttcacttaaatttcactgagcccttataaaatccaatgaggtaggtactacacaaccttcattgggttgtatcaggaatctgaagcttagaactgtcttgtccaaagtcatatggctagtaaatggcaccaggattctaatcgaggtaaccagagtccagagttttaattctattccacttgactacctttttctattatcagccacactgtctgcccacaaagtatgtacaattttgataggaaaggttaaaattgcagtttttaaaggttcttgagcagaggaggaaagtaaaaacactggacaatttggctgtcatttgttgattcaaatgcttattgagtacctatgtactaagcatcacagttaggtctagcagtgttttagtgaaattcatttggcttccatgggctgatcagatgaggaaggaagaccagctaaaactgtagttatccagcagttctggagtcataatagtgaaaattaagagaaaatgtacagaatgctcattcattcagcaactgtttactgttctacctgaactgtgtacaaggctctgtgctaggtgctggggatatagccatgaatatgctttcactgaactgatgttatagtggggtatgaaggtgtggaaagacactaagcttcttgcacaaaaaaatcatttcattatcattgagataaggaccatgaaaagtatggagtgtccctaatacagtctgatgggtcagggaagacttccatgaggaaatggtatttaaactgtgctctaaaggatgaatgagattagctgggtaaagaagggaggaatgagtggaagaaagaggaaagcatgcgtgaaggccctgagacagggaatcacaaacctcatctgagacactagaaggccagcatggctggagtgggagaggtttgagaggagcctgataagactgatggaggccagaatacacaaggccttccagttttaattcctaaaataccactcaggctacaaagggaagattggattgaagagagacagaggtagtcgtacagaagccaattaggaggctattacagtagcctaagcaagagttgtgctggcttggactgagtgacagcaggggacatgaacagatcttcataatggcttggatatgcagtaggaagcaaataaatgtcaggaagggtatttaggcatttcctttgatggctttgtttatcaagatatgaacaactgaaggaggacctggcagttttctggaaaggttatgagttcagtatggaaaacactgagttccaggcagcagtgagtcatgcaaatagatttaaaagttggctacttgagtctgaagatcaagtttggaatttgaacttgagctatatatttggtagttaataataaacagataataaaggcaaagccaaataagtagatgagatcacctaggtagagaatacagtagaagaacatgagagatgaggattatatactgaataactaaaataattaaagatttgataaagaagatgactctatcaaggtgaaagagaaagagcagctcaagaggtaataggaaacctgaagaatgtggtgttggcaaattaaggagggagtcgtcaatggtgtcaaagcactgaagttcaaggaagatgagaacagaaaaataccattggggttagtgatacaaaagccgcttgtgatcttagaactgttttgtgaagcggaacaggtggataccaatctcagaacatctgacaaggggccaattaatattaacttctagccaccttttactttacaccttttactttatacagtagcattatctacacttatttctagctcaactatacggactctctagttcaactatatggagaaataatttacatagtgcaagtaattccactggccattccactccattaatttatgtgagcaacagtgttaagtaatttaagacgagagactataaatctgcttttccctcagttagtctttaagtctctcttagcactagcactttgctatgttgagtgtgattatagtgtttaaagatacagtatgtatttttcatacaatatagcccctcaacacaagccaatttcttcacctggttttcaaacagaatcagccatctgtttcaacgctggaaaaaaggcaggttgtgctgaacttactgagacaatacactgatctccaacatggtgttcttctaagagactttccagggtaattctgataatatgcatcttttgtctgaggtattgactagttcaagatgacacactgtagagagaccgcctatggatttacttggttgagggacttccagccaagacagactgtaccctagagatctggcatttttcctgcttaattctctatcctcctagattctggtggcagcctaaacctttggtaactacctgaccctgccttatttactctgaacttaatcttttacctgcccactttgcaggtctgctgcttctaaaattcttatttactggaaaaacgccaaacagtagacacttccaaggaaaactcaattaactgtacttactaaatcgtttttagtaatcaattatattttaaaaataatttatgtcttgactgcacaattaaattctatgctcaagagaaactacattatctgggttcatccagtaaagactacaaaagttgctaaatgcctaagacttactatgcagtaaaccaaatctcccattcctgcataattccactaaaacagaatgcagctaaacaagagcaaaagtatcttcttagaaatacaggtgtgttactgtgtctgcaaattaaactcaaacaaggtcacacacaattgtaacaaaaaacttccccaaattacttatgtcagctcctcttatgagcccacaggctgcagagaaccaatttggaagccaggagaatcctgccctctgctgctgagttgaggaaatcgcctcaacataattaatcgcttttgagaagggaagttacactctgggcaaaacaccagtgaaagtcaagtgagcaaagtaaacgctttcttggactcttgacatccgaattttctcaacagtttaaacacgcacaccctggcattcaaacatcaagaacagtaaatcgggtttcaaaacagaagtttttttttttttttttttttttttttccatttctccctaaattagagagctatcacctggggtggtcgtattttagctagcttcgagatccgagtgtctgcgtgcagtcccgacggggctgctaggcgcggggctgcccagctagggacaggacgcggcgctctccactgcccgcgcagccgcgatcagtcaaagcccgggctccggggccggctgcgaacgttggggaggttggagagggacgtttacctggggccggtccccactaggtaggtgttggtgccttggagggtcatgggacccgggttacagcccaacacacgcacgactcgattggacagccgctcgacgcgctgcagtacagcagccattcccgcctcagccgcccgccggcgtgtcgcctatctggatactccagcgcggaagaagccaacaggccggggatagcgagtagcgtccacgtgatgcctcgcaacccgggagggaggggattggccagcggctggtccaggtgtcatgtgacaccgcggacgagccggggcggggatccggcagctaggccggggggtggggggggcggtgcggaactagaggtcacgtgacgccgcgcgggctgcgcgggcagtggtgggaaggctggcgcgaggcgtgaggtggcgtgaggcgaagctggaatctgcctctgtcacgggggctggtgcctcacgggtttgtgtcctagacaggcgagtggatccaagtgggcgagagacattttaatctggaagagtcttgtgatttgggagacaggtttggtaaccgttcgttattcagtaataaatgtcaggaaggattgccagatttttaggcagtggctct

SEQ ID NO: 50817 - DNA, 3677 bp, Homo sapiens
cctgcccagagaggaggaatctagagaggcaatctggctacaggagctttgctgcactgaggtgggctctgcccagcctgaccttcccagtggctttgtttacactgtgaggggaaaactgcctactcaagcctcagtaatggtggacacccctccccccaccaacctggagtgtcccaggtggacttcagactgcgtgctggcagtgagaatttccagcctgtgatcttaacttgttgggatctgtgtgggtgggacctgtttagcaacaccacttggctccctggccttagctgcctttcaggatagtgaatgcttcttgtcttgctggggttccaggcaccactggggtacagaaataaaactcctgcagctagcttggtgtctgctcaaatgacagcccagttttgtgcttgaaacccagggccctggtggtgtaggcacctgagggaatctcctgttctgtgggttgcaaaaaccgtgggaaaagcatagtatctgggctggatagcactgtccctcatggcatagtccctcaaagcttcccttggctaggggacggagttccctgaccccttgtgcttccctagtgaggcaacaccccaccctgcttcagcttaccctctgtgagctacactcactgcttaaccagtcccaatgagatgaacctggtacctcagttggaaatgcagaaatcacctgccttctgcattggtctctgggagctgcagactggagctgttcctattcggccatctagaaagttatttttacaaagcctgactttcaagactgttttttatccttattgacttgaaatttttattttgtggtccaagtgattactaaatttttttctctttatattaatggggcaacaacactgatctattcacctcactttccaaggaagatggataccttagtatgtctgtaaggaatgtaaaagggacaggcctgttaatatacttcaaaaaatattatgcttttttccccagggatcaagtgactgttttagtcattctagcttgcatatgacattaattgaagattgggtttgtctagatcaaaagaaaatgtggcctatgttctttggtagggtggtaatagctgaaatgttccttaactctgtccactaatgatatcttgtagcttgacctcttgagaacccagtctcacttgtcaagctgtttcttgaggtttgggtgaagcagatgatccaatcctgttgtagcatgaatcttttagagtatggcaataagagaattgtagatattgacaaaatttctggaaggattacttttgaaaaattaattaaaattggtttattaaaaatcccaggaaaattttctacatgagatttagataaacaaaataaaacatagaaaagaaaaatgtttttcctgccatgtgtaatacacttttgaatacttttatagttaaattttatttgagatggtccatccaagtaccagacttgcattatacctgataaattaataccattaacaccttgagaatgtattatctttgcataattaaaatgcattttctttactagaatataaacaacttgagatcaggattgtatcttattcacttctgtgtcaggagtctagcatgataactggaatgctgtaaatgtttaacacatgtttgccgtctgtctggatatttgctgatctctgaacagaagatttgtgaaagagaacacacaggaaaagatgcacctctctttttagtgatatatgtttgggacaatattccatgacaaaggagcctaaagatttgaatttccatttgtgttgaccctacagtgattttgaacagcccgatttaataatagacaggagcagttgggggagaagtagatttcttggcaatccaatctagtttaaaacaccatgaaatgccttggttattatatctttcactagctaacaagccaggaatcttataacatttgtgacattgacaggagtttagaaatgaatactgtgtaaggtttcattttgatgcattgtagttctctttattgtggtatcttgtgctcataccatcgtcgtgaaataccatggcaacttttaaaaattattatatttatgtagaaatgttaaaaaaaattaaaagaccttttgaaaagatgaacagaaaaattagcttcttgatttctaattcatgtgttgcaagtctttgctttttaggacttgccaaatgtttgtcttcccaattttctagttaggtgtaaagtaaaggggagtgtttggtataaaagtttatagagttttaatggcaaggataaagcattgttggtttcagtcgaaaagtgttttgaacattatctttaaaatgctatgtccattggcttgttgggaaatcaataggtcatgaaaatattaaattaaaagtttatttatacatgtaatgtagatgtatatttgtgataaacatattatataatcatactgtagcacaagtcttgtcactttgtaaaaggctccaatattttgattactgagtgttcaggaaagccagtgcattctttcagtggttataaaaagatctggcagatatggcaaggtaagcagtttacaagtgtctttgagggatttttagttcaggttgcccaaccaaaacaggattattatttggcatgtttacagatatggatatgcagggaagcaggcctatggcttaattaagtcagagattatgcgttaacaaattggttctgtcaatgatggattctgcctgcaagaggctaatttgaatacaatctactggccatggtcatagagcatagagcaacacaacttttttacttcccttcaggctgtcttttctcttggctaagcttttaacaagctccacatgcaaaattggatgatcttggttgttgtaaagtggcctcaacatgtacattttgggaaaggggagaaacacttggattaacttttgtgtgttaatcttttatgatgtgtatggatcagactttgggaaggaaactgatagcttcatggtgaaatgttggcataccatttctaacttccatttgccagttaaaagggggaagtgttcagggtcaaaaacactgatttatttgcttcctatgaaggcaatgaatcaacaaaatgagtgtgtcattgtaatatttggaatcaaagtccagggtgaattagggccatttaacttgttcttaagccagttggttggaatggactcttcatttctttgtaatctttgttaggtttagtaaggaggcatggattggctgttagaatagggtcatcttcatgtagattaaaagtatggagatttaaaatctagagcaatgttcactggaaacagtttcacagcaatctgttggcatcattttttaatacttttcaatttttctttgtacaagtcacctttaacagaacatccatcccttccttgaggtcatacttcagaacaaagaatgcccaaatctcatgatgtaacacaataaatacttaattctcacccatgctacatgtccagaaattattggcagtgtctgtcatatacacttagggatacaggttgacagagattctacttcaaccgatactttcatgattgcgtagaaaaaggaaaacagtaaattatgtgctatctcttaaagcttccaccctgaagtgatataattcattcaa

SEQ ID NO: 50818 - DNA, 678 bp, Homo sapiens
aacatggcctctaacatgaggtctgttttgttatgaagcaagactgcatgggatttaccacaaatatgaagaaatatgaacccaagtttggtctcttgctatgtccatctattaggataattgcattgttcttgacgttgttagatttatatacaaacaaatgaaaaagctttatgagaattatgcgtggtttgtctcttgtgcaaacacatcattaacaggaaaagttgtgggaaagaagattgggtaagaatagaaagtgattcatacttggctttgaaacagctaaagattctagtgtcctgtcttgttatttggctgccacgtgtttgacttttactttctaattaaattatagactctgaagaccatcacttattccttatttgcactctctgctatgccttagtgtagtgcaagacagagtaaagggttcatcaaatagtttttgcatcacaatatgtatttacagctaacctggatcttaattcctgctaaggcacatatcgtaaaaccacctcctctgtgtccattttatttggtttccaaagtgatcatgtgtagtaaatgaagttatcttctcatactgcaagtctcagaccaaatgtcagtctttccaggaagcatttccaggctcatcccttaggtaatatgcaatctctctgtgttctgtacata

SEQ ID NO: 50819 - DNA, 877 bp, Homo sapiens
aatggggtgatacaagactggctggtgagggacaggtcttagagctgcagaaaagtgaaatagaataaacataggctaatatttaaatgcatcctcatctctgtgccatttgttcttcaacatttgaatcttcatgtggttataaacactcttatcctagaagaaataaactaattgccaaataaactaaaaatgaagttttaattagacacatcctgtttgttctcataaaatccaaaggaaacgtcaactgtattttgcctttcctgtttgacttaactcattgagaaatatggttaatgaaaattcaaataccttttgaaaaccagttttaaatgattaatacttttctgtgccttaaaaggcaggaataaagccaaccaaaacaaaaccttggagtgtcaacctttgttgacagaagctgccctctgctttacctgtggaaaatagcagcacactgtcacagaatgtgccctcaggcgccaaacctgcagtctcagaaaccactaacaaggtgatttctttttactgacactcccttcccctttgccagaagtgtaaagaagatgagctacctcataaactcccgaagttatgagctacctttgctcctcctgaagtcacaagttctttgtttatcttttctttttgaaccctgggaaaagtatatcaaagtgattcgtcctgccaaaagtttgtgcacttaggaactggcgctgtgacaaatgcctgcagagaagagaaaagatttctgtgtttcttagtgctattctctcccttgagatgtttccagaaacttgaaaggagggttgtgcctagaaactgattaaacttgctcacattaaaactgaaagtcagtgtgaaggaccggctctct

SEQ ID NO: 50820 - DNA, 960 bp, Homo sapiens
tcatatggggagagaaagaatctggttgtattcaggaaatctgcactgtgatgctatctgtgtgaactaagatttacttcctgactcttcctcagacgtgataaattatagatgccattagtagttcaatgaatggcacttgagttttttttgaatgttggaatccttcaggataaatgctgctaaacaactaattatgatgtttagcagaatgcttgacctctggtgcacatcactgttatctatgtacttgaacaaatacaagattacaggcagggcctcaaacctgacctactgaatcaatttctgccagtgggaccagcatgagttcatttgcagtgagttctgtaagcactgaaaaccccgagtctgtatgccttcccctgtagtgacctcagagacagagaattctggctatgtgctctgtttttcacagtaggaaaagcagatccagcacttagaagtctggatccataggagtgctgaggttgcctttgctgatggtaaaaatagaaaacaaaggcacacaatgaaatattgaagaatgccttcaatggtgaatctcagaggtgaaagaaagtttgctggggacaaaagacaaagaaagggtaaccaaggaaagagagccaggagagtggtgttcatcagggttgatgctgcagaaggatgggcactgagaaaaggcagttggagttagtgatcaggagtttatcagagatgttctagagcagaaatagtgttggaggtggaagtaattgcaagggtctaaggccacacttctcagccctggctatgcctcagtcctttttggagattaaaaaacatggaatttccaatctctatcccacatgttctgggctgggatttccagagaagaggcctgaacatttgtctgtcgtctgaattttttaaagctacacgagggatttggtggtgaagccagggccagggactagggag

SEQ ID NO: 50821 - DNA, 1480 bp, Homo sapiens
aatacttcatctttatatttagtcatggagataattttaagttgtttgaggaaattaaacgaggcatgtagcctcattcatctgtgtacatagcacacatctctataggctaggagaaggaagttaatgctaacccttaatttaaaacatcacttttgtatgttgtagatccagagttcaggcggacatttttttttaaacagtggaatataggataaatatcttagagattgaatttcagtgagcaaattgttggtcaaaattaatgtgccactttcagagcacaacaacccaattttctttcacataaaagtattagaatgattttattttcacaaataactgaaaaagagagataaaagagatggggagggaaagataaacaaatccctatagatttccctgatttacaggtgggattcaaaagtacctgctgtgtgaaaaaggcaccattatgaagaaaccctcctcagattactccatcagaaacaatcaaaaagaactcggattgagtacaccctttgagcattgttgcaccaccacagcaaattaaattcattcaggttgacttcatggtatgtgtcacttaaaaaactttctttttcttgtctgtgcctctccccgccactcccaaatgaattgattgccctggaaacaagggtagaaaaaaatgatctaagttcagtgttggtaaacagcaaagcatgttaaaatataatagaggaacattccaatttattctgttgctgtcttcgttttagggtcagttttctgctttgtagttttactacttacactctggcataaagagtaaggaagtagcgctgaaagcattgttttgatgctggaggaggattggacttgactgacacatgagttagtttgaatgtgtttcaggaccaggtgttaaaaaaaatttcccttaagcatccaggaactcaggaaggaccgtttttaccccatgctgaaatttgtaagcaaaggctctaggaggttcctcctgttggggtctttactaccattgatttgcaacaggagagtgaggtcaacacatgggctgtgcattctggaaagtctgagtcattctgtctgccctctgccctacctctccagctttagtaacctttccccgcagtgtgatgattagaacctcatatcctcacccagaagtgggttcagtggtactggccatggcaccagaacagctcccactgtcctgcctctctatccataccaatactaccagagagacctggtggccttttacagcattccctaataagagcatagaacaggtgttcacttttttttggaagacactaaaatgcattgtgtaaactgggcatgctgtgaagggacttagctgtcgcactaatttttaaattacctttctgcacattattatctttataggaagacccagggagtctggaaggaatatcaagctcttcagactttgctgaacaggaaaatctatgtt

SEQ ID NO: 50822 - DNA, 4495 bp, Homo sapiens
accttctagctctaaagttttgtggctttatgattctacgaaatctgtaccacagattcttccctaactgcgcaaattctacatcacaaatcctagacggttagaaaacctctctctggcaatttcattaaatctactgtacttcttatatgtttcaattcacacatgttttctctttttctgtctttggtgaagatggaaaaaagtggatcacttgttgttggtgggaaattgtttgttcctataactcacttaagcaagtatctattaaggtcaaacaaaaatgatcagctcttctaggcagactggggcttctcctcggtcatggcatttcttggctcccctacctcagtttctcccaggagcagttctttgttcatcttcagattggccactccctgcctccactgctgggctctccaggagtatgtaattttgtgagctaaaaatcctaagtgagaatagatctattttctttttagttcagcacatataaattgggtgtttttcaaatcatcttcattataaaataaagaggaaagcaaacccaaaaagaaacaaatatgtttatagacaagtgccactccctgggttgcattggtgggcaccgccaaggaagcagacagccttgactcctttctgcgctttcgtcccgtgtcaagccctcggaaggaggtatagctctatggctcatccgttgttccgagttaactcctaaagttcagttagtctcatcggtgggcaccatcttcccaccagcttcctttcaccccagcagacaacttttggggaggctcagggaatggttttgggttcagattcttagctagagagaaatagatttaaactctgattccaccagttattccctgtgtggcccttggaaggttattgaagctttgagagcctgttttcccacccataaatcaagactatcacaggcctattcatgggcctgatcagaggcattaaagggctgatatctgtaaagcgtatagcatggtgcttagcgtgtttacagtatgaatttgcctcttccaattttaaagctttacattttaaagtactttactgaactcagtcaatactcttctttttctgtctgagggctccctagcaccatcagattatgtacagcagaaatagtagtgtcaaatggtagtgactaattagacatactttcttagttgtctgtgatgactacatatctcgggtggttccagggtatggactttcccaaatcaaatcaccctcgttttacaagtgagaaggaatttaaactaaagagtagcaataactattttctatcaagagaaatttattaaatatttattgatcatctgctttgtaccagacagatggaggttgtaatttcataagacacaaaatgaaaaatgatgattcctgctctgaagatatttagaatccaatgaaagaaaaaaggcatgctcacatgcgatcaaggcaagggccctgtttccaagctttgtgtctctgagctgcacaaaccccttctctctttaagctttcagttatgattttaccccctctgaaagaatctaagtccccagagtaagaccaaatttgataagaatctgtatgggccaatggatggtagagttcccaaatgaatggcaaagtttctcaattctgtactgtttcaaacttgcccttttaaattttagtgataaatcatgactcatgatgactttgctattcactgtctggcccgaattagaaaccttgtagtcattgtggcttttaccctggctttcatcacacacatccagtctataacccagttaatttgattctagcagtcaaaagtctcttggctctatccctggtattcccaccaccatcgtctcagcctaggcctcagtttcttttgcctggactgtccaacttgtgctctgttcaatctattctgcacattgccagacaaagtagctttctatgagtctgtgctcaggtgaatcacatatcgggatatgggacaggtttaaaggtccgagtatagaaacaacaacagtatattttgagaagtcttggagaaaggtgaaaattgtcacagggagatgtcctaacctaaaaagggaaaactcactagattcttgaaacgataggtcaaatttcagcatctcctaggttgtcaggagtttgaagaaaaccagtagttgtttatatattatactttttcctgaagattcttttatttggatctgatgtttttccactataatttttactctggagcaaaccaaactcaatcatagaatctttttaaaaggtctgaacagatcttgtgtttgggtttttttttcagacagtctctttctgtcgcccaggctggagtgcagtggcacgatctcgtctcactgcaagctccgcctcctgggttcacgccgttctcctgcctcagtctcccgagtagctgggactacaggtgcccgccaccatgcctggctaatttttgtgtatttttagtagagacggagtttcaccgtgttagccaggatggtttcgatctcctgacctcatgatccacccacctcggcctcccaaagtgctgggattacaggcttgagccaccgtgcctggccaggtttttaaacactaatgaaagtttgttttgagactagaacagttttaagtaccatcatttctgtgcttatttggtttccatataatgtggagaagttgttttctacctttgtaagattaaatacttatcacagaaatgaagagtctgtggcaaagtttatcatcaacagtgaaatcacgtagagatattacagatcttctgcagaacaagtcaaaagacacctgaatggcttgagtttcatctgttaggttggtgcaaaagtaattgaggtttttgccattgaaagtaatggcaaaaacctcagtaacttttgcaccaaactcataaaacatttaagtgtaggttgactttgttcattttctcaagctttcagcctccccgtattgtgatgtactagcaataaagggagacataatcagtgctattctgaagacccacagtaagcagggcattcatttaaaactatggtgcagttaaggccccatccagcccagacccctcattttaggtgagaaatcatagttggaagagggagagactgcccaaggccacccaacaagtcaggctctgagaacgccccacttgcaaccccacgcgggctccggggcacttggccagtgtgcatggaaaacagctgcagagaaatagctgtcatggtgccaaattcttatctgctggtgtccttcagattgggtgggctggatgccaaggggaaactcagagtctgtgaattctaatcctggacctgctagtaaacagttctggtcatagggtcttaaatttccctccctttgtcacaggctgttgttagtctagcaaccaggggataattccctgaagtgactgagcagagcttctgggatccaccccaggagacctgaaaagcagaggagcatcctgagagtccatctgagtcagtgcctattgttggtgttgctttaaccctgatatgttatagtggccataccatcaatctacacacttttctatccagctctcctgaccatgcaaatgtactttactctctattccctcacccccagcatgagccagaagtgttgcttctcatgcaaatcaataccttgagattttcaaaattctgaagaggccaaccttttcagaggagaactgaaacagaatcagttaaaggctcatatctttcagctttaagggaaaatgagtgactctgaatggtcagggataggcccctcagcacctgcttaaagtttgtcaagagaacatggagatcatctcagtgcgatgataatggtgacaacaatactaatagactagcatttgctaagcacttactatgtgccaggcactgtgctaagtatttcacttccaatattgcatttaatcttcccaacaaagccatcaggtagcttctattatatcatcattctacaaatgagaacactgaggctcagggatttgaagtcccttgtaagagtccatgttcttaaccaccatcctagatgataatccccatcactggttagtgatggcagcctgctgtcatttatattcttctggtatgccctcctgctgccttgcctagcctcctccaatagtcacctcccttgtcggctctctgggaagacccccatgacagcctggggctggggtttgtgcctttcctctcacagcgccaccttctgtcatagcccttggcacactgcacttcaattgttgggccatttgtccttttcctcctttagagctctttgagaagaggcaactctctgattcattctggtctatccagcactgtcctgggtaatagcagatgatcaaaaaatgtttcttgaataaatggctgatgtgaaaaatttacttgacagtatgttttggttatctattgctgagtatcaaagaactccaaattta

SEQ ID NO: 50823 - DNA, 1682 bp, Homo sapiens
gaacggcccagagctctccgggtaaaacccgcctgcggtgatctgggaagtgtgtctccacctagccctgcgagcagcggccttcctcccgcccgttagaagggcgctgtgctggagtacgaacccggcccagagaagccactcgcccttctttgtcacttaaaaccctgtcccgacgcggatctcacgtctagacctctgtctttaaagcggatgtagagcgcgttctaaccgttccctaaccattgtgtcaccgcgaaaggccggggctgtgtggaaccgtcccgcacgtgtgcgatgaatctggctccgctgagaacggatccgtgggctgtctggcgcgggctggggcagcagccgagagttagtctacagagctagggcccgagggtggacctgcgtccgcgtctcgtcacgaaaggaagctctttttggagaggcaaaacgtggtcgcccagatccggcgcagctgtagccgtgggcgctgtgcagtgacagccacacccgccacctgtcacgatcacagttccagggaaaggggaagggtcaaggagaatccagcggaaacttcttcccatctcacgagctctcccttctctccgtggcccccaaacactcgcatttaacgaataatcccatcaagtgagttccagtccgatttaagcggtggttccacatagtctgttggctgcggaaacttctttggtgtcagagtccggtcttcccgagaccacgaatggccatgtctgtaaatcaaaaagaacgtgagatattagagagaaacgattgtctcaaaccgaaacagctctcctacgcgaaccccagatattcctgacttggagtagctaagattttatcagcattctgggaatttgcatgtcctctctctgaactaagattttcattttactggaggttgataatccgagacttgccatatccgttcacgcttcttcctggactttgcccgcaggataatttggtgaaactcatctgactttgaggttctgtcgtttagttcccttccccaacacacacacacacacacgcacacacacacacacacacacacacacacacagtcatccactccaagctccaagtaggaactgggcttggacaggatttttcccaagccgggagagctggcagatcagagagggactttccagataaatcccatctggggaaacgttactatcttccacaagcaatttttctaaaaatgcaaatgctcttttatagagctcggccttccctcctttaagaaagggcttgccgattcaaacctgcccgactcagctggattaagttgggcaagggagatttgccgtcagtctgcaacctggtggcagatggagatggaaccaagatttaccctggaagtaggatattagtcaatggctgtcactggggtacaatgttcagaacgatgcaaacagacacggagggttgattcttcttcagggaaatggctggccactcccttgatttgggagaaactaaactggccttctcgttcccagtcccagaacctccacccctttcgaattcttcccaacgggctgaccctgcccggcgcccaggagcgccctgggtatctcctggctgctctcccgaatccttgcgcgccgcgcccctaccaggttcactgggtgcacgtagccgttctcatagcggtc

SEQ ID NO: 50824 - DNA, 521 bp, Homo sapiens
gttaactataagtacaatattgtacagcagattttatagaagcttctcaaaaagcaatgtcttttttcttccacagcttatatattggtctattgaacatgaggggcccattgcgtgtttctggagcagccagttgctcccaggccctcctgtctttcctctgtaggtgaagtcatcctggaagggtgaaggtcacaatgactagagtggctcttgggtataatgcttaatcgacaacagccacttacctcatattaaattccagccacaattctatgtgctatctggccatgacccttgcaatgcaaatcaccatggacttggattacgtaattctgagctaaatatttccttcagacatgtagttggctttcctgactcgctgaggtcagggcactttctaagcactgtttttctgtttgaaatgataaatttgtgctgatccatccagtttcttttgtgcttagcaagaaaagctagtcagactgtgaacttggctcaggaggacagactaatcatta

SEQ ID NO: 50825 - DNA, 1159 bp, Homo sapiens
ataaccgtgttgttgttccagtcaaggttgcattttacaaggaataaggaagataaagctgcctcctcctatcctaatctcgctcctcgctcagtatggagtcgtccggtttacctacaaagccctgccctagactggcggcaaattcaacgcccagaggcaggaacaggtgtcggccaatcagaagccggaacaggtgtcggccaatcagaagccaggcttgaaccgctcgcccatgtcccgccggcggaagagactctccgcggccacgccccgagccctcgaatgcgagccaatcgttgctcggcgcctgaaggggcagtacccaagcgagccatttaacatggcggaggatgtttcctcagcggccccgagcccgcggggctgtgcggatggtagggatgccgaccctactgaggagcagatggcagaaacagagagaaacgacgaggagcagttcgaatgccaggaactgctcgagtgccaggtgcaggtgggggcccccgaggaggaggaggaggaggaggaggacgcgggcctggtggccgaggccgaggccgtggctgccggctggatgctcgatttcctctgcctctctctttgccgagctttccgcgacggccgctccgaggacttccgcaggacccgcaacagcgcagagggtgagtgcagaccgcgtccgggccgggactacgcggggggcggatgcgggctccgtggtgcgcggcagagggctggttccctacgtcgccgagggaggggctgctgcggccgattagctgggagtccgaggctccgggctgaactttgttcgaatcccggttcgcccgttgtcagcacctgagtttttctcagattgatttcctcttcgataaaatgaaaataagaccctgtttaggtttgatgcaagcattaaatgagttaaaatgtatacagttccactcaacccagtacctttgtctcttttggcgctttctactcaggtattcctgtagtaatattcagcagtccctgtggcctccagtaacccccgaggcatcagtgttttatgttaatttgtgagctattaaatctcatttggcctgctggctctacagcagttacttttattctgtgtagtctcagaataaaagtaaatgttggccacatgcctgcaagt

SEQ ID NO: 50826 - DNA, 716 bp, Homo sapiens
aaaaccccgtctctaacgaaaatacaaaaaaaaaaaattagcctggcgtggtggcaggcgcctgtaagcccagctacacgggaggatgagtcatgagaatcgcttgaacctgggaggcggaggctgcagtgagctgagatcgcaccactgcactccagcctgtggacagagcgagactccgtcaaaaaaaaaaaaaaaaaaaaaggcattgctcctgcataatcaagggctatttttgcatttctttggcttcttgccattaattattgtccacggcgttttacaaaatccacacaatttttacggcatgtatatggagacttagagaaatagagccagcagcggagagagcttcggtgagttcatcctcggctccctgctttcccagacgtccccctggtgtgggcctgtgtcactgcgccatctagtggacacagcgcgcagctgccgttggaggcactcagacaagccagaggaaagggtttaaagccctgactgtcctgatccgtccggccagttcccggatgatctcataacaccatcctcttgatgtgcatcatcagcactaatcgtctgggacaccgggaatccctcttgtaagccgacagctctactgatgagttcagcctcttcatcctctggcaaaaccgtcttggcaaagccagacagagaagaaaggaatgaaaactgacatgaccgtatttataggagcaaga

SEQ ID NO: 50827 - DNA, 3945 bp, Homo sapiens
taccttcagattgtaacattaggtagctaagcaattactcagtacagttaggaagtaaatcttgccaagaacattcacctcatcctcaatcccaataaggcgcctccttatgtgctagtgcctcaaaaagtttacttaccatcttttgggcaaacttctttctcaggcgcttgatcttcagctctgcgaaattccttcgctttttcttaagggtttctggcacagcaggaacctccttcttcttctctctaacgttaataaacaaaaatgttatcaatagctcaaaaagctcacagcgctgtattactcccgtactgagcagtgttgtttaccagaaatgctgtcactgactttagtcactagtaactttacttgctctggcatgctacagtgtacgatgcatattttagctccatgtcaataacctttaacaccatgttgcctaaaacgcaatcacaaatatgacaatagcaatacgtttttccctatttcaaccaagaggcccggcctccgacgactaattaaaaaaaaaaacaaaaaaaacacaccaacacccgaataacaaaatgtactagctgaaagactactgcaaggcactgaccccgagactttaagcgcaaaaattaaaaaataaaaataaaaaaaaaacaagccaccaccactctggttcaatcaggatccacatgttgaaagcaaaggcctggcggcagggaggcctgtaccaagcaccagccaaggacgaacacaattcagaggttctgcgcctcccccgaaagaccctctaccgaggactgggccgtcagccaaccgacgggttccacacacattccaacccgacatctcgttcccgggatctccaaaacctccgtcctaagaccgcccgcatcccaaccctagcctcaggtccccactggtgtcacacagcgttcacaatcaagcagggaggtgggcaaaggtgcaagctacggccagagagagaaaaagtgacacaaaaagtatctggctctggagatggagaaggattctcaagaggaccagaagcaactcactctacaccctccatggttccagccggaaaaagaggaagttggcgcatgcgtactgtccacttaaagacttcgcgagagaagccccacgactcataggtgtcttagaataagccggaaaagaatccagaactaaaaagccgccttgcagacgcaaagaactccctgatttagcctctttcaacaaactttcgggtaaaacttgtttgaagaaaatatatgcatttgattagactttttaatcaattcaagagcaaagagtgctgacaccttggcaactccgggtcctaatccccaggctgcgctgacaggattaggctccgttcctccccataatgttcccaggacgagcctcatggggacgaactacaaatcccagcatgcaccagtcttcgcccgcccggcgggagggcaacggctgaccaggaccgcaggcaagcaccgcggcgacggttccagccaggaaaatgagagcctcttgggccacgttccaaacggctagctgcaattcgaagtcacttttggccgccctcccggctccctgccgcggtagtcgcagactacacccctttcgccgctccgcgaggtccttgtcgtcgctccagcccacagggctgtcttccgcagcgcctgatcgcaggcggggcggtctggagtgctctagcttacgaaaagtggctagccagggaccagtggggaccggacggccggaggaggatggccggggctctgctgactgccgagctcggcaggcggaggccaggacaccccacgggagggggcgtgagctgcgaagggaggtgcgaggagggctgaggttgcggccacggccgtgtgagaggggctacccggctcggctccgcggacggctggcgggctgggggctgggccgggggcggggtgcgcccgggggcggggaggccgggcggagggagggccgatgccgaggctggcgcgggctcttcccggtcgcggggttatatagcgcggagcgtggagcccgctcagagccggcccggagcgctctgacttgcaagcgggctgcgctgcggagcccagtgcccgagtgacacccgcggagagtgcagggccggggaacgcgagccctcgggggcagctgcaaggcgttgggcagcgcttgcctgcgccgagcgagtctccccttcccggcgctccgccgccccgcaccccactctcccaccctctcgcaacttgggtcgagttgacaactcccgcggcagcccgctggcccgtgccgcctccgctgcgcacccctcccccggggtgagagggagccggcgcgccggttccggggacgctcgggcggcagcagcttggccatgagggcagttcgagtagtctaactcgcggctgtcaccgccactgcagcggagccggccggccgggcgctgcgggacgggcgggcggctgccggcaggaggcgccgagccgggtgactgccgcggcgggcacagtccggggccacagcgccgagcccgggcgggagtggccccgcgcaggcagggagcggcgccgcgcactccaacccggcgggcacctcgggggcgggcgcggggcgcagccttctcgtcccggcctctgtgacaagcgccccggagccgggagcccgattgccgggctcggggtgggcgcggacgcaggcactgggctcgtgcggggccccgggcgtcgcgatgaacatcgtggtggagttcttcgtggtcactttcaaagtgctctgggcgttcgtgctggccgcggcgcgctggctggtgcggcccaaggagaagagcgtggcgggccaggtgtgcctcatcaccggcgccggcagcggcctgggccgcctcttcgcgctggagttcgcccggcgtcgggcgctgctggtgctgtgggacatcaacacgcaaagcaacgaggagacggctggcatggtgcgccacatctaccgcgacctggaggcggccgacgccgctgcgctgcaaggtaacctggacccgcgcgggagcattgttgggtcaagcctctttccaccccgcgccctaccacggcaggccccaaaccccgctgcctggtcagccccgctgtggaggaaaggaacaccccaccggtcttttgggagacgagtggaattcgcttcctgataaaggaacgcgatcacttctgtattaccagggagaaggtgccctgtcctcgcggaggttcggtctctggggaccacggcggggggagggggcgggtttcctaagccctccggggtagggaaggcggagggaacttgttaccacaggtttggatcccaaagaaatgtcttgctccgacttacaagcggcgcgatgggaaactgaagcgtctttgggaagttgttctgactagactgaagaagtgtctgtcttactgtggtctgaaccccttagacgagggcagtattgacggtttcattataagtttagcctgaggaacataattacattgtttcgccagcgataagtgctttagttacattccctgagcgtgattgaaagacgccttgcttcctaagagaaagctcttggaggatttaggcttcgttgtaaatttcttccatgtttttggtcaccccagaaaatctgcatttctgaatacttattaactaacctgaatctgagttgtttttttttttaagccaaagcaaagtccataaccaaccataaatattggttcaggaaatttgataatggctgttggtttttaacaaaatttttcatttttagggaaaacatttacctgtacggagaaaattgacttgggcacttctcccctgtattgataatttatcatcaaacttattgatacctgcgtttttaatttaagggtgaaaatgtaccattttcattggtggtatggaggtgtagcaaataca

SEQ ID NO: 50828 - DNA, 862 bp, Homo sapiens
agggttctcatactaaagactaagagctgtttctcttgggccactgtttccccaaaaaaagaggagtgtgtagtgtgtgtgtgttgttctctgagctctgggctgagatcagttctttgcaggtgtctttagctccagcaagctgatcccatgtggtctacttgtattgggcttgtcacaattacatgactttcccctaagcaaagttatccagtaaattgctgtaattcccaaagacttcatgggaggaaggcagctgtaaagctcagtcgttggcaagccttgcagcgttagaaatttgaagctcactgtagtatttttgttttgtgtgatctttgtcctactgatcgccatgtgactcactttctgcacttccttctcttttgcatgttttctcctcatctggacttctgaggacagctgggaatggtgaggaagaaattctgccccactgtaacttgcaggtttttacctacacctgtgacgtggggaagagggagaacgtctacctgacggctgaaagagtccgcaaggaggttggcgaagtctcagtcctggtcaataatgctggtgtggtctctgggcatcaccttctggaatgtcctgatgagctcattgagagaaccatgatggtcaattgccatgcacacttctgggtaaatataaacatccttgttttctttgctgggccctccttaatgagaaggttgggaaggggagagacttcagtgccagcctgaaagcaacctgtactctttcgccacaaggtctccttagctcttccctatggtaaactgcagtgtatgctggttactgttagtcgttttgtccccgcccacccccccgccacccctaactcagt

SEQ ID NO: 50829 - DNA, 440 bp, Homo sapiens
gggagacttaggcaatagaatcacgtgaactctagagactccagcccctctctgcaggcaaggagttccgttatgattgttcaacttgcctgtgagtgttatgaggaaaactggatcttggtccacagcaaaatctgctgtatcacctcagtccactgagacggaaactgcaacttgcttactgttcaagttgttgaatgtttcctctatgagtctctgttgaccttgggaagggttcagattgagtattaatgcttttctgttaggtttagcaacaatctgtttatattaggcattttgagggtttgtaatgtttaagaggagtggcattaaataatctaatatattagcctcatgattccaattttaaaagtgttattgagtaattgtttagatttgtgattttactaggtttgtaaacaatattggaatgttcatga

SEQ ID NO: 50830 - DNA, 1490 bp, Homo sapiens
ccaaagtgctgggattacaggtatgagccaccgtgcctggccctggtcccatttttaattctcttaagaaatgctttagatctgcaagtggggtgtgcagatctaagcttcctaggtttggcatatagtttagcctctgtgagcaaaacctatttagccaggaccaactctaagttgcacccataataataacacaacagctagtgctctcatttaccaagtacccactagatgccaggtgcagtagtggatgctctgtgtgattggtgttttgcaatcatgtcaagggcatatacttttaagaacccaacgcttcgaggggatatttgctcaagatcacacaattagtcaacagatgaggtaagagtaaacacagtccccacttgtgcaactccaggacccatattcatgactattatgctgcggaaatcatgaaccagataaagttcacctttagtcccttgtctacaccctgaaggtgtaacatgagggatcccatctgctatggtttgaatgtgcgtgcccgctccaaaattcatgctgaaacttaatccccagcgcaactgtatcggaaggtagggccttctggtggtggggttgagtgctctgccctcatgaatggcattaatgccttataaagaggcttcacactgcgtctgctcctttttggcctttaaccttcctccacgtaaggacacagtgaacaaggtgccatcttggaaacaaacagcagccttcaccagacaccagaccttctggcaccttgaccttgcgctttccagcctccagaaccgtgagaaatcaatgtttattgtttataaattacccaatctgtggtatttttttaaaacagcataatgggactaagacaccatcagaacttgggaccaaaagaatacttttgccctctgagagctgattcttaacacagaataaaaatgaagaattactttaaagagatggactacctcaagggtaacttgattaaaggtctggagggaggaggagggttcagtggtcggtcacagtctcccacaacagataaaattagggacacactactatcatttcaaaatgtgattaatgtaaaaaatttaaataagatattttatattctttaaaatcaggactacatttttaaccacatcctcttactaccaaaaagaaagtcctgcgccatcactagggcagttttctctctggtggggagagatgtactgggaattatcacagcccggtgattccagccgctgctactttctaagttcttctcccacccagtgttggttctccacaacatgctgttcatggatatctgatccttggcagttacagctcacagtaaattagcaaacagaaattgggattattcatccactctcgtgaatttcaggcctagtcacctccaggtacaccatgaatatgccaggccctgggacccagtgcccacccgtgaggcccatccaggcactgagctggcctgcccaggc

SEQ ID NO: 50831 - DNA, 1328 bp, Homo sapiens
tagctagaatcgtccattactggcttttgtcactaactgaaaaatgcggtcatggtttccttttctctggcacattaaaaataaaggacatctttttcctttcatgtggacatctgatgagatttactgaaactctacctttaacgctgcaagagtttatgggaaatagtaatccaccccaagaataaacagtaaatggaatgacgattttctaggaagtgctgtgtctggctgcggcagaagcagcaatgagctaagagaggttttttggcagccctgaagggccattgagaactgtgaactgtgatgaagaaagcattcatccgtttatatctctgtgggagtgccttctgtgaggcatcagggtgtctgccttatctggggatttcctctggcattacagaaaatgatgcaggttttgcctctgttccccggaacaagaggtgagaggctggcctggctggcgtgagattctcactcgtggtcattctcactgaggttggctcagaaatctgggtgaaatgattcacctgctgcgttggcatggcttggagggcagcttgaagctgagtttccaaagctgagccctttgcctaggaaaactcatttctgttctctcctttcctaaggacaggctgtggtcagcaagctcagtggttcatggaatgtctttagaaaacaagttgctccatgtatgcaagaaactggtacccaaatgccggttgtggcagtatttgcagcagcaaaaggttggaaacgagtctataattcatgagtgggcaactggcttatgtgatgcgatgtgacgtgatgaaatataatgcggctattttcaaacgatgacagcacactgctgtcattgacagtgtcaggtctgatagatttaaatgggcatggtggggcagaaaatgatctgtagagtgattccattgccgtgtacagtgcatctgtatgtatggcctaggaaagggtctaagaggcactccttgcctccagatggggtgcagggctgcttgatgaacttggggtgggtggggtgagagatggatcctttcctgacttactgtcctataaggggcagggggatacttgcctgagtaggagaggagcagtgggtagctaagcttgctcccagggccctctcggggaaacctgctccttttgcatttttccaggactggggagaatccagccttggactccaccagtgggcttcactcattgtctatgaggtggccaggctcactgtgtcctgagggccagacaccccagggtgctgctgaagaggatagtgcccattctatctctgtctctccctgagagcggga

SEQ ID NO: 50832 - DNA, 586 bp, Homo sapiens
ttttctctaaataaaacttgggctttctaaagcatcggttaaaagaagtcttctcagggggatgtgctgacagctaccaccccaaatccagagccacctcaccacccagcgggggtggctgagtgaggcacagccatggccctcctgcagccaggctgtcagtaacttgggccctgggccctggaggatgcgctggtggtcacgggagaagagtcagggccatggtttcggctgcaaagacggtttctggatcagtttccacagtctttgatgaggcaatagatcttacatggctgttttatttgcagatttcagaggaagcaaatgatctacaaccagtgagcctgactctgacctgcgggtaggaggtcaggtcattgcagccctttggaggccttcactctgtgctgggttaggagaatgtgtcccctcttccacctagaataaagatgacacagctttggagggtgatttgttgcatcctgcagggtgaaaaggagacaattcatctatgtagcttttatttctggaaggtcattctcttgtatgcctgttcctctccactagacttaaagggtctgagatt

SEQ ID NO: 50833 - DNA, 605 bp, Homo sapiens
aaggactcagctttatgtaacataacctatttcctccaagggcacccagccctcccaatactgacggacttccccacatgggaatcattaaaaacaaccctagagttatttccttatgttgctgtttgtttattctccagtcgcgtgtgagtcagccagatcatgatttgtggtggttttgcttgtgaaatcttacataattatattcctattgtcatgttgggtcgagcagttagaccatgtagtgttttctcattgcacaatgtttgcaaatcaataaggagaaagcctgaacaatgcgatgacgttggccaggaacccggcccgagtcacccaggaggcggctctgcagtttctcaggtacagcctatccattctctaatcccactgctgggcagtgactaggccgggtggtggcctttcggatgggtttcacggaggtgatatttaaaagatgagagtgagagaacaaaagaacaacaacagcgcttcacacagaaaccaaccacatttttactgcatctgctccacgctggattccaacatgctggcccggagcgtggctggctggaagcaactccaacaggtttttcccttccccgtca

SEQ ID NO: 50834 - DNA, 906 bp, Homo sapiens
ccactttaaattattttctaaaacaccatgcccttttatgtcttcagtgctttgatgcttctgcctataattccttttcttatccaccttaaaatctgaagtattctttaaaacatatttcaaatattccctctgctatgaactcttccctaattccttcagccagaaatgttcatttccattcacaattcttgacatcactaaccacacttcgagttaacatttatcaggttatacttactatgtcatttattatgtggggtaggcattacaaacattatttcttgcaccatgctacaaacatttaactatttttataagaccattgtgtaatgtttgaacactgatcccaggagacaggatttgtggccgtgggttatcttcttctgcatattgattttatttgcctgtcagtctccaacttgaccataactccccgagtccaaagtttagcatgtttagcaagtttagcatgctacccagcatttgtaggcctttaatgagtactgcccagtgtgagcaaacaaatgttccatgtcctgtgcttcagctgaatcagttccaatgttcaacgggatggcattctatgggcagattaacttcatatccatctaattcttcatatacatgctgaaattatggaaacctcttcacaatatactatctaccacctatctttcccttagtaagagtttttcaaactgtaaacctagtactgttttccagcaatggttcaaatgttccattttaggacttgattctagactttattttgagacagagtcttgctctgtctgttgtccaggttgtattacaggtgtgagccacctcatccagcctgtacttttcttatgcttttaaaaaaatagataatactacagataaaaaaaaaatttggaagttttt

SEQ ID NO: 50835 - DNA, 725 bp, Homo sapiens
gaaagcttgtaccttagtcaaataaaagtgcgagtgagttttcaaattcaggactggctgctattttttctttaaaacaggcaaatggaaagtatttaataacaaagaatataaacctgggtatggtgaataaattcatcattcatcttttttttttaaaccttacacaaatgcagtaacttatacttttgccagaaattttctttaacaagaagattctggagcccaaagtgagtcatgcaaatcaaagaacagtctggcacaggggttattaatagtgatccaagggcccctaaatagtttgaaataggttgacttcacaacaagggcagtgcacattgtatatgactcagagtcagtgtggtgcagggaagtgattggggagttcaggaattccccagaagcgcattcaccactcatcttaataataaggaagatttcacttagttggcttatttagaagaaatttttttcaaggctcagcttttcaataaagacacaactgtgactatttctaccaagtaagacaaaatagttgctgtgaaaatgatgtttgagagcaccttgtgaggataatgagtcatcttcaatttttagtttatttaagtggggttaaaatgttgctcgtaaaataaagatcgttcttcttggttatgattcttctcagaaaaactccattagttatgatttccctacgacagaaaaacaccaaaaaatggattata

SEQ ID NO: 50836 - DNA, 2095 bp, Homo sapiens
aatatggacccttaccaaagaaaattattcacaaatgcaaaattctacacacatttccaaagacttccagaatcccacggccattacccccaccgcctccctaagaatcccagagtggcgtgcttctcaatggcctctgcggagcacccccagcccccaagccacagcccccggctcgaccccgaagagactagagttcctgctctcacacagcggattccgtaactgagctttgtctcctcgcccaactcccttcaccccggcaaggtcactaccgccaactacccctttaagccgagccatcacggtaggagttcgtaacagccacagcagaacttgcctgtcataggatatattttgtcccctcggccccacctaccctccccatttcggcaagttacgtctttaccactagcccattctacagaaatagctgccgccgccaccctccggcgcgccccggccccgccgctccgcctccagcgcccccaggcccatttcccgcagaccctccccgggccgccctcccctgccctactctaggcgctccctctccctcgcagccacaccgtggctgcactcgccgtcctctcttccggccgctaccaccccggccccctagaaccccagcctcccgcgcccgcagccgcgttcctgtctccccgacctccgcacccccacttggcccggcctcctcgccttcctcccggctcctcccctcaggacacctgtgtcgtcccaccccctccaccacacacgcaccccccaccccaattccttcgcctccctgtcctccctcccccgccggtctcccctccccgctgctgccccgagagcccgatgtgggagggaaggcgcgggggaggggaggccgcgaagggggctgcttttctccgggttccccgtgctgcggaactgcagggctccccagcgccctctgccttcttcgccggcggcgcggaagtcggggtctcccggacgcccccgatgagggtatttaccttcttgccggggacactttgcagacggctccaacattggcaaacactacagagaactgaccccgctcggccgccgccggcttccacccctcgggctccccgccccccgcctccgcccgcctccgcccgcctccccggcgctcccgccgcgccctcccgcgctcgcgccgcgcgcccccgcctgcgcagccgctcccgcgccccagcacgcccggccggcgcgcgcgcccggcaccggctctacctccactccgcctcccgccggcccgcgaccaagcgcggccattgttcgcgacgcagctcccgccccctggcggctgccgggccccagcagctgcaggctctgcggggctagcggcggcgagctgggcccctgggcgagggccattcccggggggcttgggcacgcgggcgagcgactgcgcaaggagcgcgcccggtccgcagtctcctcgtccccggcgcgactccccgccccctcgtctgccaagggtgggcctggggcagccccttccacacctgcaactcggcaacttccttccccgcccgactgaccgtctgctctttctggtccgcaccctgtgctctgattccccgctcgtacctttcccaggctctccggctgcccctctgtgctgtgcaggggacgcgcgaccatcccgcgtctgctccggccgccgctgtgcaacgcacggtttagcggatcttgcacctttctagacgggggagggggcggggaggaggttgcttcaccgtctcgcccagcaaacaccagggatccgtgatcacctgctcgccaagacccgcggcgtggccagacctcctcttctaccgaaaatattagtcacatgaaaaagaatccttggagccaaaaatgagaaccattgaaaacaatgccctgaatcctagatttatgaggcaagagtgccagaaaacagaaattacgtcttaattcgtcctggttttgatgtggattacttttgtctagataacttcaacccagttaagctcaatgaaactgaacacttcgtttagtaaccggcaccaaaaataatctgacaaagaaatttcgaaatagaactattagtgtgttt

SEQ ID NO: 50837 - DNA, 3154 bp, Homo sapiens
tgtacaaaagaggaagaagatgcagaaaagggaagaaaaacacttttagcagagtaaagaaaaaaaaatggaggaggaacagagacttgcttcttccagaaacaaaagcaaaaaacacttctaagaaaatgtggtctctttacccaaggggatattatgaaaacgctaaagggtactcagctgacactcctattgagcgttctactttctcttccaatgcctttgataccgctagtcttcacctgtgaattaaatgcaggctacagataacgcactcaatccctgcacaactacaattgtggttgccatctttgcctggaaacaaaaaacaaaaaaacccacaactccctagattcgggaaaaaggagtaaattaagttggaaagccagaaaaccacgccttgctaagtcggggggatatggcacaggttaacaaacgcctcctaccaaactaaggttccactaaaggtctgggaataagggcaaagagatgtatagccttatcgcgaccgcaagggtggggccttgcagtgggaaacaaaatagaaggcaagctatcccgagaggtttaagggggctgaggactcggctctcgggagatcgcccatcaggcggtggacacggggcagcttcgagaggaaggagacagtggactgctggaggaatgtccgcgagaataccgaggctgatggaaatagaagatacccacgggcacaggattaagagtcaaagggaagaagagagggacggggccgagcagtctggggggcccggcgtgggaggccggagcagaggccgctaagcgccgtccgcagccagccgccttctccggagacgcattctcggctcccgcacactcagccccccgccgcccctgccccggcaacaaccgcgggcgcagctgtttccgtcgggccagggacagcgggggtaaaggcaaccctggggctggcgggcagcagactggcagcgcccgtgtgtgtgtgcggggagccgattctgagaccgccaacgccagactttgccctttcttccccaaccctcctttatcacccaacttcccggccggctggtgtccgcttcgaccgacggataccgcaccccccacaacgcctctcgccgcctcttacccctcccccgacgccctgagctgagggaaaacaggccacccggaccgatcccgaacccgcccgggtgtccccgaatcgcggacgccacccccgcccgaacgctggcactctctcggcggctccctggcccgcccagatgcagcaaactcctctcacctgcattgacgccatgatggaaccatccccccaagaccggcgaggccagagacgcagggggaggagctgccgtgctcgcgtcacgccgcgggggctcaacatcccgggcgcgggggcggggtctgcgatgggaaggggatggagcgaggggattggctggcgcgcagggcggacgggaggaggggctacggggcggggcgagggcgcggtaaatggcgctctgagtactttctgtctcagtccggctggccgctcacgcgtcgggcccccatttactctcgttactgaggagacacggctccagttttgacccgactacggttgttttcttcgtgtgtaccgcgaaatgctgatgacgtccggttccgcgcagtttttttcctatttcgtttccaaccacagttgtgcggttcacagatttttcccttgggatgtgttttccatacctccaagcccactctcagagccttggggccccataaaacttcatgcgcagctgctttctggtatttgcagacctggaaggcttctcgtattcttaatttggggaagagagacataggtttccttgtacaacgggatgaggatttaagagcagaacgacactgatattttaaaggcgagggtatttagatttgtggagctgaaacttgcctgaaaagggagacaaaatttggaagtttgttgtgtgcagtttctgccccttacccccgcccttcacttttaaactgcgcatatatcaacaatagttacggttgttgcagcagtctaaatttgattatcagaattgaccctaggcatgaatttttttttaaatataccaatgtcgtgttatatacacttataccattatgtccagacttctcttaagcatagttcgtggtgggcagttttgtggtcatttagggatgaacttgggtagggaaagctgagcatacataatttattttaggaatgcaccagttctgccaacatttatcagaagtcacgtttttaaaaagctattctggaactgaagatgtcattggtttataagaggaaaatggaagccaaaagcttacacctcatgctctatctttaaaaattaaggtggcagacacaatgagtagaaggcttttatgttaccagaatgaaggcttaaaatctgtcattttattgactcggctttctttttagaaatttctttaagatataaaagcaatgtggaatatcactctttcacactcttaaaatagattacgttctctggaacttctctaatctgaaatgtgttcaaaaaggaaaaagatctttaaaatacgccagttagtctatggtataatattaaacactattcatcactagagaagttatggtggtataccctcccctttctcagatgtccaccttaatgccagaaatgagcggagtttccctttgttgtgcaaaatgactgtgtccttgagggatgtttggatgctcttggtaaaccggaatcagccagaagcatatccggtgttagccttgttgtgtcatcaacattacaacagtgaggaaacccacatattccaatgaaagaggaaaacttaaagaagaagtttccagtgtattttctttgagatatatttattcctatgacctcagaagatcagcttttaccgtccaaggttcactttgcctaaaagctgattgttcctgtggaaacagtagcatcggatgaccctacaaacaaagcattatgacatcatcagagccaacaacctggcatgacagatactaataaggaaaaaagaggttacaagaattctgacactcatcacagtggatccaatatctggtcccttgggtttcatatatgttagaagtatcttctcaggagggaaaagtcaa

SEQ ID NO: 50838 - DNA, 2645 bp, Homo sapiens
agccgagatcaagtcactgcactccagcctcaggacagagcgagactccgtctcaaaaaaaaaaaaaaaaaaagaaaaagaaaaaaagcaaatatggcagttaaaaagtgagaaagtgaggttttaagacactaaagaatttcaaggccaggcgcggtggctcacgcctgtaaccccagcactttgggaggccgacgggggcggatcacttgaggtcaggagttccagaccagcctggccaacatgtcgaaaccccgtctctactaataatagattagtcaggcgtggtggcatgcgccttggtcccagctacgtgggaggctgaggcaggagaatcacttgaacctgggaggcagaggttgcagcaagctgaaaacgaaccactgcactctagcctgggcaacaagagcaagtctgtctcccccggccccttaaaaaagaatttcggttttctacactaaaagcaatgtggagtagaaatgctcacgctaaatggcacaaactccacagttatatgttacttaacagatctcagttccttaagagaaactcaatgggcacagtatttcacactagatacctcctttcagacaagactggacggccagtagatgcacgatacccccaactcatgaagtcgagcatagaatcacccaacaagttacccagaaggtaaacttctcgggtactgcagctagaagaagcgagagacctctccctgggctagggactgacttcaagaaaagaactaatctgagcggacacgaggaacaagcagaaaggaaaagcgacagggctaccatgctcctaactccaccctcccgcgctcagcccggagaaggcccagtctcgctggctgctgcccctccttccacctctttccaaacccaccgagcggcgccaggaaaggtcccgccgccctcttctcccctcccccaaactaggggctggggaggcccaaggaggttaacagcttccgttccttccccgcctagaagggaaggggtgggaagtgggattgcgagctcgtcccgtctcggcctccctcgccctccacccttacccggagctccgtttccgccccagcccgagactcactcgtcagtcccgcagccaccgcagccgggtccccgcgtactgccacagcccctatcccagggccgcccccccacccccagctgcctgctccggtgggttccggggcagtcgaaagaattacttccgctgggtcagagccgctttcggcgacgcgcgggagatccgtacctggtgaggcgaggacgcagagtgtgtcgctcacttccgtctggaggtagggcgtagcgccctactcttttcccctatagtaggccagcctatgaacgcaaccggcaaatttcgaccaatccgagtctagctcttctggattcccagcatgcagcgcagaccctgatccaattgctgtaaagacgcatccttagagaggctctcgggagtccgagagagcactgcattctgggatttgtagtttctctggtggataccgtcggcgttgggaccgaggcagccctgcatcctgggacttgtagtttctcgcactgcgtgttaagattttggtggttacagagactgtccgtacctctcatttagggttacgcctggaggtgggagactgctgaggaaagattgaaacgtgggagggcggtttctttgctaacgagatcgtactctttatgaagcagcatctgtccctggtgaaaagttgctgtgcgtgctgaagagccagcacagcaacgactagcgcaatcggctggcctcatttcctctcttcccggtagaattcaatgttaactgaaaactaaccacgtcccccactccacccgcgagggtcctgcctttgcctctgggttagctcagctgtcctggatccggagctcacgcacagaaaatccaggcgcctgccaaaccgttactcagtttttgggaacttctttctcattccacgccccgcttcccacccccccgcgtttcctatggtaagatatacaggcacctttccaggaaggctgaaacagctaaataaagttcaccttctactgttttccaggagtgtggcatgaagagaatgtatgtagggccaagacaacattacaaggtgctcaacgaggcactttgtgtgctcaaaaaatagataacaggctatctagagtttgttgaactgaggacttgccagaaaggctttttttttgtttaatttagttaatttggtagataaaagacattggttttttataattagttgcaataatcaaggagattgtcttggataaattttttaaagcctttacagaaatcagaacaaagattttttggctgtaatggtagctcgaagtagagtttggtggggaggacaggcatggaggtgcagatgaggaggctgtaggccccttttcttttctcttctcttttctttccttcttttttattgagagggtgtctcgctctgtctcccaggctggcgtgcagtggcgcaatctcggctcactgcagcctccacctcccaggcccaagcaattctcgtgcctcagccccctgagtagctgggattacgggtgtgctccaccacgccgggcgacttttttctgtgtttttagtgaagacggggt

SEQ ID NO: 50839 - DNA, 1380 bp, Homo sapiens
catttttgttcaaatcgtatattctttcttctgtgccaacaggctagaatcattttccgcaaaggaaacagtttttagtgatgtcgtccacgagaaaaaaaaatatttaaccctggcttctgggcattgtcattctcgtacagccctctgcccctccacactgttataaagaaggtaaaattctaggaaggaggagccgctgagccaaggacagagcggcgggctcccagctcagctggcggataacgcgcgcggccgggaaggcggcaggcgggcggcaggcgggcggcaggcgggcggcaggcgggcggcaggcgggcggcaggcgggcggcaggcgggcggcagattctgcgcacgcgcaggcagcccagctgccagtcaggcgtcccgggctgggcatgcgccacttgtgcggcagtcgggtgggaagccgtgtctcgcagtcgtggactcgtgcagctggggcgtccgcagccgctcgtcacccgcgtgatgctgtttctggcgttgggcagcccgtgggcggtcgaactgcctctctgcggaaggaggactgcattgtgtgcggccgccgcgctccgaggtccccgggcctctgtctcccgggcgtcctccagcagcgggccttcggggccggtagccggctggagtacggggccttcgggagccgcgcgccttctccggcgtccgggtcgagcgcaggtagggcgtccgaggtctggtgtcccaagtgaggcggggagggcgggcgtcgtgtcgggcctggggagccccagcggctcttcgcgacctctcccaggtgtccgtggctggagcgcgggaggagccccctctgcggggcttgcagaagtagcaggccgagggccccggggtcctcagcctccgcgagtccaggagaacggctggaaagtgcttacttttatggtagttccaaatccagagggtttgtggtgacaactatatgtagttccttttctgcccttgagtagaagcttagaagtgttaatttgcaaaaaattggatgcagcacctggaaatagaaccgaaagagccaggttaacctgactttgagcttgttctacttttatgaggtggctgtacttttaagaattactttggtccctgggaaaagggggatgcagatgttaattcttttattttgatctgaataaattgtcttctaattctactctgtaaaatatcaggattggcaaacctggttaaaacttggaagaaatgcttaaaatggaaattggaatctaattacatttcagcattgaggaattaggcatgccttttacattttgaagtgtatacactgtgaaactcattttcagatgtatggggaacgcttctgttcccttgaaatttgatgtag

SEQ ID NO: 50840 - DNA, 746 bp, Homo sapiens
gatgagccatagaggtatctagggattatcttgatatagaaatgtcatgcactgttttactactctgatatcctctccaggccatcctgtcttgggcagtttacttccttgcctaagaaataccaatcactctgcccctcttgcctaagaagcaagatgtgatggatagcaggctgcactggctccgctaagtcagaaatcatgggtttgaaccttggtgctgcttctttccctccgtgcaaacttagagaatttactttcttttctttgaaacgcagttctccattctgtggaatggggttgatgattaatacctatccagtctatctttgtggttcattgtaagggtcagggagcagaagcgtgtgataaacagtagagcactatccaaatgttggctcttaatgaagcactgctttcactgttaactagcagaggaacactgggcaagttatgtcacctttctaagccttccttttccttatccataggaagaggagcatatatctgcttctccaaggggctgattaaatatatagagcacctgctctacacaaatgtgaattagcttctttttaaattgggcttttcctggaattttgtaactgtttcgttatttggaattttgtttgcttttctcaacatggttgtcagggattgatctcttgctgtcttaaatgtcctcacttcagacaaaagaacaccggtaagcgccacttgagtggcacccaggcaggagtgaagat

SEQ ID NO: 50841 - DNA, 477 bp, Homo sapiens
gggttttgaagcaaagaaagtttaataattgcagggctggccaagtgggaggatggaagttaattctcaaatctgtctcccatagagctcaggttagggttttcatggataacttggtgggtggggcctagaggaatgggtgcctctgattggttggggatgaagtcataagggtgagggaaacggtcatcatgtgctgagttagtctctgggtggggccataggacctgctgagtcatgagtcacaggtccaagtagagttagtgagttgccagaatgcaaacgtctgaaaaacattgcaaaagaccaatcttagtttatagagtagtgatgtcatttgtagaagctctggggaagtcataaatcttgtgacttttggctatgtggctcctgagcagtaagtgatgatagaaaagcaagctagggaacaatggctggttgtcattgaaatatacatacatcttagcaaaattcagg

SEQ ID NO: 50842 - DNA, 1244 bp, Homo sapiens
ggcattttaaggaaagaggtgtcagaactttgtaaaatgcaggcagacttatgtgtgtttctctagcttttaacataaagcctggcatggaggctgtcttcaacaaatattagcggatgaataaataggtaaaaaagagagaaacataaaagataaccccaagatttctaacttggtatacaaataaatgacctcactatggtctgagagtgatgacaagttctgttttagacaagtaggattttacatgacataggcatctgtagttggagatacagggctgctatgcaaattaaaggtcaaggttctaaacggaactgtgagcgtcatgtcacagaagatgagttcaacgaaaggtggttgaactcaccaaataagtgagtcaaaaaagcaaagaactggggactgagacaaaagtgtccttgggtgaaggaaacaagaaggtaaatggaacagcagtaacatacaggtggaaggggaacttctaatagagctgttcacagttcttgttcttgcataaatcctgggcttcttttaggaggtaagtgggccagatctgaatttgccttatctctggggcagctgcatgtttctcagcctgactggctgattcatgtgcagtcactgaaatgagtcagtcctggagaaggtgagggctagggaaagcttgctgaatttgataagaacctttcagagagcagttctcacaaggaggccaccccagaagccggactgaagggagttggcgaggaagtgggcagaagaagccgaggaagcaggtgtgggccacatgctggagacttttgacccagaaaggaagcaggaaatctggatagtaaccagaaggattagctgggtcaaggaaaaagacgttttacttgtattttaagaaaatgagagctgatcctgtcggaaggtgggaaggatgcccacagaacaggagaaaatgaagcagctctgaaaaggtgacaattgctggagttaagtgctggatgagcgaaagaaaggaaacaggaaagaatataagaacagtgaaaggggtgatccagtggttttaaggatcctaaaacttgaaggagcctaagctcaaaaaagacctaaagtgttgtgggctttggaaccaggcagacccaggtgcacaccccactttatcacatgttggctaaatcaccttagtctcaatttcctcacctgtaaaatagggagaatactacttcatagagttgttctgggatgaggacgga

SEQ ID NO: 50843 - DNA, 629 bp, Homo sapiens
gatgcaggccaaacccgctctagcaagcactttgtgatcttggggtggcatatgaagccctctgcctgcaaagccaccctgaggccacacttgccatcccatcctggtccccgctgtgctcccgccatctggaggccctcactgttcccttcccacccactgccctcggcatgtccttagctgtcttggcacctgtaatatttggcattgaaaagccggctacctcaatctacagcatattgttacaaccacagcatacctgcaatccttggattagataagcataatggaattttagtctccctggactacagatgtagacacattatttaggattcacagacttcagaagtggcaaactcaaagtccctcttacatcatattggaacacagccaaagttgagtttcttgctgtttgtccaatccatttctatggtggttaaaagcatgggttctggaatcagactgcctggatgtgaatcagctctcaccactcactagcctgtaacccagggtaagttacttagcctcactgtgcctgagtttcttatctgtgaaacgtgaatagtggtagaacccacctcttagggctagacgaggctcacagatgtatacataaatcctaacaa

SEQ ID NO: 50844 - DNA, 868 bp, Homo sapiens
ttttatacctgagcaacctccaaaccgaagagtaatttgctatcatcattcttccttactgcccttcataaccagggtctcatattttttattttttcttctaaaaaaaaaaacaaacccaaaaaacaaccgttcaattgcacctcccaggtgcactcccaggcttgccaggggctttccagtcgcagaccccgcgtgttcgcagactctgccgccggcgaaactacatttcccagcgggccgcgcgccctccttccggcaggtacccctcaaaacccggaaacgccttgcggggcagtgtgggagggagaagtccagggcggacaggctgggcgcacccgtgctcgcgcaccccaagatggctgagaggcaggaagagcagagagggagcccgcccttgagggcggaaggcaaggccgacgcggaggttaagctcattctgtaccattggacgcattcgttcagctctcaaaaggtacaacaggccttggcggcggagggtggcgcggatcgggcttcagcactgggacagctccttctgagtcccgcccagggaagccggtccacctagaaatccgcctccagtgtcctgaccccgggcaggcgctccctccaggcggggacgcgcccgggtggggagcggggagaatcgatcggagatgatcctatgtggctatggcccaggctccgcctctcgcgaaatgcgacaaaaaagcatcattttcagtatttggtctggaggccttgcctgctggtcttcggagagaggcagagggaggtgcctttgtggaccctcataatctgcgatctcttcttttgctctctcgcattcactgtcttcagcaagagctgatgtacctacatgtca

SEQ ID NO: 50845 - DNA, 530 bp, Homo sapiens
taactgttcagccagatccacatgacttggatcatctaagatactcacctgaccttgtcttagtttaaatcctgtttttaatcactgctgagttgtaattcttagatgctgaaaggcagatgaggtaaaaatgtgtggtacacatgtcttttcaacagcatggccatatgttgagaatatttgtggttcaaattaaagtttaagacactccgtgccatttaatgaattctaggctagcaatgataaataaacattgactcagcaacactgtttgttttatgtgcttgagactttactttggactgagccctataaacacacatgcacttctaacaggaccggcattaacataatactctgtgataccaagaaaatctggtctgaaacatcagctctgcctggatgaacagctccatttacttattacaagaaaccatggaaaattgcatttacagcagcagtcttatttaataaccttctatactgggtacaattttaaggtcacttaagaaatcctgcaattattattg

SEQ ID NO: 50846 - DNA, 641 bp, Homo sapiens
aagagaattacaagtgaaaggagctgtaagcaaaaccataaagacaataaattaaaggacatgcacagaacacaatttgttccacttggctagagtcgagggaaataaagttcgaaattcaaactggggtcatctttaatgccaggctgaagaatttgacctttatttaataggcaatgaaaaatgttgcttatcaatgtcaacacgtaattcgtggctggattacgcagcaggattttatcaatctatgtcatcatgacctctgaaatccaacctttggtcaggagcatatattgatgtctaagaactttaggattaacttccccagggaaatttatagcacagctttagatttgattctttagagaatttttatttgaggcaatataaaagtctgatgtgtgttgactacaagttttaaaataaatggtggaatgcttttggtttgccaatttctgaaaagtaaaataatgacatattaagtaatggaaatgtgggaattaaaactttcacagaaagagcaaacaaactcatcatttctttccttatctctgtttctgtgtcaggcccccttcctggctcatgtcttgtcctccaagatgtcctcagttgcctctatttcagttcttttttctttccat

SEQ ID NO: 50847 - DNA, 806 bp, Homo sapiens
ttttggtcataagaaacagagatatgcatagattagtttaagaaatgattattctgcaaatatacaaggacatgaagaaatccatgcacctgagtatggttctaacatgagcatctgcacaacagagcatcatggcaaatggaattgggaagccactagaaatggctaatggctgatctttttcatgaagttttgctcatggctcttctcggctcacctgaaccatttttcctcactttgctgattactgaccttataaattcagcttcaaatgacctacagtggacctggactgagcttactttattatttattaactcagctgccctagcagtctgacttagactcttcagtttcaaattcctgaaagaagactctggcccagctcattttttgaactaggtcactgaccactcaaacctatgactagactatctggtgcaatcatctgtggttgaggcagccaggtttctgcgcaagagagaggtgtgtaaacaggtggaaattcgggtggttcaggcttcagtgtgctaaacacatactccaggattcaccagttgaaagaaaattaccagtaaaatatttttgccaggatattccttggaaaataaaatattacttgtttctcttttcaagaattgaaatgctttagattttaaatttaggatgccaagattggaaagggtgtagaggactttcaaagttcaaaattttgtctaatctgtctggattttgagaaaacaacaacatcatcaattacatgagcgttcaagggatgtgcctttggagatagtttattgtattat

SEQ ID NO: 50848 - DNA, 693 bp, Homo sapiens
cagtccctgagtcccttgactcccaaaatactcctttggtctctttctttttccattgcactctcacatttacttaaaatagacttagtagtacacactcctctactaactgaagacattttctttctttctgaaaatatctatgaatctttatgtggtgggtacataatttttgaaaatactattgtaatgtgatattttacctggtcattttgaaagagccatacaaaatttatctacaacatttctaaaaatattttcttggcagtaaatatggggtagggaaaaaatttgtgcaaagccttgtagcaatttgctaagcaaattagaagtctttgtagatctattacatggggaaactttagctctgagtaaagggagtacatttctcagggaaggccgtgggaattgtgaaatgtgtacttgagtctcagaatggggctgggaaatatttttgtcaagaggacaattgcccaagagtcccatagctgacatttgttctaagtgtgagtgtgtctgcatgacatcagactatctggattcatagcaaagaattccatcagatgtctggacgtttggggttggaaaccactttgctctctgtttgctaaatctgttctcccatccaggggttcctcatttcctataagtggaggctcaggcctgaccactgtcagaggctgcatagggccc

SEQ ID NO: 50849 - DNA, 617 bp, Homo sapiens
acacactcaccacctccacgggatatacacaaggctgtagctctttgtgctctcctttggtcactctggggacaaattctattaacagctatgccttcagtatgatcttggcttgtgagtactgaacaccaacttgtccctagtaagggattttactaggtcaacattctaattagcgtccagatggaaggtgcctgttattgttggcttagttgtctctgtaatcctgacaaactagtcgattgaagagtactgttgatgtagtgtatagcagcctgtggctttctttgaaagggtatattaaagctggatccagattacaaatgtttaacctggcaaacagcactatgacctctaaaacaaatattgtgtcattaatatagcagtgtctacagatggaattggcaatgtaaaatgtgctgtctgtaaacattttgaaattgtatttgaggtccttaattaaccccattaggcttacagtttgaagcaaccactcaatcaatataaaacaacaattgaacaaacacagagattcagttattttatatattataaatgccctggagtcggtggttttacatcaaatctgatgttatttaaaagttatattttttccc

SEQ ID NO: 50850 - DNA, 940 bp, Homo sapiens
tgttcagtttatcaattactttttcaatgattacaccttttattttttcatttttaagtattctatgtccttatattttgagagtgtctcttataatatcaaagagctgaatttttgtgtaattcaaacaccaacctcttttttaaaagagaaataatctttttatagttgttgcattttctaatatatttgaattatttctataatatattcttgcttcttttctcccagtctgctattggattaacaaagctttttattattgttcatcatgttctcttattaagttctatttccctttcctatttatttctttatgacctcttttccttctcagggccacaggatagtgtacagttcagcacgcagactttggaaccatattacctaagcttaaatcacagcactgccaactaatcctcaatatgtgatcttggttaatcataaaaagagataccttccacatatatttgcagagacaactaattatgtaaataagaaaattagcatagagattggcactatataagtgtaacatattattttcttgttcaatttggaagttatttaccctatctttcagtttctattctttgaatttgacatgcgtacatgactaagcaaaatctaaagttaatcgctatttctactttcctcccaaacaatgcattaacataaattactctttctacgtcactagtttttttgccacgatttcagttccataattttattattttccaagttacacattattattcttgcagtaaaggctgatttaaatttatccattttgaggaatcagaatctattcctataatttcttcttgcatatcatttcctctgaattaaattttctttttccctaaaatatatcacatagtattgctctcttaaaagaccttgtgtataaactatctgagtcctagtttatctgtaa

SEQ ID NO: 50851 - DNA, 1048 bp, Homo sapiens
aaagtgattacctttgtacacttaaaataattgcagttcagaagccgtattttatctgcattaattctgtgattaatgttaatttccccataaatgacatgagttctgttttcacaacaccaatcacacacaaactcttcaggctaaagagttagaacgctgttactacctgcccgtccctttcctttaccccaatacccaagaggtttttctaaccatatgatgtcaggaataccagaaatttcttcaagcatatctaaactttgatcctctgagtaaatttcacaatgatgcctctaaaaaattgccaaagaaaacaagagcaagcctgacacccagcagaaagcaaatacagtttctatgactaagaacttccatgtgtgaaataaaaaatagagagggcaaaatgattccatttatttaaaagataattgataggctggatattgtttattttaaaatgtctttctgaagctaaataaaactgttttgtttctctttccaggtctacataacgtgactggtatgtatgaagatgatcaccttttcattttgcccaactgaaactaaaattctcaatatctgagcatatgtcatattgaggatatttctaacatcgatgggaaagagaagggacataatattaataatgataagtgaaaatattttacctgtatattttatctcttacttggacaggatgaattttttaaacagctttattgaggtgtgatttacatacattaatgcttacctgttttaagcatagagtttgatgactttgggaaatgtatagtcttattgcttcatcattagcaaaatactgaccatttccatcaaccccaaaagttccctgatgcccctttaggcaactcactttccccatcctggtcccaagcaactgctgaatggctatttgtcacaatagatcagattaatcatttctaaaattttgtaagatggaatcacatagaatgtagtcttccatatctagaattttatacttaatgatctggagatctacccaggttgttacatgtcagtaatt

SEQ ID NO: 50852 - DNA, 945 bp, Homo sapiens
gggagtacacatgcaattattttgttatgagaaacacttgtgagaaaaaaaatagggaaggagccaggggaagctgggagagacatcaaggcatgacgtaaacctgaccctaagtgaaggagagaggacaggacggtggggtagaagaatcctcaatggctacacagtcaaaagaaggtccaacaaggccaccaggggtttctggagccaaagtcagacgttagagtaatcccttatcccaaatgagcctgccttagtagaaatgggactgcgtttgtgtccctggtgcactcagtcaccaccattgcgaaacttgtgggaaatgtgccactggggcaggcttgatgagggagatcaaagtgcagcagatcggttagtgaagctcccggtctttggtggtctgcaagacatgtacttacggccaccacaatccacccattgtgtcatttagacatattcacacaggttcagggagcagctcctccacacttcctgggggtccctcttcctgtttggaacccagaagagggaggttagtgagatgaacaaaagtctctgttgttgtggttgatcctagagatagcactcatcctcttctccaccattcattcaaattcccctcactttcagctaccattttggcatttacttgtctacaagcacccctaccttttcctgctcatcagaaattgctcagtatggtgattcttttgtctgctggcccctggacacatggaatccaaagtgctctgatagcagctggaatttgtagttcaatggcaaccttgctgtgttccctttaagatcacattcctctgaggactagggcttttaaaactgcagggcccagagtctgtgggaaccagaaatacagtgtttccaactgtgtcattgagagcgatggttatagaggccacttttgcttccatctcttgattcctggat

SEQ ID NO: 50853 - DNA, 1489 bp, Homo sapiens
gaatgaatcacttctgtacccgcagaagacccagggaagttacagagacaacattcttatggtcagttcatctggttggctgtataccatgattcaggatttgaaatgttccttaccagggccctaactttcatatagcagacatgctgtggctgagcattcaaatacctcgggagttctgttattctgacaactaggcctttggtgtaaccttaactgtgtctgcccttccactccaagtataagggcatttttgtaaactgagacagaaactctctggctttcacaattaggtatttactgctggttaacagcccttacttcctcattattcttcggcaagtttaatataatttaacagtaatcaatgaactcagcattgctgccctcatatttttccaaatacatattcttttcaaatgacaccaaatgatatcattatcataccttccacaacatcccctgccctcaccctcactggaacaatttctgaggtcacctctgttgaaatctttggcaattattctgccaccttgtgccagggatggcctgtactccacttatcaaccaggatgatgtcctctctacctgccatgtgctgggtgagctatgtttaccttttacttgttagagttaagaaatattttaatcttccaaatacaattttcctaaatttctttactctttttcacttatgtgtataaatcagcaaaatcattttttctcataatatcttgccaaacgtagccaacagcaacaaacattgttaccgacatctattttcagagcatgtttcctggagctcaagttaaataggtatataacctgacttccaggttaatacaatcaacagtctaccagatgcttcactgacacgttttatggatttcagtttttgaaaccagttttctcaccacctatgtatgctcagccctttaactattgctacatacttaataaggttattatttctctgtaattagcaccccacttctggtatgaatttctgtttcagttaaattcggttagcttatattacattatcaagcatattcacaaatttcagtttaaaaaacaaggaatttttttacttacataaatatccctagtagagcagctggagacctactccattctgtgcccacttttgtagtccaggctgatggagcatccactatctggatcaaatccttgccaccaccatggtgcctaactctgctggggctccacccagtcaccactgaggcaaccaagtataaatcggacttattccagttgatacaggagcagttctgtctcctgagataactactgaaattctaattcttcccatcactattagacctgagtaatatagcttatccaaaggctccatgagctaaactctgggcattgagaacctggacaataggaaacaatggttagaagggaactcacagataaatccctcctctttccttctcaccactctctcctgcatctatcagga

SEQ ID NO: 50854 - DNA, 1488 bp, Homo sapiens
cgcctgcagctttagtgtttttaaatgtctgaccaccaaacgggtcatgcaagtgtatggacttttttcttttctttttagagtctgcacagtgatggtaggactgggagtactaatcaatccctgtgccatgttcaatcggtctgttctactgatttttttcttgttgttcttgtttcaccgtgttaaatttaagtctttaagaagtggacgccccgtggaaagcccgacaaatgaaacagtagaggagggtaccaaagtcccggggtcccagttgcagtccgctattgctccaggcccagcgggggcggacctcgttggaggctacggtgcaggtcggagaagatgaaatggcctagcatcccccttcccaggggctcgagtcggcagctttagagctccgacaatctgtgccctcgctttgggctgcgccagggagcaaaaaacctctgcttttttgaaagaggccggggcaacaaggtagagagccgcggccagaagcagccccgggccataaacccgaggcctggatggcttaaggctgaaaccgcctccgcccccaccctcaccctgctggccgagccctcccccctcctagccacagtgaccggaatcccagacttcccttctgatgcataaaacattcagtggcctccagggagtttttgaaattctggcggaggctgctttatccgttgtttcgccccctgggtcaaacactggtccactgggtgagttggaggagcgagtagctcagctatagattaaatttaacctgagccccggtggccgcgtcccgcccgcggtcctttctatacgagtagctttgaaggtgtcaccgagctgtgcccaaatctagaaaagaatgggaggagaactgcatgagcttttaattttcttccctttttccccccttcctgcgtgtaaactggggtaagggtgggcggtaatccccactgattgagcccgcgcggggaggtaaggactccggcgtgggtgccaccgcggttgcgaaaaatcgggttctgaacccggtcagcaggagtggcagcgccccagcagcacctaggcaggaagaggacacttcccgttcgcgtttggtgatggtttcatgtaccaggacatgggtgcggagttgtcctcagaaatagggtctctggatgctgaaatcataaagaccttttccctgaggttgtgcgcgcgggcccgcgccctccctacttcctgagccctctgcctgaggccactgcttttaattaatagtatcagaacggttcgtgggagaacctggagttcttatcaagacaatcttggtggcgttgggaagcgcgagagtaggggtggggggatgggggtggggggaatggtgtaaaaaagtaccaaagcgaaaaggaaaagtacaggctaaacgagacatttaataggaaagtgaagtaaagggttttttgacgccacattttgtgtatttagttttaggttaagagcaga

SEQ ID NO: 50855 - DNA, 3414 bp, Homo sapiens
actttgtgttttatggaaactatacattcatattttggcatagaatagaccttcattctccaagtatctggaaatatttttaaagaaaatgtccacaggtgatctgtaaacaacacacctatgaaagatttgcataataaatataacccgttaattgtaactcttttgcctctgccgtgtctggatggtttcccatgagcgacatgaacagaggccactttcttgacacggtttgcaaaccgcgtgggcaatgaggaaccaaagaatatgttttgttcaaaaaggtcgattttaagaaaaatagtatatgatctctctcctttgtcctcatttctaaaacagccaacaacttgtttttcaaagaacctttcagcaagatattcagaaggagaaaactgagaaagtttagtaaatccgatctaaaaagaaaaagaaaaaaacacctagccctttgatctccctggcattgttattacagccttaaaatatcagccaaccctctggtaggaaaagaaaaatcttacggattaagtaactatttatctcacgatgataattacttgtttgacctgaagtcactcattcctgaaaccacgagttaaattgttgagatgtttttaaaagccggcgctctggctatatttctggtgaacaaatgcctgaccaagaagatcagcgcatctgggacgggtctgagacccacttctgcaagtcgaaagctaaagggtatgggagggagaaagggaagttttccatcaaatacatatctaaagaggtacttaaagactaaaaccacaggtagctggcacggatgggaacggaaaaccattccccctcctcttcccagaactcttgctgagctaggtggtcaggagcgtcatggtagaatataaccccagaggcccaaggtgcagtttgaagaaacggtggcggcttcccctagtggtgtggcttcagagctgctcctaggaagccatttaattccctttaatgatatttccagccgttttctggacctcatgagctcaggatgaaatcagcattctagggtcagcaggcttctccctgctaccacgtgtccagaagcacttccacaagccagggttgacatcgcccaagacgaggcgtgacccggggcgggggaggggacttcgcccgcgtcgcgtgaaggatgccctggccttgggctgcaggcgcggacccccgggggctccccagggtgtaggaggcggagactgatccgctctagccccgagcggtccagcgcggggcgactcgcccgcatagtggagattccggcatgaggcggcggcagtcaccgcctggctgccccgcggaggcccgggagagccgctgcggtctcgggaggccgggctttgggacttgctggcccgaccgccagtcgccctggggccttgggaacagggaaatgcgcgcgccgaggcggtggcggcctcgctgctttcagttttcattgagtctgctggttactgtttaacgtccccacccacgtttcagtttgtttagtaaatcgataggactgtgagagtcaggccgctgccctgtcgccattgagcaaagctaatattctcccagcatatggtctaaaatctttgctagagatcgggaaaaagaaacaaacaaacaaacaaacaacaacaaaatccttaagcttcctctcccaagtccccccatccccacccccacttcccacctcctcgctttcagcaaacttcccagcctgggaaaagtgcggcgcgggacagcgcgacggggtgggtgggggacctgctgccgggagatgcggcggcggccgcgcggctgactgcgactcgggagctccgggagcggcccgcgcaggtaagtttctccgccgccgcccggggcccgggctggccgcagcgcaccgccccggcggctgccgggcaggaggagcctcggttcccctcgggcggctgaaggaggggctgagcctcaggacccctaggccaggccgtgttgaaagcagataccccgaggcctcgcccagcctgcgctggagggaagaaggcgctggaggtgcggcagcgggcagtggggggaccggggaattgaaaggtgccagtcctctaccttagaaaagaaagaaagagagaaggagagagagagagagagagaggagagagagagagagagttgtatttgtttgggtgcagagaaagctttggtggctgtagcgggtcatgtgattcccaggtctctggggggtcttccgtgtaagtacttctgtggcctggggcaaggccaggacaaatggatgttcgtggaccctggaggtctgtgggtaggtgcttggtcctgcagcatcaccccatgcatggcctttgctcaagtctcagcttccatccatctctcatggacacatcttgggagtgggcatctgccggtgatgccgttgggggatattttaaatatagtattgagatcttcctagttaactttgggatgaaatgtcctttggaagcttagttaacaacgtgccagttaagcaataaccgttctgtgtctaactgaaataagccagcacgtgataagatcttagaatggaatgaatatatgtgcttcatacctgatgatctgtgcttataaatcttgctcggaactgagtcaaagcactgtacaacaagcaaaacaatcagcatgagttttcacttgcgggcaagggcaagagaatacagaatccagaagctcaaaagtgaatgggatgtcccggaaactaaacactcattgagagcaccatttcctggttttgtttttgttagtttcttctgctttctcgttaattttacaggtttcccttctctctttagaagcggttatttgtcattaaacattcttcctgtctagctgtcaccgtttttccttaggagtcctcctgtccccacctcctcaccaccactccctctcttttcatgtcctgtggatactctcactcaagccacctgatctgctgtgtggtcgaagtaggtgaccaagtagtgttgggctctttcctggtatcacttgaaggtgtggcaaggagagggaggtggtggtgagtggtggtaaactgctcatttttcacttttcaaaatggagtggaaaattgagagccgtttgtcttcccatttctcctaagctccagttatgggcccacaaataaggacatttttccaaagtgctttatgaaggttcaactcttttagtaaagtgtgtttattaagatctcacaaatattgcatttttaatcacggttataggcatatgggatagcgcaaatttattttagggattgctaagattaaaaaaaaatactcctcatgcaaataataagtatttgtttttgagtgccttgttcttttttttttttttttttttttttccgagatgaagtct

SEQ ID NO: 50856 - DNA, 921 bp, Homo sapiens
aagaggaaaatgtgaaacccactaaggagatgagaaaggaaaaaaatcagcagaaagaagactactgttggtttatgtttaatggtctaacttttttttttttttttttttttacttctaaggaagaatagttgtcaaaatgagggaaactctaaagataaagacacactcagactgattttcaaagcttcattttcccaaatgatacaggggtcaaattttcataatatctactcagacaacaacaataacaaataaacaaaaactgttttgtctttgagcatgaaaaaacgtaaaaatgttcctactatcccctaagtttcttgaaggcaggaattgtatctccttaatgtctttgtttcctaaatgcctggtacatgtgaattgaatttacgccttcatggaaagaagcaataacctccacttacaggttggcattcaggggcatagttcaggttgcgtcaacatcataactgggtcaaagttaagaatacagttttcatctcatgtgtgtttttaaatcaaaagtgaaaactaaagagaataatgacaatctttcttctattttatttttctaatgacttatattttaactgctatttaatggatatgatattaatgaaaacattctgattatccttaataatgtacatttttaaaggtcagtaatggtctttatctcaggcaataaagattatgaaacaaactactgtaattatattcaaactagaatatgaaatgttaggcattttacaatttttcccactattttttatttgcttacagtgactacattcattcaacaaatgtctgtctatctagctatttcacccttcaggcagagtgggattatataaaggaaggtaattcctattccgtagtaggaaggaactctctactagctaggtaaataacacttat

SEQ ID NO: 50857 - DNA, 1031 bp, Homo sapiens
ggttttatggataatttactagggtttcgagggaaggtctctgtttctccatgccaaccttttctgaaaatgttagttttcagtacaagtactgattttacccactaaatgttggtagttactgatttctaaactcaactcttctgctaacttgttggtggacctttgacaagtcacttaacttctttgtctcctcaaccacaaaatgaaatgttagtctgagatgtccttaagctccttgctagctgtgcttctttcctgattcatttgtactatccatttcttgcctctagatacacctttggaatatgcaaatgaatttggaattgtctgtattctaacctgagttggcttctctttctacatcattctttaacccttattccagcacaagacaaacagtacaaaggtctcaaaagtttgggaccttagatccagaatgttttgaaacaatattcactcactaaaatatgaacaaagttaaagcaaaatatttaacaacattgttttacctctcaatttttttgagtttcactgccttgtcgtttacaaacaaatataaacgtaccttatgatagagttattctgtaaactccgtaatgcaagatttccaaaaaaaaaaacataatacaagagttgcaaatatacatattcgggaattcttgacacttttgtcatctagtttaaaaatcatctgagaaagaatgtaatgaattcatttaactgtgagttacattttaaatattttgtagagacacaaactctgaataattaactctgttactactcaataatttaagtggaatgacccttgacagtctgtttgtaataactaacagtgcattttaattattttttttaaattagaaatgacatctctagagttcaagattcttgggagcaaaattgaacttttaaaattggttagtatagagggttatttttcttaatgaaaataaaactgatttgcattttaaaaatctgggtacactttttaaaatgattatgtcagtaatttaacattaggcata

SEQ ID NO: 50858 - DNA, 2513 bp, Homo sapiens
ccagaacgtggagaccagcagctgctgtccactcccagactgtgtacctgagcgcagtggccactctgctcttccgcccagcccactcctgcctgcagtgttgctgctgtcacgccagccggtgatttgataggcttgtcgggttgccatggtgttgacttcttgcctctgaggagctgcccaatgactggaggtctgggattaaagcgggaagaggcagcggccacagcgaatttcagcggcagctgcagcagctagaaacaagaagcaagagtacgaggtctttaggctgcgtccccctcccgcagtcagggctgccagtgagggaaagagaagaaagggtggacggttgaaatggtgatcactcgaagtcagaagatacaagtgagggctttgagacccgctcaggaataactcatgagcaatcagcacgcgctgagaggaaacgtcttccagaattcgttattattcacattagacattactggagtgggtggtgggactgagagtaaaaaggtgttaaaagggacctaaatggttgatacatttccccccacaccctactgttcatttgggcaacgaaataatttcacagatgcaaaggcgctgtacggtgaactttatatcgtggaaactaacttaactccgagaagagaaagtgcaattagacggcaaccgagtataagaaaatagttgccttggacggaggctggcggggcggggggagcgggggcggggaagtcagagagtgcatgtgcaatgcacaaccccagacggaaattgtaaactaggaaatgaaagggaaagaaaccgcttctgttataaattagtaggtaggtgaaggttatgcaaagaagaaaagggaaagtaaagctgttaaaagaatagaataaaacccctgggagttcaactcgaaatccccctttactccccaatccaaagggagtaggaggaggagaaaaaaaagtgcattctggtgtgatgagaactctctggaatgtctggaggagaggatagaagtgcgagggtaagaagacccgggtgctaaataaatggcaggagagagaaatgggggaggggcaaggtaggaaagaaatagtccgcgattcacccaagggactgggagattcagagagattccaggagaaggaaaggaacataagttcaggctcccagcgtaaggaaaggaggaaacgacaagaatccctaagagaaaaagaggaaaaagctgtgtgctgctgaggcggggcgtgggaagacaaccacagtcaattggaaggagcccgagtcagggagcaattgctaggacttcggacagagagggcagaagattgtgtagacaggcggtcaaccagagcagcgcggggcaggacccacgagcgcgaagccaggtgccgcgcggtccgcgccccggctccgggcgacgcagggactttgctggcaatgagaaggctgctcgaccagcctgccggagtcacgattccccgcgagtcccaaacacacgcttcactaactactttacagccacttccattgattttctttaacaaataaacataatacccgttacagcaacacttcctcttgccgccacagctagaatgccataagctctaatggctgcatttctccggacagcagttttcacatctccaaataaatcgttttccttcacttcaggtttggagagtctagtcctcgcccctctctataatttgggaatcacctttaagaataggtagaagacaagtccagacactagtttgtaaatctggtagggctcactcttgtttgcatattaattttgcttataagaagtaactcaatttggaagggaaccgccggcaaagaaatcgactcctttacatctgcagggaaatcaacactagttcggcaggcacacctaagcaactgccctcgagttgtctcttaaaatattcctttaaaaataaagtatttattttaaaatagccccccttcaaacacccgtttctgctgaggttcttccatacatgtcaaagggttgttgaattattcattattgtaattactatcatcattgtcattatccctttccatgtggaaataattttattatcgtaatttgatatctgaagaatttcctgttagtcgtttgataatcatttttttctgctgaaaagaaaagttttgtttataaatgagatagagaaaatgttttaaatgctttgatgtttgctatagatttccgtttatctaatcgatcggaatgccaataaaatcgattaaaggtttagtgttttacaaacaaccattttgtgctttttgattttacgttcagaatgattttaataaagctaatgctttcctttaacattctccccccccaaagaaaacctaaatcttcatcgtttttccttttattattagaaattgccacttacatttctcctaataggaaaataaacaaaaaatataagcaatggctgaaatggtttaaatttcattctcttattgctcaaggtatttaaata

SEQ ID NO: 50859 - DNA, 1656 bp, Homo sapiens
aaatataatgtgtttatgacaccttcccaaacaagccctgcacctttccattcattgtcaacttcacatctctcccctacataaatacccccccaaccctgtcacttacctcgcccccctacacacacagtgacaaatattggtatcaggcttaagtgtgttttggaaaggggttgctaacttaaacaaaaatgttagttaacacactgcctttgttaaatagcccccgggtggagaagacccaacaaaaagagaaaaggaggaggggggctgaggatctttaagtgtctgtggtgatataaagagttcctaacgctgacatcttgtaatacctcgtttcaaactgagctcatctatagaccccggaagcgcggtcaaaagactggaaacctttttccccttgggctggagttgttcttgagctggagggacattggggagagggaggtggggtatttattagtgaattggtgaggacagggtgggagaaagaacaaacagctgaaaactcattagaccgattgtgaagagtgtcctcggagtggatttgggaaataaaatacgccgaagaaaaagtctagaagtggaaattaccttttgtctcaatgttaattactccttgcctccaacactcaacacctaaccacctggtagtcctttttggttctcccctaactcggtgctcaatgtcagggtccgagtgctctgcagtggatgtggctgggctggggttgccctgtaaagtgttgaagaggatctagggaaagttctcggagcggcagggaaacctctactcctttcactttgaaataaaaagtggcccaacgttccgtgagggcggcggcgggttcgcgcagagtttagggacagtggaatgggggtggggcagggagtgggagtcagggtcaaaggcgtccgcggagacccgagaggagcagctgggtttcctggcgctgggagcccagaagtagggcgcaagcggccgcggcacagcggagcagccaggtccagccgctcggatcgcgctcgcgccccatagcggcccgcgggctgggctcgggctcgcccgcctccccgctcccctgccagcggcgccgcgctccgcgccccggggcccaccccacgcagtcccgccgccgcttcagcccaacagccctcctcacgctggcgcgctccgaggccaagccctggaggaaactcttgactctgcgctagaacctctctgccccttccctcagcccattaacccccgaccctcacctccagcctctcttcttagggaaaaggtgaaagaaaacgagaaagagatggtaaacaacaacaacaacaacaacaacaacacacacacgttaggagaattctcgccagcaaaagagggggttgataaagtgggcaccccttacaaatcctcttttgtttccttacttagaaatcaataaccgccccccacaaccagacacacatacacacacacacacacacacacacacacacacacacacggatacacacagttgtattttccaagaaaagacggggggaggtgtagaggagaaatagccaccaattttttttaatggttttcttgatttgacgtttgctgttttgacattaatgacattaatgttattgatgtttcagggaggaaaaggcaaa

SEQ ID NO: 50860 - DNA, 4054 bp, Homo sapiens
agaaagataactcaacagactcaaaagatgaaaggtttttcttttctaagtcttcttaaagttattacattgaacttatgcaattctgataaaatattcaagaatattacataaaggctagaactgtaccccacccccccatcattcttgcaaccgtcacttattctcatttggaagttttctttgactaaccgcttccatctcccataccctgggttttctctcctgcgtatacaagtgaaggatacgtgtttaaatagagtgcctaaggatccagagtgcaattcctcctttgaaataggctgggctgagcggtgtttgcacacagccaggcaccctttatttacatatatctgcatatttgctcaggcccccgcatttcgccattaaagtgcattcatgtgcacagcagaataaactaggcagagaaaagctcttcattaccctaactcatatttctgcttaaagctccctagtaaacaaatctctggtccgataataattactttgcctcattaaaataaaaaaaaaatctcgaatggttaaagggccatgctttggcggtatctatgttttatttctttccccttcttgctctgtgtgtgtctgtgtttgtgtgtaagagcgcgtgtgtgtctaatgaagtttgggagtcgcgcgcaggggcgcgtagggtgcgagacccggaggtccccatcccctgtcctctccgcggtcgccgcatccggggctccagccgcagcgctgggagctttggaagccgtgaggctccggagctgctctgagtccgggctgcgcgtcatttgcagtctggggaatgttgatcacctcactaattacacctctctctcccccctctccctctccctctccctcgctctcctctctcattcccagagtgcatatcgggaatagacacacaaagacatgcgcactcaacttaatcagccatttttttaaacagggctaaaacgataataattagcagaataaagacatatcggattttcatttcctttcctccttttcccaaccccttcacaaccaaacagcgagaccgcggtcggcacatgctttaactcctcccggacccccgaggaccgctccatgccccccactttctgctccagcgtttttattttcacccaataaagttcgaggattattttttattttttttgtttttttaatgaaccctctcgttttacttggatgtgatcagctgtaagtaaaataaaagcaaaacaaaaaagaggcgaagatcgagtaggaactgcaggggaaatggaaagtaagttttttctttaacttttattgagtagtttctgttaaatttaggtcgagtatcgattatctttccagcctgatcttgcacaatctttgatatttcgctccctctctctccctctccgcctctcttcctctctacccctacctcgctcgctcctgctcgctgtcgcacacatcccctcatcccgaccatctcttccgctctgccccccttttctatctctttccccttttttttggctcaaggttttgctccgctgagggagggagggggcactgagggacctgattttccactttctttaggggggctgcgtttttccggatttaacttttggattaagtggcggaggatcatctacgtttgcttgggcagttttctctccttttccctgtcttttcgggttttgccttccccgcgagccccgggcattctagtggctgggggaagctgtcagctccgcaacggcgcgggcactgccaggggtctccgctcgccccgcgcccctgcaccccgatcgggatgactggtcctccgcactcatcctctgaaagtttggacgttggtcggtggggctgggagcccctctctccctgctctttccctgctttaccctccaccccccaccccaccttattcagcctcgtttttcttcctccttttaccacccgcccctcttccccttctcaagttccccgaaggtcgcttagtgtgcggggctggcggaggcccgggggttcgtgagctctggggaggggattccaagaggctggggtgaacgctggggctggggctgcaggtagacacccgcccaccggagcgggcgcggcaggcactaccgagggctgctctcggcggcgcgggcgcgggcgccgcggaggaaaggcaggtccgttaggaggcgggatcgcccggcctctgggccagggacccgcgaggcggcggctgcttgctccgaacggaacgccgccgggtgtgcgttagaccagcggatagacgcccgcggcttggggtcaagaatcttttcctttttagcaaagggcaaggggtgtgtgcgtgtgcgtgtgcgtgtgtgtgtgtgtattgagtggctgtgttcggctgtgagaaccgattcattcttcggcccccctaaaagggttccatgcctacaaatgaacttcacctccttcgtttctccaagcatcaagtgcgccttctggctgggagcagctaagggaaaagggactggaatgcgccgggtctctccttccttctacttctatccacccccaacccccttctcgctcctcttttctatcagaaaaaaataataaaatctctcatggaattgtataaagtttctctgccgatgtccaagttacagaaggttccctattctaatccccttcccctagaagacggtgcactggtttctatttcttttgttacctgtgatccgggcggggggctcctttcggccgctcgggctggggtccggcccagagaggaggcttctgcgggcgcctttggccgcgacttctcacttccgcgcggttctggtgaggttttagctaccgttcggtgagacaccctccttgtaggtaccaaaggttcagatcgcaaacacggaccccccccacctcgacccctacacacacagagacacactcacactcaacacacactcacagacacacattctccctactcttccccccacctccggcccccactttgtctttcccctccccccttccaaaaaaagcacacacacacatacacacacacacaacaacatccccccccacacacacaccaaacaaaaacccaaagacaagttcactggcagaagatggtggattgacactgactcagacagaggcaggttcaccaggaaatctggccgtcctgatttctgacagttgcatttcctctccttgagtctcccccccaccctttttattaactctgttccatgtttaatcaaggatcatgtagatggcaaaaagagagacagagaggagagaggaagagagagagggggggagagagggagagagagagagagagagggagagaagagacaagagacagaggagggtttttttttttttattgtgttctcctggattttcagtggcttgatccctataaacgtggagtggttaaagctcatatgtagtattatatttttagttgggtggatggatggaagagtgagagagaggctgcggctgccgctgccttttcgggtgttgcttagattaaggctgagacttggctgcgattgggacgcgacagtgacacgggcatcgatcgcttccattgagagcaatgcaaaaacacagcccgggtatgtaacactctcggtgccatcaacacttgttttactttgtatttactggcaaaactgacagagcaagctcagactttctttctgttttggtttttttttttctgtttctttactaactgaagactaaaaacaattgtgtatagaaattgctgaaaagggtggtttaaataaaacagaaaggagatattcggaattatttcactacctctgtgactgactgtgttttggagttttccttttccactgaagagcatattaaagagaatgaaggttttcttttttccttcctcatcttaaaaaaaaaaatccttaagggaatatttgatagttttcaaggtttgtggtttcagtcagcaggaaggcacacaaaaataaaagatggctagccagctgttttaacctcttgcacctggcttcagtgtggg

SEQ ID NO: 50861 - DNA, 412 bp, Homo sapiens
agagagggagagagagagaagaatgagaatagaatatataaaaatgtattaaaattgatgaagattatgggttaatcattaatgccctgtattttgttttaaagtagatcacagaaatctcttcctgcacaatgtaagggttctcagttcctagagataataaacctttgatgatgttgtgcaagactcgtcaagaagcactgaaatcagttctgtatgtacacatgactaatcaaaggatcagagaacaggatatgatttgctaaaagtgatagtttctccaaaaagcaaatggccttgctaattgtgggaggacagtaagccttttctttttctacaaaaggcaagtcctgctcccaaccttggagtagatatgcttttgcaaaggctttagtactaagtatttttaaaa

SEQ ID NO: 50862 - DNA, 446 bp, Homo sapiens
tcatgtttacaattgcattaagtaaaaaacatctagggcatcaacttctaaatgaaagattaagttgtatgtttgtacgttgctttttggtataaaacttttcgttgatttacttcatgagttaataaataatgctttaaaaatctaattaagtaaatgcttttgcttatctcatttatcaagaattttaaattctgttgcagatgtttcagggaatgacacagaggcctggaattttagcttgtgatacctggggtgaaactcatgaaacttttagacttgtaatgagttgagttgtgcactctcaaccttagcagtggaactctgagttctgtgcatattgtctaataaagaacaggcattatttcttttagttggatttcagtacaagtatatttgacaaacttaggttttaaatttcttatacagtaagtagcattaggtat

SEQ ID NO: 50863 - DNA, 941 bp, Homo sapiens
ctgttggtgaaagttgattagaattctattcaaaataaagcagcctcttactggagacttgagaaactgtcccatgagtatagctttggtgatagaatctattaaaatctatttaggtttcttcaggctttatttcagattgcagaccatttcagtgatactgttaatggaaataacaatcatggctcatgttgactgttagcaatagcctttgacctggttttcttgctttgactcatacctctgcacaaattatccagagtgatcccttaaaaatgtaaatctgatcatgtcacatctctgcttaaaatcctcctctggcctcctcagagctggaataaatccaggtattttccccctggcttgcatgacctcacctcgcctacctcatttcccacctctttctctggttcactgggatttcttgctgttcctcaaaaaggtaagactcatctcagagactgggcgcagccatttccttaccctagcaccccttttctgcttggctttctccgtttccttcatatctctttttaagtatcacctcagagaggccttccacaagcacacaattcaatacagcaacccctatcactccccatttcaaagcctgttttattttcttcagagtactactaacatttgaaattatctttattatttatcacccctctaagaatgtaaactccatgagagcaggtgttttgtggtattcatgaatgcattccctgagtacggaaaaggaatgtctgcaggggctcaatagataatttttgagagaatgctttatttaattcccattagaattctaacaggtagacattattgaatgtccatttcataggtgaacaaattgaatcttaagttaaatgaacttgtcccaaatccagtcactaaatactgaaagcaggggagctgagagcaaagtagtaggacatgcc

SEQ ID NO: 50864 - DNA, 2126 bp, Homo sapiens
gaaacgtcaagataaaatatttccgaggggcatcacggaagtttaacagaatgtgttagacttgaacgttcaacagcttgctcattttgccaaaagccctttcactaaatgtgggaaatttggaaaatggtacctcaataaataaacaaacaacgatttttaatttaagaacccaggaaaaaatgttaacaattctcacattcagatttcttatcaaaagtcaacgtgaaatataactaatttatcgcaagcaattttatcagaaacttttcattatctcttcctccataagaaaaccaaactgcatttacgtgcgctttcaacagtgttagaaaactaagcactcaaattttttgtactacatataacactttacatgaactttcagatattaagtaaagtttggatcctcaattctttataaagccgtttataagaggtaaatatcttcacgaccgccaaatgagagaaaaagatttcgaagttcgtctcttaagttactacgtggaatgcagaggggctcaactgcagctgtgtgtgtgtttatttttaatgccgcgatcctaaaaacatctttaggagtttaggtttgcttcactgcctttcccaaaattcagcagctttgatttgccttttccagggagacaggaagccaataaacagggaaaaaaaagcaaacggcgacaattacaaggtcgtgaaactccacgacctcccagctgaaaacaagacctcgggtttgcactccggctctctagggcagacactgaccttaggagtctgcgaaacgcccacgctccacgtaactttctctgaaacattctctggaaagcttgtcttttcctagccgaatctggattaccaaggcttccggaactcgcaggcttccggagcgacgcaggagccggaagtggctgaaaaaaaaaagaaaaagttacaccaacgagaactgcgctttagcggcgctgctgaaggcactggatggccaaacaaccgcgaacgccgacaagccgaagagccgaagggccgaaaagccgaagcggacacccgcgcgcggtgattggccggttggccggaagaactctgtctctgattggcaggagagtcacgaaccggtcagccccgggtcaggggccgcaagtgaggacactacaagtgtcgaggggcctaggggaagccggggcttgggagggcagggctttctctgcttgcggacatcgcgaagggcctctggcaggcgccgccgggtggcggcgagacgcctccgcgcctccggggttccttgttcgctgtcggaggaggaccggctgagggatggcctggtggggagggagccctcgggcaggtggctgcgtcgggcctggggcagttgtgctgcgcttggagacctgcccgccctcggggcctgtgtgcacagggaggataggctgtttatctctgcaggctcaggaaggcaggtagctggcccgtcagtcatccgccctgcaaagcgctcccgagagaccccgtagagcgggccagcgcgcgcctggcctgaggtttcccgcccccggaggccctcacatctccccggtaacgcttaggaattcgggcagccagctcgcctacccctggggaatcgaggcagagcttctgggaatggggtctgagggaagagtgctcaccaggcagtgacatgtagccgttgaggatcgccactgccttctcgttctgtggtatgaatggcagtgtctctctagagagttagtgcttaagtttgaatgatggcaggcacttcaggattccagcacgtagtagggtttaagaacgtcttagttcttacctccagtctcgactcaccgttcctacaaggaacactcacttctacgaaagctctattagacattcgagggagagcttatactgtagaaccagtgttattaggaaagtttttttttttttgcttgtatttttatttcagaaactacccatggagcagagttgctaaaataaaatttattaactctaatgctatccaaattgtgaaacaatggtacaaatgagatagagtagaagctacaaattgatagagtatgtagttcacttaggggtttgggagtggattttctagagctgcaactgtccag

SEQ ID NO: 50865 - DNA, 1536 bp, Homo sapiens
ccccagaacttgccagtcaagatgaaaaacttcttctaatggaatccagcttgaaagctactcaagagcagctaactgagcaaatagcagaaacagttcgccaagaacagaacagtagaaaaccccaggcagagctgaagacagtgacagaagggattattgcttctgaagaagaaaaaaaatgattacaagtgagttgttttttagtatttcagaaagttttactttacatactgagatcaagtcagtccttttgactttagttgctaaatgtttaactctctctgtcttacaaaagttgtgagtatatatgctagcttgcataatatattattggctccaaaatatgatacagacttatctaaaatggcacatgttaaaaattgtaacagttctattacagattctaaataatgatgtcgttgtcaactttgttattaactgtcaagaaatgttcaaggtagatgtacaagagaaagaatacactgtgtttctgtagcacctatctgccaatggcattctcatctttctccttttggagtccaaaggttacatatggctcttgttggctttcttttttgtaaaagtagctgctctaagcaagacactattaaactgagagacgtttagagtagactttttggtcagaccattaaggcatgtaagaaactgtgaagaaagcaataaaaatctatgctaattttgaaacattcatggaaactattcttagtgaaacatcttctagtattgaatatctgctttgatcatctaggtatttatgtaatgatcatacctaatacaatgcttttaaattttattatttttcaaataaatgttagagaatttccattttgagtgttgtcattaaatcttctatcctttctgtccttttcttggttttcttagtctgctattataaataataatgaaagtaacatagtcaacatgaatacctacatcggccccactctgtctttctcttttactctatttgtcaagaattacactttgctcattgaactttggttaaattgagtaatcacagtcaggaaaagcacacataactaaactttttttttctcctgtcactcatacctttgaacacagtccggaggccagaactaaaatgcgcatttgctattaactgatctttggaaatcaaattttaaacttacatggcttacagaatatcttgatattgtctatcaatatcatttcaatatattatgaatgtttaagtaaccttgtgatttataatttatgaaactctgttgaaatatatttttaaatctgaccaatttatttctgttttttaatacaaacttttaatattacaggcatttaaaataattctacaatctagattgacactttacatgcttctaaataaagataaacactcagataaactgtttgctcttcatgtacctttagccagatgccttacttcagataacaaaaagctacctttagcaaatattaaaagtagaaattcacattaagaattaaaagcatatcgggcgaagtttcttagtg

SEQ ID NO: 50866 - DNA, 584 bp, Homo sapiens
cagctacttgggaggatgaggcaggagaattgcttgaaccttggaggcggaagttgcagtgagtcgagatcatgccactgcactccagcttcagtgacagagtgagactttgtctcaaaaagaaaaaaaaaaagcctatttctcaatatacctaatggaatataaatttagtgaacattttttccttttcatctctttttcaaatacttggagctctttcaagagaaaggagtgtttaccttgagtaatttgggactttgctttctagagtgattcatgatattttccatgttggcacattttgtattcgtttgcaaaaatcatatgagataattataggagattcattgcaagcccttagcctttgtagtgaatctagctttttcagcttgtttttggggtaatgctatgtgctaaattaattagataactaagaattatataaaatcatggaagtacaaggctaaaattttgaattactttcttcactaaaacaaaatgaccagatctatatttcttaggaaaatttattaatcaagctgtatattggttcacaatttattgaaaaggtagtattttaaaga

SEQ ID NO: 50867 - DNA, 557 bp, Homo sapiens
aaacttttaaatagtaaaatgacatgataatcggtggatttaataagaacagaaaaagttgggacaagcgtatcagacattttattaatcagaggtagtaaccacttgccatattaaagctgggtttcaagtgaccttaaatgcccttcctctcattacattcaccagaaactgccagaacattccagatgcatgtcaatggatatgaaaataaaataggaattttattacttctagctccttgagaaggtaacaatacaataatttgctttatgttttgcagttgatgggttatatgattcaatacaagcagttccaaataactgtgattgcatcatccaaataagttaatttgtgtgagatcaatgatttacctgagccacgcatggtaaaatcaagctgggaaaaaatagtctttttgacaacaacggcagggaactgagactttataatttttttctgttctgataacattagaatcccctttaaaagaagaaaagtattattggtttgcctcaaagacaagataataggaaaaacatgtgaaattattctgt

SEQ ID NO: 50868 - DNA, 2136 bp, Homo sapiens
ggaagccatgcattataatcattattattagaattttaatattttgtctgctaatgaaaacttatagcccatgattcatataactgtgcttcaggaagtaaaggctttttctgaaaaatgcacacgctagcttccttttctcagtttacctttctactttagagcagaggtgttgcaaggattagaaccaagggtgatccagaagaagaaactgcagaactatgggcattgcaaggaaaatagggttgtgctcaatttttagttttgtattaagctccgggaggacattccttagaagtcctccataattacgttggctattctttccgctctctctatctttgttttgttactgagctggcactccttggttgtgtcaattcttgattctttacccacgagagtggaaagaagtcttgatctaacggagtagccatcaaaagaaagagcagtcagtttcctattcccgcaccctccccccagctgtcttcttgcttgaggaagtacttactgtaaagcattccaattttcctaagcagatcttttcccctcacaatcctttttcctcttttttaattccagtaagttttttggctctttcattggtcatatatgactgccatccgaatccaaccctcctgaattctgtccctgtccattctaaatccgtattctgcacaaataagatatattaggtctcaatactggtctggaagttagagtcacgcctatttcattctgcctccatcaagaagcgcccgtaggaaaaaataacaacaaaaacaaaaacaaaaacaaaaaaacccagaagctggccttcctcagcgccagccccaggactggtttcccagcaataggcgcaaggtacagcccttgccggaaactcccagtcttactcaggggggaaaaatggggttttccggagacctgttcccctagggtttaaaagcgcgtcccgtgggagcttcgctttcacttctctagggagttctgagctgcaagagcccagctactcgccgaacccgggccgcctgcgtgagtaacttggggcggccaggagcacgggaagggcgccagacagagagcctttggctgcttctgagaccggctgtgggctgccaccgctgagcggcgcggaggctgcagcgttccctctcaggacagaaagcaggcgttggggactgttactcgcagcctgccaggggcagcagccgccccaggttcaagtggctatgtgccaggatactcaggcgcggctgttggctgcccatgggagagccagtgctctccgcaggtccaaagtgcaaggccgggctattcccggacttgcctaggagcaggggcccccagcgcgtctgggattgccccggcgcgtcgggcgcgcgaacttgtgcgcaagggagaagagcgcttaccatggaacatggtctgcgggaggcgggcgtagtcatgatgaccgcaactggagcaggagcaagctctcaccgcccatagtcactcccaggaccctggtcttccgcggagttgccgagtctgtgttgggcagggtgatctctgcagctggttcctcttacccacgccgcgactgcagtttcatccatcccaaggggggcggcacacactacggcgtggctctgcgctttgccttttccataacttccgtaggatccgccagcagtgtactttcagtttctactttgcgcttggtctgcaggttcaatctttgggatcatcagcatggaatcttcattatcccctctctcctgggcacctgcttcccgcgcacctggatgaggaccagaggaattcgcgaatttccgaatcaccgcaggaaaaaccagctggcctgaatcaaagcaattctgggtaaaagacttcccagatgatctctcaacgccttggcaacgcttggcgactgggagctagaaccatgagttgttaatgtgtgcacggaagccacaagtgtgcaggacgcaagctgggttattggaagcggacgacaccaaggaggcgttgccgcggatgtggtggacgatgccaagtcgtcttttaaaaaaggaagtgaagaatgattaagagggtcacgccctctaccactccaacctctctaatcagtctctttctgctccgtctgct

SEQ ID NO: 50869 - DNA, 423 bp, Homo sapiens
ctcttctattacccacacttctctttttgttttaatgtgtgagaggtttctctgattttattttctaattcttctactggatttaaatttctgatgtatattttaatttccaagagctcttattctctgttcctatttttgtatatcaatctgctttgtttatttgtttgttttgttttgttttgtttttttgaaacaaggtcacattctgttgcccaggctggaatgcagttgcacaatcatggctcactacagccttgacctcctgggctcagttgatcctcccacctcagccacctgtgtagctgagactacaggcatgtgccaccatgctcaactatttttatttatttttggtagagatggggtttcgcatgttggccagttggccaggcttgtctcgaactcctggtctcaagccat

SEQ ID NO: 50870 - DNA, 1796 bp, Homo sapiens
aattgtaatacgagggaaatgatatgttcacctgctactttataaggatattgtgagaattgaatgaaaaatgcacgtaaagtgctataaaaatcccatcactttacaatgaaacctatagaccaacacttttaaaacatgctcttttaacataggatgtgtggtgagtcattgtgagaatatgttgcaaattactaatatttctaagtttgtgatattatatggtttttaaaaatacaaaatgtaacgtgttctaggttatgtttattatgatgtcattgtcactgatttctgacatattctctcaagtgggaggaaagggaaaaagttttaagtactctgttggaaattgacctgggaatggaatgtctctggtgttgctatttagcatatgctgtgatttgaacgtgtcccccaaagttcacttgttagaaacaatcccgatgcaatggtgttgagaggtgggacctttaaggtaaaactaggccatgagggatctgccttcctgtgtggcttaacaccattattgcaggtgagtattcctgatcaaaggatgtggttggcctcctttcctctctctcacctgagtgctcttttgctctcctgccgtaggatgatgcagcaagagggctctcaccaggtgccagcctcttgatcttggatttctcaacctccagaactttaagaaaatatatttctgtttattacaaattattcagtcttagatattctgttatagaagcacagaatgaactaagacagcatatgagctgtagcccataaaggttctgaattaaagcagcagaaccctccaccttgaagcagcaaacattcacaattttgataaatcaagagcaaccccctaattgcccaatgtggtgactggtaatattgctgacacatggctttgagtcacatgtgttgtgaggctgcaaagtaggatgtgtcacttggcttttggcagataatatgatttaggagaaagtctgaagtttataccagttgtcctgatgaaggcactcatttggctactatatttttctgtgaatagaatatgaacatttgtagaagacaatttttgtttgcataagttcatgttaacagaaaccattaggccacatgttccacagaagggtttttttttttttaggggctaaagaattttttatattggaaaagttataaggtagctgaaacgtaggcctgtgaggatgaaatcagacaatactgaaaaatagatgtgaacacacatatgcacacatctactgcggagatgccaatctcagtatttaaaggcataaaggcacactgacttttctacttagctgtgttttagcaaactttgtgattaagggcagacttgctctacactttgactaacctaagtgcatctagccagaaaaagaagggcattgtgcctacgtattagcagcccattacattaaactgtgacatggcacaacccctttggacagatttcattagggcatactctcttgcagacatcagaaatacaaagccaagtagaactttgtatgctaattctccattgtatgctaattctccattgtcccttatttattttgattggcagatattcttttatatacactaaaaatatcaaaatgttgacagaatcttgttgtttcacactttctctttggaaaacatgttgcaacaaagcaccttttacctacgtctaccaagtgctattgcattgacagtttgactagctatttgggagtgagccctgccaatggctgcttcaggatttagcacattttgtttgaaaaaca

SEQ ID NO: 50871 - DNA, 964 bp, Homo sapiens
tgtatacctattaaaagatctaaaatttaacagactgaatataccaactactgtctaggaggtacgtaaattgctaatgggaatgtgaaatgaccaagggtgctggactacaaaggatcatgggaaattttgagggaggaaaaaactgttccatattgtgattgtggtgggggttacatgaccatgtgatatcaagacttgcagaattatacgttactaaaaagaatacattttactgtatgtaaattataccttaatttttttaagtggaaaaagttcgaataagaagtccacatatgatggctaattgcttccctaataaatgtgactctaaatatatctaaaaattgccctatgttgactcagccccagctggattccaactcagcactcaacaatgccctggatgagagctttgcccagtgttgactcatttgtacgtcagcaacaaatcctcccattctgggctttactggagacactaaggataagctgagggtgtgtaatatttagcctgggtaagtccaagagccaaatcaaggacaaacaatgctccctcactgtagaacacagtgattatacatagagaataacccccaccacaggacagtgctatgagacactagaatcattgcagaggaaagcacatttccagaaccctaatgaaagaatatgggtacctgactctcatgagtcctttcattcatcacatatttactgaacacattctcagcacaaggcacagactggaccctaggcacactgattcaaaagttgggtgaagttctgttcttcatgaaaggagagaaactagggtattcacttgtgaagataaatccacatgcagagagctcacatgattactttgaaagctccaggtccacacagccgtcatttgcagagattcattcctccccagtagaacaaaatattgtaagtacttttaagtaaatatgcatttagg

SEQ ID NO: 50872 - DNA, 638 bp, Homo sapiens
gagcatggtatattaatttgccagggctcttgtaacaaagtactacaaacttggtggcttaacaacagaagtgcattaactcacaattctggaagctaaaagtcaagatgttggcacggctggctccttcttgaaagctgtaaaaggtaattgagtccacgcttctctagtaacctctgctgattttctgacaatctttggtgttctatggtttgtagacatatcactccaatgtctgccttatattcacacgtgtgtgtgtgtgtgtgtgtgtgtgtgtgtgtgcccaaatttcaacattgtgtaagaacagcagccgtgttggagcagggttcactctgctccaggatgacctcatcttaactaattacaactctaagtccaaatgaggtcactttctgaggcactccagggtaagatttcaacatataaattcaatacatagtgcacagattctatttcatccctgagctaagtgtaccacattcattatctccttcaatcctcacagtaatactgtgactagaagattaagtgacataaatattctcaaattttactgtgcttaggcatcagtgggttatctttttaaaatgcagatccaattcaacaggttggggttggagtctggcattctg

SEQ ID NO: 50873 - DNA, 1243 bp, Homo sapiens
gacattataatattttatatctgtatctctatctcttcaaccaagtaataacaaaacaaacatagcatttaatctttcttttctaaatcactggctgatagataaaacagtagattaaatatccatgcaccagcttgcatgtaccgaaatattacttaatttaaatctccagcactgaattaaacttagattgtcagcttttacttcaccaataatacgaattttgaagttaataatttgaagcatctcattcacttctggtttaaatgtgatcaattaaggatttaaatgtgggctacacaagatagcctccctttcctccccctctccctgctcctatcacctcttctttcttttttctccaggtgatcaaaggatgtggtcactaggtctatgtgctatcacctggtgttttaatcaatctcttctgctcttggatgttgtgctgtggcctccactgacctgtggcttgtctcaactggactttgaacatcatgctctagcatctgctgctggcagccatgacctctgcgtcaggcattatggttggtcatcaatatctggctctcctttacatctgagttcctgcacaacaccgtttccttactgtcagagcactatttactgtgaagttaatgaagcttaagcttcagggcctgtattagtttattgctgcctaacaaataaccacaaacataatggcttaaaacacagatttattatctcccagtttctgtgagtcaggaatccagcatgttttagccgggttctctcacagaccaaaaccaaagtgacaactgttgtcttcttatgtggagtttggactagggaaagatctgcctccaagttccctcaagttgttggcagaatttacttctttccttgtagttctatgactgagtggcatgtttgctttttaactgtctgatgaggaccactattaaacactggagggttactctcagatccttgccaaagagtcctctctatagacggccctctcacactttaaatctgccttctagaaagacctaattcctttaaagacatcagagctggtgcatttctacttctgctgcatgctcgtagccaaagcaggtcacaaggccagcaaaaatcaggggatgaggaaagagattctacttcttaccaggagaaactgcaaagtcaatgcaaagagcatgaacataggtaagaatgaaaaactgggaccatttttaaattactctagccacaacatctt

SEQ ID NO: 50874 - DNA, 2711 bp, Homo sapiens
aatcagttgtcttcacaaaatacgctggtatctgtgtacgaattcatctaggcacaagcaacacagctattttccaaggcggatgagattaatgaggggaagattcagaaggtgcagatagctatgctgagagctttacctacttgctccattacctgcttctcaaaagcactgggtaccagccttctcagctcagacaaactgttattgatccggtctcgtcggcgcttctcaattatctgcagaaggcaagcaaaacaaaggaaggcattaccattacgactgtaaatttcaaagacaaaaaaaaaggtggttatttccgttaatcaataacaaaaataaaaggagagtgtaaagagactcactcctctccgtctttttctggccaaaatctgggaagatgtagttggggacatggaacctagagccgaactcaagtttctgaaaagagaaaaagaacaaacaaaaactgaaatcgccgttaaacgaggagaggtgatctgagaggtcgcccccacaccctccccgcactcagactttttttgccacttgggctggaaggcacctaggggttccctggccgcaggctgccgccagcctgcgacgcgcggaggtcagcgcagggcaccggcgcgccaagggtcctagcccgctgtcaccgcggcaggcctgcgctcgcctcccgctctggctcggctccgctccgccgccgccagctcacccattctcgtccgcactctccttctccacctcgatggtctcgtccagctcgctgtccgaggagctgtactcggggtgagctcgcttcatgctggctccctgggggttcctggggagggtcggcgcggcgggcagggaggagttaactacagcggcgcctctccgctctcggctgcttgcgttccgcacacactgatcccgctcacgctttgcctctggttaaaactcaaccatcctttcccacgctgagccccttcccagggccctggggagggcgggggagtggggaaggcgggcgagggggcggagaggcggggcggcaactccagggcaacagccgccccccggccaatccggtttctcgcgccgctgattggcagccgctccggggaggggcgggagcgaggccgagggctctagcggaccgcgcccccgccctccgcgcccgcccctgcccggcggcggtgcgtcggctccgcgggggctctgtccagcctgcactcaggggaaggaggaggcgcgggcggcggggaggcgcgggaggccgggccgggacacaagcccgccggcggccgcggctcctccccgccccgcgcgccccgattggcctggccgcgcgccagggccgagcctgcagcgcctccggtgagccgcacgcgccgcgggccgtgggaaagtgccggcgccgcggccgccagccaatccgggcggccggcgacggcgacggcggcggccgcgctggcggcggcggcggcggcgctgggcgtccgcatgaatggagaagaatgggcaggcggggagccgggccgcgcgagggcgcgccggcgggggctgggcggccgccggccgggcccccagtgtgaacctgtaatcggagcctgggcgccggccggcctcggaagccgccgcctagcgccaccgtaaatctcgcccgcgtggccgccagtgcccggcggctggaggcgcgcgctgttagtggggccgtgccgggtgcacctggccgggctgcgcgccggcggctccgcggaacccgcagggagccgggagagggggcgccgggcgcgtccacagtggccaccagcccaggggccggtcacatggaggagcaagctgtgggctcaggggacgctctttttgatttctgggaccgaggccgcacatgcagccagactcgtttccgcaggggcttcccagccgcggaatggaatgaatacccctgtgcatctcatttccggggaaggggagcacttgttttttcggccgccttggggaaaaaaaaacccaacggtccctgggaataatcattatgctgggatttttttgttgttcccccgctgcccccccccccgccccctccccccggcggccagatcctctcagcgggcgacagggtggcggtgctggcgtttgcgtctgaggccggccttgctgagggaatgcacgtctctggccccagacacacacctctggcttcggtggcttggcgtggcgtgtactgggtgccacgtgaagtcccccccgagtccactaagaagacagattttttaaaaaatacagttgtaaatctcgaaactgatttctgattccagaaacagaatggttgttttaaatttgaaaatccggtcttctgtcccttacaaaggtacacagcaattcgcattcatctcagatccactctgaagcttgtagtcctgtctgtgagggaaagcttaatatccatcggtgagaataacaaaaggcgttttctctttgcaaaaagcttcctggtttctagacttccttattgatctcaatgctattttttttttgagatggtgtctcactctgtcgcccaggctggagtgcagtggcgcgatctcggctcactgcaacctccgcctcccgggttgaagcaattctcctgcctcggcctccccagaagctgggattacagacgcgcgccaccatgctcagctaattgtttttggtatttttagtagaaacgaggtttc

SEQ ID NO: 50875 - DNA, 1358 bp, Homo sapiens
aagcccagccgaatcatacactttaaataggtaaattgtgtggtatgtgaattctaaataaagctgttatttaaaaaaaaatcatcggagtgtagagtgctgggaaacttcagacgcaaatttccatcagcctacctctgaaatcaccttggccgaggcgaccgccaggcgcatgcgcacggggcagccaccagctagttagggtgatcccaggttagaggcgcccaggctagaagggcccggctcttggccctcgctgtcctgcccgctgtcgccgctctttggcgcccccgcaacagctccctctcagcaggacgcggaaaggtcagggtccctctctctcgtatataccacaaagaaagcgcgttccccgcggcgccccgagagcccttaggcagacgtcccgcagagtcccaagtccctacggtgggcccgcgggctcctgatctgtccaggcccctaaactatcacaaggaggatatttgatgaccgtctttcttccctcgctctctcccaacaaagggtaactgacctctcgcgtgacctggccagcgctgagattccctcaacacgctttccccctattgtgtgcagacccccacagggcggaggcgagcggcgcgacccactggacggacgcggcccggagctccaggcgcccggacctggcgggccctccctgggcgggcgggtggcgcgtcgcccgccgccgatccgggcggggtgaggggggcgctgtaattgcagcgcagctcgggttcccacgctcctattgttggcgactttgtttccaattcccatcacgtgtgctaattagttagcgctgctggctggctgggaggcgtgtggctggcctaaaagcagaaagatcacttcctgtagggagccgggccggctgaatactactggggcttctttttctctcctcctctgcgcctccttcttggcctcccgggagggtgggagagggaagggaaggggaagaaatgctggttgcggaacaaatgccactgaattgcaataacaaccaaaaagctggggttagggggtaggttggggaatggaagggggagagtaagagcggggaatagcggaaaaaacaggattaaatgagagattcacattagatctctaatgctttacaaaatgccgttcacaattttgatcagttaatctcgtcaagactgggatgatggaggaattttttcatttcctccattcatgttcagtttttaaaaatctgtctttaccctctgagtaaagcaagcacaagcatcatggtacactaggaaaagagaaaaaaagtgaagcgagtcatgacttttgagtcagtgacttgcccctggacctaagcttct

SEQ ID NO: 50876 - DNA, 2009 bp, Homo sapiens
gaggttgtttatgggtaaagacacacagttagattgaaagaataggttctagtgttccatagcacaatagggtaactatagttagcaataatttattgcgtatttcaaaatagctagaagtgaacatttggaatgtttccaacacaaagaaataataaatgttttagatgatggatatcccagtttccctgatttcaacattacacattgtatgcatgtatcaaaatattacatgtacccttaaactatgtacaactgctatgtatcaatttaaataattcttaaatgagtcaaagaaagatatattggtgaatatgtgttagtcagtactccagcaacacacaacctattgaagagataaacatgaatatagtttaccacaaggctcaatggtatataaaatgcaaaataaaaacatgtactgatgcttattagactcaagtccctcttctaagggctttatatatattcccctcttacctgcggttttgccttccatgatttcaattaccagtagtcaactgtattctaaaaatattaattgaaaaatttcagaaataaacagttaaaagtttgaaattgcaaactcttctgagtagcatgatgaaatctcatgctatcctgctccattgcgtccaggatgtgagtcatccctttgtccagcttatccacatgctaccggcctgttagtcacttcatcagatgacaacaacatagtacaatatgtatagggttcagtactatccaaggtttcaggcatccactgggggttttggaacatatcactcacagatcagaggggactgctgtattaatttatcaaatcctcacaacaactcttgaaatatgtactagtattatctatacttttcagaataaactgatgctcagagaggttaaatatgttgtccaggattgcacagctggcggtgtgaagaagcagataaatttgaaaatgcaggaggaaggtatttatttaatgaaggatctgaaaaagcatcacatcatggaaaaatggattttgagctagaccttcagggtgaagtaggtattcaacatgctggggggtgggtggcatattctagattacagaatagcttgagtaagacatagaagcggattttcagggaaaaacaaatagtcacatgtggctgttgtacatgcctacaccctgggtgtagagtgggaattaagtgagtgggtatgatgggaattatgactgggcaaatggtcactagctcaattgtggagggtcgctagtggcccacccagctttcaatccctcttatatcctcataaatgttctgtaatcttccatccctaatcagcctgggtacttctggcgaagttaaccctatacccaggtgcagagtagctcctgatttgcttaagccaatcaacattttccattcccctggccacaagataggtttgaggttgggcctgcgacccagccctatccaatcaagtgaatgttaggactctttcccagcattctgggacagaactctctctctctttttctctctccttttgaaagtgtgggggtgtgtagtccacaagctgtggcctccttgcaagtacaggaccagccagcctcagtacagaaagaagcaggcacctgaggaggcatggcagggagacaaagaaacttagtctttggtcacatcattgagccactggattgaaccatcctgtagccagttatcccatttttggaccttccttttacatgaacctggaaagcacttttttttttttttttttgagacagggtctcactttgttgtccaggctggagtacagtggcgtgatcatggctcactgcaacctccacttcccaggcacaagcgatcctcccacctcagtatcccacctagctggaactacaggcacatgccaccttgcccggctaattttttgatttttttgtagagacagggttctaccctgttgcccaggctggtctcaaactcctgagttcaagtgatctgtgtgtctcagcctcc

SEQ ID NO: 50877 - DNA, 959 bp, Homo sapiens
agtattcacataagagccagcagcataggatttgttaagtaaggaaaaagctcggacaccatctagtccaatcagttttaaatgcatccatttaaaatgtaaatgacaaagcctcatcctccagaaatattgattccataggtatagattagcccagaaatctggattttagatcaccaccttgggatattcagagatagaatccaacaacctgactttgagcaacgttgttttgcaaaacgaggacatttctcattctcctactccctggccatatccttcctcccactggggctgggtgtgagaatagagcacattactttcacatctcttcattaatatttcagaatctacaatgtgaaggactgggaagaaacaaagcagaatcggggattatgttgatgggtttggtttccctttaatgatgagaaaaaatgcatgtctgctctgagcagatgataaattgatccagaaaatgttgcacaagtgttctttgctaagcttcagggtcaaagtcaacaatataaaagaaaatatacctccgtttagttgaaaaggacttacgttcaaggcattgcacaacaggtctggtgtgggttacactctgtcaaatggccctgttcatttattcagctttccacagatctttgccaaagaggacaatgagagaaagagacagatttagctgttgtggttgcagtttgtttttgcacctggtgggttttttttttaaatgacaatagtttgagaatatcacgacaacatttttaaagataatgaaatcatttgtatgtgaagttgggataatgaaatgacaagcctctcataaaaggaatctccttttagtaaccattgcctatacttgcattaagtgaaaaaaaaaaaaaaaatgaaccgaggaagaactttctagaaagatagatagctcctagaaatctgggagcttttcatcattatta

SEQ ID NO: 50878 - DNA, 2104 bp, Homo sapiens
gagagaattggttaacttcttgttgtccacaaggcataaggtagtgtcatgtgaactattagtttcattcactgcaattatttatttcttacattaaattttgctcaagtcccttacaattttccaaagatagacatgtggatgtgggcaagcaggcaaaaaagcaaaaaagcaaacaacaacaacaacaacaacctcttgaatttcattttgcttcttttgattattcagagaaaacttcagaaagttaatgtagcacagatagaaaaatgtgaaatacagagttgaaagaagacagtgctttcatctgtcaagcattaggggtttcccagcctggaatgtacctggctttaatagtttttaagggattggtttttattctgaacccaaatcccaccccacctccccaaacacacacgcatacacgcaggcacacgcatatacatatcgggttatacagtgatgccaaaacagacaaggaagggaagtcaagattaatagtggtgagcagggcgttgatttcagccagttctgtttacacagcattttccttccagaaccgcagagctctacacagatactatctcactaatcctcaatggagctttctcaaagcgcctttatccagcctctctcctaggagaaagtgaggcacggcgggcagaggtggtgaagtcctcgcaaaagctggaaacatgaccccgggctcctgacgcatgggccattgtcctttgcactccaccgcgccaccttcctgtcaggtgtctggtaaacaggttaactgatcgctgattaggggcctcccgcctacgtgcaatgagtggcggaaaggagcttttccttgtcaatacgaaaatctttgagtacaaatcgataaagctagagattcaaagactgcctttataaaactggagaagatgcactctggccataggcggagggggcagcccggggcccctgtcaggaagccaagcggcccggggcatccctggaaggctgccgagggggcagcgccttctctggggacggcttcgtggagagtccgggacgggcgagacagaaaaccgagccctatttgttattagtatttttttttttatactctcaaatgccaccggcacattcttttaaaaaaaaatgaaaggaaagaaagaaagaaaaagaaaataagagaggaaaaggtcctgagaaatgacggacgcttgaacctcgggcccgggaagaccagcgccctttggcggctaggcctcgggggcgtgcggagggcgggcccccgcgcggccgccgctttcccaggccgccaggggtgaggaggtgacgctgcgggcttggtggcggctggtttttcacacaggaatcctcctcgccaccgctccctcgaaggccgccccccgctccacccccagcactgggcgcccgcgcctcccaactcagcccgccgccgagcagacggcgcgccgcggtaattgggcacaggggcctttttcagagtcgctcagtcgataaatgaaacgtcagctcccctgtgatcccgcgtgtgtggggcggcggtggctgcgagccggggcgcagggccggccggcagccgctgctctttcacagccccagaccctgcgcggcctgccggcggctggcgacctcccttcccctcccgaggcgcccgagcctctgatcccctcccggggcgcctgtggcctcccttcccctcccggggcgcccgagcctctgatcccctcccggggcgcctgtggcctcccttcccctcctggggcgcctgtgacctcccgtcccctcccgcggctcccgcggcctccgacctcctgccggggcgcctcaagggcccctgccccacatcagagggtcttgcggtttcctggtttggttcaacatctctgaaacccagaggtgaagaagaaaccatggaggagaatccgaaacagtcttccagatcagacctctaaaataactaaattcttgttaatcattagattctcccttttatttaatgtgtaagtccaaggggattccttctgcttccccattcaattagacagcaacctcttcctctaaagttctctcatctgaagccatctgagcaggagca

SEQ ID NO: 50879 - DNA, 1881 bp, Homo sapiens
ggtttagcagtgaactgagatcatgccaccacactccagcgtgggtgacagagcgagaccctgtctcaaaaaacaacaaaacaaacaaaaaaatccaaaaaacaaaaaagtagaaaacagaggcagaaaagacaggccaggaagagattctcctagaagctacggaaaagaacacaacttcaccaacaccttgattttagaccagtgagatcccgtctgacttctcacaaccctaacaacaacacatttcctgtgttttacgccactaaatttgtagtaatttgttacaacagaaaataataaactaatataccaggcttcttctagtccttggatttcagaaaaattttgacatcagtaattgctactaaaatgaccctataacccaggacactgccagtcttgtgaactgtttggtactactccctaggaagaaaaatacagaaattgagagtttatttgtatataattcaatttcatgtctgctgagtttaattattaaaaacttaggcttgtaattttatttcttccatttcatttatctataaatttatggtattttacaaaagtactggctgagacaaacggagattttactttactttttaaaaaaagaagacatttacaaaagagaggtgaagcgctgacaagttaaatcacttgcccaagttcagaaagtgattcatcacccagtcattaaattaacaaatgtttatgaagggccttctactccagacagcaagctccatgctagagctactgttcagaacaagacccagcagagccctgcctctccgtgtgagtcccattctccttagcgtcccaggaatcgccctagatcgcctccccagcagcgctccccgctggttaccttcccaccagcattcaatcccaggaaaacaagcgcagtgtggacagacccggcccagtacgcaaatgccacacaaaaggacaacgaaaggaagaaaaacaccaagcacagattctaggggccgagggctgagccacaacgcaccgcaactccggaaaactgggccccggacctcagctccccttcctaagccaggctccgcccctattcccgaccccgcccaccgcgtcgttggcgtaattcccgcgactccctctcacccgcccgggctccaccttctgtaggggctccaccttctgtagaagctccgagtgccgctccaacgcgctcgcgaaaccgcctgcgcgcgtcttaggctccttggcattggaactaccactttcggatccactctcagtgcctacaccccgaaagggcctgaagaagagaaacactcgcagaaaatggctctcggcagccacagcacgggtccgacacagcgccgccatgacttctttacctctgacctttgacctcccctccgcaagcgcgcgggtcacggggcggagctatgagaggtccgccccccggacgcagagctctggaggccaacgaggcgtgtcttcctttcatctgggagtggcgtggggaagaagagacttaagctaaaattggtgggctaaatagttggaaaggggcctggttaagttttgcgttagaagtgcgtttaacttgcaggaatttcgccttcctgggcatccgttggaccccattgtactgtaaattctgctaacgcgacgctcgttctcccgccctgccgtcccccctacatggccgccagcactcgagtttggggtcttcactcaaatatgagggtctccttgattaccctatttagaagtggaagcccaaatgcagactctctggcacctgtttttcttagtaccatgtagcactttctaatatgccacatattaatattaaatatttaataatatttagtgtctactcccaactttttaaactttgaa

SEQ ID NO: 50880 - DNA, 2868 bp, Homo sapiens
aactgaatcatgggggcggttcccccatgctcttctcctgatagtgaatgagatagttctctgacggttttattaagagatctttataaggagaacagatggttttataaggagcttctcccttcgctgggcactcattctctctcccgccaccctgtgaagtggtgccttctgccatgattgtaagtttcctgaagcctccccagccatctagaactgtgagtcaattaaaccttttccctttataaattacccagtctcaggtatttccccatagcagtgtgagaatggactagtacaccttggtatcggggcaactctttttatttcctgttgtggactagtcggcctggggaagaaccaggtaagatttggtcctgtcctgtggataattccacttggctcttccaaaagtacttcaaagtcagcatgcacaagactgaattcactggctttcctcacaatgttcttacctctagattaggcatcctgagtctcctagacctgactttgaaggaatcacatccaagcactctcactccatatggagaaagcacgaagagctatctaccaaccggtaccacaggccttctaacctttccttcatttccattgtcctcatccacaccctacttgagacccaggtggagggtgagacccactctattgttactatgtttttccttctgggagggaccaggccccacagcagtatggtagacatctgctatcttgtcaattttgcccctcttcccctagaggaatttcacctcacctgctccctggggttctcagtggggagagaggtccatagttcccaccccctggccccaggcatgggcctgtgcttcagatctggtccacgcagacaccccatccccttgttcacagggactggcctaaggatagacatctgacccagacactgtcaatcaatcagtggccttccttgatgtttactctgtgagtaatggaagaaagtgactctctctgtaacctgagctgttgggtggggctggcagctccttccctcaccaggccaatgggcaagagactcagtgctgagactgggaagggacagaaggagaaacagaaacagacaggtaagggatggcgcagcagcatctaagcccctgcctccagctaccctgggcttcccagttattaaacaaacacaattttgttctgctccacttgtggctggagttgaatttcatcatttcagtagaaagagtcctaacatacctactttctgaccatatttcccactattactcaaccatgctttagccaaacttgactttcctgtttgttgaacacatcctaaacttagcccagacaattttctcaaactagagtttccccttttcctgtaagttcctacccatttagcaagctctacttattaagtcacatatgaatagtatacatgcaagggacattcactttagatgctacctgaaatggaaaaaagcaatacaaatgcctactaaaaatggattatttaaatgctaaaaagaacattcaggtaatagaaaaatatggaaacactgacataattatataaaaatatttatgaattttatatggaaaggtactgatacagttagcaaacaaatcaggtttgaaagaaggttgtattgtatggtccatgtttgtgtaataatttatgagagagaaaaccacaaaccaaaagaaagaaaatgggcagaaagagaaatccattccatgaccccagaaaagtgctcacgcaccactatgccagcagagggagcccaagggcagttcagaagtcaactaggtgcagccagtaaagtgcgtatgtactgcagggtaataaccggagacgactcatgtcattgcaaacggaaatggtagtaggtacaaatgactataaagaaaattaagtttctgtctgcctgttaactcatcactcaaatatgtcagtgtaaattctccacaaacttgaaagacatataaaggacagtctgatttaaaagctatgaaacacaatatttacttggagggcacgtcaaagggagacaatgtggctgtccaccaggagaggcaggccgcagatacttggggaatgcagacgtgtcatggtgatacagcagctggctggaaggggctccaactagccaatatgggacaatcaggccgccaaaaaaattagggacagtcagggattataaaccactgaaaaaaacaggaatccaagagtccaagaaagtaataaatagagagaaggaagaactacagaagaatgccaccctgaccatctttgtaaagattcagacaaaaatcatcgctggatgctaaagctcgggagaaattttgaggaagaagatgatatttaaatgatgtttaaagtgcctctccacagattaactagctgccagaaggaaaaacattgagtggagatcacttcttggccttttggctgagatcaagtgtagtaacagtataatggagaaaagccccaccctgactgaaggatagagatggccataccccagtgagaggcagatggaccgctctgaatacctacatagtgttcaggcttggaatgcagaacctgaatcgaatcatgaggaaacatcagacaaatccaaaacaagtttttgttggggttttgttgttgcttcgggtttttttgcttttttttttttttagtttttttttttttttttttgagacggactctcactctgttgccaggctggagtgcagtgtcgtgatcttgactcaccacaacctccgcctccccggtttaagtgattctcctaacctcagtctcctgagtagctgggactacaagcgcacaccaccacgcccagctaatttttgtatttttagtagagacgg

SEQ ID NO: 50881 - DNA, 517 bp, Homo sapiens
ttgatatttgtcatatacttaattagatacaatagacagattttttcattttagaaatagagtttgagttgaaatgttatggtcactccacatactgatgggtgattccatgattacaggctcaggtaaaagatctccagccagtgcttctcaaataactttattacataccagagccaccaggggagcctgtggaactacagattctgagttagaaagtctggggtggagcccaagactcttgctttctggacaagctccaggtgatttctgatgctgcaagtctggctttagataacagctgctaagtttgcctgaggatgaaagcttgagtaaactctgaatactgatgttacaggactccagcactttctaactatatacatttgaacataagagacagattttatagctaaaaaggtttggctttttgtatatatttcttattgatacaaatatgtgtacatgtatatgggggcacaaatatgatactctatcacatgcttacactgtgtaa

SEQ ID NO: 50882 - DNA, 630 bp, Homo sapiens
gtgtttcccacctgcactaaaccagacctgcagacaaaagaaaaatgaatctgttactaatttcaaagcccacttggaccttttgtttttcctacagcattccaagcattacatcaattcagctaatcctagctgtcctttttgtaaatggagtctccccacaacattaccaaacaagaaagagagagaggaaaaggataaggaagctacagggttaagtaagttagctgaggacctcagagcaagatgagaaacaaaaggtttccaaattaatggccttgtaattatagcaactgcggagcaaccaacaaccaagaaggacctttggactacttttaataagtgactcaaaccagacgttatctccttctgtctgtctttgtatgaatgtttgtgtgtgtgtgtgtctatatatatacacacacatatgtgatattttcagatggtattactaaaccaatttataaaatcctttaatggagatctattcaaattggtttggggataaatgagcatgcatgtaaattatttctaaaactctcagaaatgcagaaactgacccaaatgtgtgttttttttttaataagttcacatgatttacataagtctgtggtaaataaagctagtttt

SEQ ID NO: 50883 - DNA, 557 bp, Homo sapiens
tatgtctcctcattagcagtgtgagaaaagactaataaattggcactggtatagtgaggtgctgcttgtaaagatacccaagaatgtggaagtaactttggaattgggtaacaggcagaggttggaagagtttggagggctcagaagaagacaggaaaatgtgggaaagtttgttgaatgcctttaatctaaatgctgatagtgatatggacaataaagtccaggctgacgtggtttcagatggaggtgaggaacttgggaactggagcaaaggtgactcttgctgtgctttagcaaacagactggtggctttttgccctagagataatggtagaactttgaacttgagagagatgatttggggtatctggcagaagaaatttctaagtggcaaagcactcaagaggaagcagagtataaaagtttggaaaatttgcagtagaaaagaaaaacccattttctaggaagaaagtcaagctagctgcagaaatttgtataagtaatgaggagacaaacgttagacaaacataaagacaatggggaaaatgtctcctggg

SEQ ID NO: 50884 - DNA, 1512 bp, Homo sapiens
agtatatttggaatatggtttgatttacataaaaatgcacacatgacggcacatactggaggaaaataagcaatacatgaaaacttgtgtcagggctcaaaacaggagtgattcctatcctcacttcccaagattacctaccttgttttcttttttcagcatttatgtatctttttaaaagcgtgccacacacatctgcgtacagtcacaggcttatgatcagcagagatctctaggatgaaactatttaaatctgaaaaccatggcctactattgctctatttgggggtaatttcacttgagctgttttcagaagcaagtgcacccaacgctatggtaaattagactgaaggttttgtgttgtgggatttcacccttcctacgaaaagctctcttccctcaaacccacagacaccactccacaatctgggggtttctagtatgataaatatctgcctcccaaaccccccatgggtcatacgccaccaaaaatcctaaccacctgaacttagaagaaggcagaaagtcttaatttatgagggagagaggggtttcccacctggagggacgagagcgactcactgtcctctgttcctggttccagtcacttacaggagctggctgcgccgtgctcccttcacgcggctttccacccaaagcgcatcacggccgccagcccctgacgctagccccttcgccacctcccagaaccttctctccctctcccccacacacgcacactcacactcacacatgcagtcccatctgcccccgccagagccgctccttccagggccccaggatgccagatccggatccgggagatgcaacttgcggcgccggcccaggaggctcggcacctgctcgagccgccgggccgcgctcagccccgcgccgagccaaagcccgagtccaagcccgagtccaagcccgagcccaagcccgctgggtccgcgccctcaccttgctcgccgcggtccatgtctccagcccgccgcctcgtgtcctctgcagcacccccgcctgcagcccgtcccggctcggatcgcccgccgcgccgcgcagagctcctcctcgcctccgccggcgactcccgcgaagtccccacccccagaggcgtcgggcgcggcggcgccgcccgccctcggcctggagcgctttcctggggcgtcacccaaccacctgacccggtcgacctgtgcgctccgccacgtcggcgcgggcggcgcagcgctaggagggccgggcgcaccccgactcccgcaccggctggaagtcggccgggaggagggaagaggacggcgaggagatggactcggccatggaggctgcgtggagcctgcttgggaaccgggatggcgtttgccttccaccatcaagttatttataaaatcaaaagtttcctccgaggccttggagatgccctttctctgcatctgcgaacacctactttcctatacttacagtaggaaacacaggaacgttatttagaaatgccagtggctcttttct

SEQ ID NO: 50885 - DNA, 527 bp, Homo sapiens
gacatgggaaacttgccttccaacatatctcattttttaattcttaaagttgaattggcaaatattgactctagccatcctaatctgttatccttttaggctcctatgggtccattttagatatttttggttgtgttgattttatttctttttgctccattatattgcttcatttcccctttgtttttcctttatccctctttgatgactcatcttcatgctattcggccagaatctgggtctggaggagtgtgaaccatggagggtttacattataaacaagacatcgcctctcagctgctcatgcacctgctcccttggcctcctgtgaaaacagatgtcccagagcagttacaaggctctttcaggagaatttcctccaagaagattttgcaactcaaatgtgaagcctcttcaggaccataagttccatggtaaggacagcatacttcatctgcttgaaaactattggttattgacatgttatactatctagtatttatattaaaattttgcttttcagaaaa

SEQ ID NO: 50886 - DNA, 1185 bp, Homo sapiens
ctttgagatgtggtggtgggggtgatactctcatgggggcaaacctaatctgtaacagcaaaagatcaccaagctgccttccaaaaatgtccctggattgcaaggctgtgttttcccaagagaatggaaatttgccttcaaaggagagtttggtcactgtccccagggaggcttcttcgcagtctttcaacattcggcaggaaacctatcagtgtccgggtgactacctattaacctgccctgattattaactgtgcccaggtcgagacagcatcagggttgtggttctaccaggccgtctctttgcagtcctcggcttctgtcaaagttgaacgccatccacctcccttttggttccagccacagaggcgtgccttccacagaggcgtgctccgcagcgccgccctccagcactccgcgcatcggcccagggtgctgcctggctcccaggcgccgccctgcggccccgcgcgtccgcctttcccttcagccagcccctgtgcttcccaggactctgctctgggctctgtcctccgctcaggattgagagtcagggaatacagagagtctctagccactgttgttggagagaccgacaaggagatgtctcaaatgccttcgggttctcttcccttttttcttctaccacggctgcaggctgagagagagtctcaatgacaagaatattgtgattcaagggaagcttcagtcaagggtagggaggaaatacagcagaacactggagagaaaaagaaataatctggcattaaaaatcaagttgctttttgtttgtttgtttgttttgagacagggtctcacttttgttgcccaggctgatcatggcccattgcagcctcaacctcccaggcacaagtgatcctcccatcacagcctcctgagcagctgggaccaaaggtgtgcaccaccagggctagctagtttttaaaaatatttgtggagatgaagtctcactatattgcccaggctggtctctaattctctgcctcaagcagtcctaccacctcaccttcccaaagtgctggtattacagacatgagcgactgtgcctgaccaaaagtcaacattaaacaacaaatcttggccaggcacagtggctcatgcctgtaatcccagcactttgggaggccgaagtgggcagatcacttgaggtcaggagttggagac

SEQ ID NO: 50887 - DNA, 2014 bp, Homo sapiens
tgccctgctcggagaccgggcatctgaggtttgcctactgtttgggagaggaacacagggatactgaggaggcagaggagagaatggctaagcccctcagctctgccctgcagtggcctctggccccaggtgctgctggccctaccaccccttcaccaagtcactccactcttgacgctgcaccctcacccagcagtctgcaaaccagtttagttaagagtgcccaaagtggaaagaaggaagccaaatgccaaaatcatcccttttcctagtattatttggttcgggtgaggtcaggtgtagcaagtagtcagttgtgaggcaagatttagggagcacaggaaggctcaggctcaaaaataaattccacgtgaatgcctgaacagttggtgactaattcatccctttattcactaaacaaatatttatccagtactcctcagacaacccctcccccaactaaatagaaatggtgtctgtcctcaagttgatcacaatgcagcagaaaattctaatttaaatgtaattcacccaatgccaggtggggctcctggaatcataggaagggctctgttttggagcctgggttgttgaccttaaagtccagccttccaaatccagccgatgacctgagacaagttacttaacttgttacaacctgttttctcatatgtctaaaagctgtgatgatagtaatagcttacctttgttgtaagagttctacaaacacatgtgactcaggagaggtactgagagcttctagtaagaagtcaacaaagtattatgggagtacaaaggtagtaacaatttacctctccctccaggcactgagagggtggcatctgaaatggatcttgaaggacacataggaattggccaggtggaaaagacaggaggtaaatatcaggcaaagggaacagtatatgcaaactactgaagcgagaaacagcataatgttttttatttttttgaggcagggtctcactctgttgcccaggctggagtacagtggcacaatcatagctcaccacagccttgacctccctgggctcaggtaatcctcccacctcagcctcctgagtaactgggactacagacacacaccaccatgcccagctaatttttgtacttcttgtagagaagggtttcacataatgtattcttagaacttgaaagatttggtcttgaaatgacaagaaatgttgaagggtgaggggaattcatcaccttgctgtccctgttccctatgtagcctcaaagctcactcctccactccttcacttgcaaattctggccggccttccttccttcctctctctctctttcttccttcctttctttcttttcttcccaaagtacttactgtataatatcaatttaatagaaatgtacttatttcgttgatagtcctcagcaccctcatcctccttcccccacctccatacatagatgagaaacagttcccagaggacaggaatttttgtctgttttctttactgacatattcccaatgactcacacactgcctggcacagaacaaaacaagtcatttaattcattcaacacatatatggtgcctaccaagcaatggcttgccactggggctccgatgttgaacaagatggggtcttgaagtgttaggacctcctgaggagtcccctggccattctgtgaaggctttatttagaaagacccctcccgcaggagctttggctgtttctttagtctttctttgcccactccctaaatacttgcaaaatgtaaatccttaaaaaaaaaaaagtaaatctttatggggttgagcctacttccagtaagtctcttccctttgtggatttcctgtgtgtctggtgctgggggaggtgactttgggagtcccaggagactgccaggtgcctgggggagaagatgttgaaaggacagggtaggggttcaggaatggaggcgcccagagacaagtagcctctttcacaaccaggcctggggctgttcctgtgattgggtgtctcagcca

SEQ ID NO: 50888 - DNA, 601 bp, Homo sapiens
tggcctagagcctacacccaagaaagcaaaaacactccttgggtggggctttcctagacataaagctttaccatgcctctaagcaggtgagctccagccaagattatattgggcaggtaataaaattaagggcaataaaaccagataaaccacctcattagcagcagtgtactggtaaggccatttcaacaagaagaggaggatagatggaagactcaaatcctttgtcaagttctttccaatgtcctcctctgaaaaggaacattcttttcaggagtgttggcttggaagagagggcatatgtacatttatccaacacctgctgagaccaagtggtgattcagaggagagcctctggaatttggacctgtcacttgattgctactgagagatcaccagctgaactgcttgacttttctcagaacttttttatcagtcatgtaaatgagtgaagatcctgtaccagtctatgtaggatcaactggtcattgagtgtagatttacacattaaaagccacacttatattcatagtttcaaaaaaaaaagaaaaaaatggcactacttattttgtaaagatagaaccattttcttttttttctt

SEQ ID NO: 50889 - DNA, 575 bp, Homo sapiens
gttggcagtgagtcgagattgtgccattgcattccagcctgggtgacacaatgagaccctgcctccaaaaaaaaaaaaagaaacacattccaacgcttcttcaccatctttattcccttgactacctgctatgccctcttattcttgctagggatttcaccttcaacttcataaactagtgatcaactgagccactgtcaacttcctgtccccaaattaccacacctgaactgccttccctttgccctggaccgatggagggggtgtgtctccattctgggttctgaactttgtgctcactgtgtcttctgcactctctgtgactccagtcttgccctgtctgtcagcttttcgcatcaacattaaacactttcgcaacttcccctggccacaggttcccgtctagcacagccttgactctttctatcccttgtggccaaatgtgtcctgtccaaagaactctattcctaatgtcctattttgtcatcctttgcatcctttactttccaattcagtctccatatttctgtttcctgagaatattgtcttcccccacccaaagtataatccataaa

SEQ ID NO: 50890 - DNA, 1050 bp, Homo sapiens
agcgagataaagtctttaagctaatttttcccttatcctaaacctatggttagtttgcataatggcactgtgatttcaccttcctttagaaaatgctgtagaatcaaaatatctattttggctctccatggtcaccagaatgtggcttgcaaaaaagggaacagttgttggttctggctaaatgccagacatttggtgtagaattatcagttgcttattctaccagaagtttcagtggaagcttgtaaagcaggttttccgtattggtgtggatcaagtagccaggagaccatttacattgctgtttattttcattgcatagcgaagagccccaagcattcacactggaggagaaaagggccaagcttgataagcagtgtgggaggggataataaccggctgtgacctcgcccgccgggcagctctggttcacagtgcagaggagccgccagccaagtttggatggaggtcttggcagagtcctgccagcaaagaaagaaaaaccagaagttgtactaaattggtccttttatgggcactttctcccttcattattcacctctctcaagcaaccatataaatcatcttgtgcctgaattctaaaattccggggagttggtaggtgagcaacggcgggaggcctgggcctcttgccagtacaaaacccggaggacattccggggcttcagccagctcccaaaagccctctttcctttcttctctgagccctagggattggccagcctgtttcctttccactgatgccacctgttatttccaactgcgtttatctcctctcctgctacagtgtgggatggaagacagcttcaggactgctggcccacattgctcacaccaacagccatttattgcctgctcacgtgtgtcaggcactctactatgcgctttgtatcataatatcattttacagaagaggaactaaagttcttgtatgtcgtcagataacctcacaagatcataagtataaagatgagtttcaaacatatccagttatactgtctcaatccagttccccagacaaatgacatc

SEQ ID NO: 50891 - DNA, 1141 bp, Homo sapiens
ttcatcatggctaatataatttatttgtgagtcttattagccttcttattaactctatgaagtgctttgtgattctagttatgaaaactatcttatgaaaatcaaccatcacatgtgaaaaaagccagtctacagcagtactgcacacagtgcctataacaaaggctcagttatgctgttgcaggagagagtcaataattagtaacacatttctaaaggtctctcttgcataatttttgtgtccagatgtctatgacatttgggttctaaaatagagttccaaataccacacattcatgtacattttccaagaataattggatgattttgagtctttctatttaataaacatcaggactaaagatggcctacttcacaatatcaaatttattcattttaaacatccattttgatgtggaaagtgtttggcataaatacaattaaaagagtgccggattgtaaatcctttgaagtttttgtttatgatctatctcttccaactgctagtagtgtaaaaatggaatgtaatttgcataaaatttttcaattcacatgttcttagagcttaactattaacaattcccacaaaacactctggtggatccccatggctgggggtgcaaagtccaagtgccctaataaggtacaagctccctttcctgcatctggtcctgcctacctctcaagcgtcaacagctgccactcccttcccaaagtttatgctccaggaacactgagttgcttgtaattcctggaacacaatggaatgtttcttgtttccatgtctttctgcatactgtgccctttccacttcactcagcttggtcctatgcaatctacaagtttcagttcataggccacttcctgtaagaaactgtctctgatgtcctcaagttgggtgagggagacttagagtttaacttcctccctgagttacaatgaattataactaattgtttatgcatgtttcccagtgggccatggactactaaaaggagctcatctttgcctccacaacatctagtaggagttaaataaaagttaaatgagtcaggtatattggtgtgcctgtagtcccagctactctggaagctgaggtgggagggtcacttgaactcaggagttcaaggctgcagtgagc

SEQ ID NO: 50892 - DNA, 3347 bp, Homo sapiens
taaattctcacattgtcagatgagtcttaacactttagtatttgctaaatttagcatattaaaaatttttaaaaggagtataagggccctaaattggaaaaaaaaactctactacgatcataactgtgggatttcatttccagttcattctgtcagaatcaatctaaagtccatgtaatgtaaacagttcgaaaaaagtcttaaaaatgaattgttgactttaaacacacaatcttcggagccgctcacaacgtccgtagaagcagactcctccccgctcctggggaaaaccctgcctaatatttataacgttatgacatactgtaatactcacaaggtggttgtagaagtataaacacgactggagttatctgattggctgctggtgatgtaacacccatgtcaatacttcccagtgaacgcacgtgttcgaccttttatttaaatttccatttcatcacagcaataagacactcggggcggtgcattttctgtgaaatgactactgtccggggcccgaggtgctgcctcgcacaatgcatcaaaggaggttgtgtccgtggtcgtaacctcttcgcgtgaaaggcaccgcctggtccagtctttgtgaaggaacaaaataagttcacttccttgggcaccgccacccaccctcagcaaatgacaaggctggagcgcagctcccaccgcacagttatttgcaaagtcccaggtgaactcgtggcgagagaaggaaaatgcgcgtcccgggcgcgggtaggtgcgtgtgggcagcggggaggcggccagaccctgacactcgccagctgtttgtcctccgcgtagcccggccccggccgcacacgcccgccccctccctgagacccccagcccgccgcccggccttttgtccccaacccctcggccgacttccttccccgcggccgcacccccgcccccaggccggaggcgcagcccagcccctttcccggtcccctggcgcccccaccccaccccagcccagccccaagcccagcccccctcccccagcccggcccccaccctttccccctccagcggttactgctaccccggtgcattgtgggcgcacggtccgttgttcatttgccattcgacctccgccagggcctggtcggacggaaacgctccgccggctttattgtcgcttcgttatgtggcggagccgagcagtttagcgtgcctctcaccctcagcgcctgcgaagccggcggcggcgtcgggactcctcggcgcgcggaggaaggatatctgtgtggaggatcggtgtgtgcgcgcgcggctttaaagagggggcagcggagggtctccccgcactccgctgctcaacttcgaaggcctcgctcgctgcaggctcgctcctcacctctccgccgcccgcccccttctccgcgcgggacgctgcccggagcgcggcggggcgggggtggaggacgagagagcggtcggaggcgtcggcccggcagcggcagcggcagcggacgcgtgcagcagacccgggagcgagcgcgagccgggctgccgggcgagagggcgaggccgagccccgcgagaccggaacgccgggggcgggggcgagacagagggggagccgcggggagcgcgcgggacgcggcccgaggccgtgcgcgagccggggcaccgggcggcggcggcggcggcgcgcgccatgtcgttcagtgaaatgaaccgcaggacgctggcgttccgaggaggcgggttggtcaccgctagcggcggcggctccacgaacaataacgctggcggggaggcctcagcttggcctccgcagccccagccgagacagcccccgccgccagcgccgcccgcgcttcagccgcctaatgggcggggggccgacgaggaagtggaattggagggcctggagccccaagacctggaggcctccgccgggccggccgccggcgccgccgaggaagccaaggagttgctgctcccccaagacgcgggcggccccacctcgcttggcggtggcgcggggggccccctgctagcggaaaggaaccgtcggactctggccttccgaggcggcggcggcgggggtctcggcaacaatggcagtagccgcggccgccccgagacctcggtgtggcccttgaggcatttcaatgggcgagggccggcgactgtggatctggagctggacgcgctggaggggaaggagttgatgcaggacggcgcgtccctgagcgacagcaccgaggacgaggaggagggggcgagcctgggcgacggcagcggggcggaaggcggcagctgcagcagcagcaggcggtcgggcggcgatggcggggacgaagtggagggcagcggtgtgggagctggcgaaggagagactgtccagcacttcccgctcgcgcggcccaagtctctaatgcagaagctccaatgctccttccagacctcctggctcaaggactttccctggctgcgctattccaaggatactggtcttatgtcttgcggctggtgccaaaagacccctgcagatgggggaagcgtggaccttcccccagtggggcatgatgagctttcgcgagggacccgcaactacaagaaaaccctcctcctgaggcaccacgtctctaccgagcacaaactccacgaagccaacgcccaggtacagtatatcctgctcctacttttttgagatcttttagggaaaggtttatcagcactcccttcacccccacccacccccgaaaaaaaacctcaaaaccattttcctgggtgaagacatcgttccagttgagaggtgcgggaagcttaggcgtgggggtttagaaagcctgggaacaagttttataaaagttctgtatgtgttgtggggggaaggggatggaatgacaattgtcgtggcgctggattttcttttttatgactcatttcttatcagattgaatcaaaaagaaagtgaggttgaaggttttaacctaaaaggctgactttgcggtaaaaaaattttattagctgtgattttagagaagctggtctatgctcacagacgtttagtgtgctggtcgaagtcaaatcgggcaactctttgaagaatggattaaacagtttacctttaaggctacccctttcaggaaaacgtccagccgaaaaaattctttatatgaaatcaaaataatgtcaagtatgagagcagtatgtaaatgtagagaatgctatttggaattccttgctcttgtgaataattttactaaattaatctctgttgaactttcttactacggcttggttttggtaaattattgtagtttttacttgtttacttttactcagatttttgtgctgagatttct

SEQ ID NO: 50893 - DNA, 1617 bp, Homo sapiens
ttttattgcaaaactttagccatatttagagcaggtttcaacgcataaggcaccccctctctttgtcagggcattccggctagttttgaggcttaacagctctagtccatttccattctcactatactttttagggaacttaaatgttcattttaggttgaatctcaagtccttttctcaaatggattttactaattagctaatttaggaaaattgtgtggtattttctctttcctttgtcacctgaaacctcgcttagtatttcctcagcattttaagatctcccccgtccccgctcccgccccccaaggctacttggaagcttccaggctacttccttacgggcagtttacagattttgtttttagaagcctttagttgaccttggcctgcgtgggtgttctcgtctttcctcctatcgtatgttacggttacctgcagaggctggcgtcgaaggagaggtgctatgcgaggatggccccaagttaaacagtgacagcctctgccctcccagaccccaggcgcgcgggggcgggcgcggaacaccggttccaccgccaccttcaggcctcccggtgtggcgcggttcgggacgtcacacaaataccagggcacccatgtttctgccctgggaaactctcacgtcagccggccccccaattctgctaaaggagaaaacaaaatttccctcccatggacgcagctgggcactttgagaactggtcgggcagaaggctgatcgcgcagagcctggtgcaaacgggaagcaattcccctggaacaagaaatgaggggcaggaatttgcatgtctttcacaggagtatcaaagtctgggagagtttccttcccaaagtcatctgttccaaactgaacttaaaaagctacctctcaggggctccccgggaagaggttcccctgtaaggaccaggagaacttggataatttgggaagaagactcccatcaaggatgggaattatccccttacacacttggctaagattcttaggagaataaagagggactggaaattaatatatttgtagtcatacataaatctgacattgtaaaatgcagggagttcttatactgcagtggagggccaatcattatcacatcggttactccttgtagtatctttataaagctctgatttaaagaactgctgttttgttgtagatgagtgtccgggctgatggaaccctcacatcacctaaataaccatgaggctgtttttcagtttgttcacctcagtgctgcacattgcacatgcattaacaaatatcaccaatgaatgatgatggaggtatcatcatttacttgacaatctgtaaagtaccttccaggtaattgacaatatattcctacttaattacttgcgctcttcacatctctgttccttctgtttactttgcaaagagaaaagccctttgaacccaaacatttgtcgatcccagtcccagagaagtcacagaatttgccagagggaaggcaaatcttttagcatctgcttctagtataggtgaaattgctgggagtgactgctcaggagcaactgagcaaaattggcaattttccccacagagcaaaaagatttgatttgaaaaacatcatacag

SEQ ID NO: 50894 - DNA, 3532 bp, Homo sapiens
ttgtggaatgtgtagtcagggaacaaactaactgctcagagatggtaggtttggggtcttcaacccaaccctgttgactactattgggcaaatctgggcaggttttatgccctttcgaaacttcagtttcctcatctatcaaatggaataataatagtacctgtcttctaagtttaagagaattcagtaaaatgcaaatgtctataaattgcttagaatagtgcctggaattcagcgaaccctcacaaaatgctacatatcaactagttggaaatctaattctagaagtcatgcatgttatgtcaaaataagtgaacatttagagttttatagataaacttacagtttacagaagtttgcttacatttttcatcctttctttttggtcagcgacagagttgaaaccagatgggatatcacacaattacaaacccacgagttttcctgttactttaaggtaggtgcctaatttgggagtatgtgggtagaagaaaccaaaaaatgttcctttggataatacctgaaaacaggggttaccgatttggattttcagaacaaacagcaaaacaaaagctcaggctctatccacagaaacagtgttttttagggcttccgaggattctttgacctttgctttaggaaacatggacaaccttacatttgattggtgaattttctgctggtgtttttttttttttttttttttccaaaccacgttccctgcctgaaagctaaacctatttatggtgagcgctgttttttcaattaggtttattttcattttcccataggccatgttagctgagaacttccaaaagtttattttttttctctttgctttttataatggtttttaaaataaaatatacagcacttatctatagattttctctggaaatactcatgtctgaaataagctttttttccacacctttaacaccacgtcataagagctattcaaaaatgcctttctgaatgtaattgttgtccatttctgtggcaaactctatgagagcaaggatcgcgtccggttcgccagctttgtgaaatatcttgtgcaagctgacgcttagcaaacagtacttaagaatgatgatctgtttgtgactcggcttctcccaaaaattttcagctggttatcagaaaacattgtttaaaattccaagcttagcattagtaatatgttttctccacgaggtccctgatttggggtgaggggtggactgaaaatgaaaacccacatcacctttctaatagttgtgtaacggaaaatattctctggtgaaaacactccaggcgaaagcaagccttagctcggaattccctccgcggccggcgcctcccctccgggggcctggctcgcagcccgtggggacgagggcctgcacgtccccgggggactgagggctgctctgggtgaggatgggaaggcgggtgccgcttccgagggctcctctcgccaagggagagagccctagacccgttcccggggcgctgctcttcccgggctggggtgggctgcagcggcggcaggacctcgccccctcccggccgcccgcacccccgcgcctcctcctagggcccggtgtcccacgggcctgccgcggtccccgccctctccggctcccgcgactccctcccccaggcagctggggcaggaattcggctggagaatctggcccgggcacccggccctggagggctggactggttcgcccggggccgcgccctcatccccgctcctacccggctccccgtcccgcgctcctcccagctctggctcccccactccttcccctctcccgccggcgctccccgcctctgctcctcccgctccccctccggcgctccttctccctgccccccatccacgccgccgcccccggtctttcttcctgccccagctcctcccctgcgccccttctccctgctccccttctccctgctcccctcctcctcgcccttcctcccctgttctccttctcctctgctcccctcctcccctcttcccctcctcccccgctcctcttcccggtttgcggagctcccacgctgttgctatggaggcgcccgcggctgttcgcggccaggcgggagctgccctggggccccggggacgaagtagggactctgcccaaggctcgggcgcctcgccccactggggcccaggaacaaagcgcgccctcccccaccccgggagtgcgctgtgagaccctcaggcgtcccgggccccgaggcttaagaccaccgcgaatctgctcgcccccaacctctgtgggcaggacccctggggccggggtgacagctgcgctctaccgcgctaccttcctggccccccgaagatcactcccgctcgccccatcccggaggtgtcactggggccgggggacggccagatggccccatttaacaggactatccgttttgttgggggccgaagcagcgtccaggccaatttacatagaaaaatggggtttgtgtccccaattcagtgcagtgccccgacagctggtggctctgtcatcatgtcaggaccccacagcatgatgtttaaagtggctttatctgtgcagatgtgtgagtgtgaatagcaattgattgggaaccagtagctactaggtctggcttgaagatattaagcgttcacagaggaaattttatcagcccggtcaccgaataagagcctagacgggaaaaggcctgctgaagacttctgatgctctcctgcagaccttttagcttatcattttattcagaagtctaaaaagccaaattgtttgggtctgaggagggctttgaaatccttaactatttacagcttggtcgttgcttgtaaaagttgtgaggctgaacataaaaacggtttaaggaggactgctaagacttaaaaaaaatgatgaaagatctaatctaattcattttattgaactactttgactcagttggtttgtgtccagaacgatagcctgtaataggctgaaagttatcatttgtttagtttggaatcagtagcttaaacatgtgtacttaaattgcagcatgttagaacagggagtaactttcttattttattagtgaagaatttgaggctcagagaagttaagtgattttcccaagatcacacaactctgtgaaatatgatctaaattgttcaaatccatacaggacaaaggaagaggacatttgaaaagacagtagttttagaagcccttgaaaatacctccatcaagaagctctggatctgcaaggggtgggggcttttgcattaaaaaaaaaagaaaagaaaagaaaagcagcagctactcttgcacctttcccccagtacgctggagccaccaacaggtaactgcctagaagacaagggatccagaggaatttttttcctgcacctttatacattcatcatctttgactgagactgtattggaaacaattctagccactaaaattttctggaactgtgctctgggactagtgactttgtttccacagaagctatcattttgtaacaaagatggaaagtataatatat

SEQ ID NO: 50895 - DNA, 595 bp, Homo sapiens
caacagcaattgtttatctcctcctcacacatacacacaccttccttgaacccctgctaaaggttccaaagaaatctgttacccaaagaaaattaggtaatgatattaagaaacatgatgaactttgtctcctctttccttttttccttttgctgggttttcaagaggcactttggggatagactatattctatcccagtgcctcacagtgtctggctcaataaatatttgttatgttcaatctcagaaaggttgtgttttgggacctcagagatgagccacatttgggatatcttaatttgtttaaatagcactttgtaaaatttacttagtgaatcatctgtgttcaaagaatgtttgtcaaaaagatttgttctgtagaatttaatgtttctcagtatgattaacacttgcttatcctacctggctgtaaattaacttctcaggggacatccatggtgatgccctgcattgtgaggattgaattataagatggttttctcttcactttatatcgtacatttctcttccaatcttgcataccctacactggtagctacctgaggaaagtctgagttcaccaccagacaatgga

SEQ ID NO: 50896 - DNA, 799 bp, Homo sapiens
tcagtcatagatcaagttgttgttttaagtggaagaggggaaagattctgctctcagacaaagaaggagatgcaaaagaaacaacagaagtctcttctcagtgacaacagcagttctgcaactggtttttgtttttgtttttttttttcgtttttaaaaataatacaaaataaccaaaacgcacagtttgctttttttgtgccttctgatgcctggttatattttgcaagagttcgccttcgggttttaaataattcatcatgcagtggctcttgtttggcgcaggcaggcagggggtggatggagcgggtaacgagggagaggcgagcttggaggacgcacatcatacaagtgaggaactggcacagctgcagcctcatgagaccccgccccgatgagctcatcccttggcagtgcaaattaggatgacataatatttctggagagctccttccagcccactgcagcaggagagctcttgcttttcctgagcataggaaaaattagcatcggtatttctagctgttcctgaggaaatggcattttattcaagggtgtcgtgggaaacataacacattgcctgcattagtatcagctcctgagcaagaggaaagcagagcttatcagtaaataagtcactgattgctgcacttaccaaactacaaaggtaaccagcattcttcaaaaatagggtccaattacaagggcatgagttacagtctgtgtgattcttcaaaattttttagctcaagagtataaaaaacaccacagcaataatattaaataatatagtaatcat

SEQ ID NO: 50897 - DNA, 839 bp, Homo sapiens
gggtgtgagcgagcggcgcgctgccgcctccgccgccgccgccgccgcccgggagccgcgggccgcgctgcgctccatgcggccggcggccgagcccgcgcgcgcctctcccggccggctgcgcccgcgcgctccgggcctaccgctgccgtgcctcggcgcgagctgtttgtgttgtatgttttccaccaccgcccccctcttcgcgagccattcctcacaaccctccggtccccccgctcagacaaaacccggactggattttttttttctcttacccacagtctccgaaagtctggcgcttcgaagcagttggccctgacaccagggcaaacgcttaaccgcagcccattcttccctccggagggaggggagtagacttcgctggaagtaaggttgtctgtcaaagttagactttgaacgtagagatttgctacaagtcattttaatggacactgatgtgcatggcagctactcctgagcttgtgtgaaatcaaggaaggtgtaccaatctgaggtttgggatgaattcctaatatgaatcatcagagtcgcttagattttcgaaacactgtttcatgagcgattgtctaccaatctcacactctttgaacgcaccactctaggccctgcgattgagctgccttggctctgtgctgagtgtgtaggtctttcagcttttactcctgctattctaccttgagtgcctgattttaatggctgaattccaagaagctttctgtttgcactgtctgatctgtagactctcttctggcattgttcaggactttgaagaaacaaatgggtgggagttcaagatcgtttgagttggttactta

SEQ ID NO: 50898 - DNA, 1329 bp, Homo sapiens
gggattacaggtgtgagccactgcgcctggccatgtttttttaccgatatgaaattatcgatctacatgttcttatgtagtgaccaaaccacagacttttaaaacagccacggggtgggggcagtccattaccctaagacaggacacatttatttggccaaagtatttacttgtgtgcctcctatgtacaaggcactgtgataggtgctggagaaacaaaaacagttgcataccttaaattgctcatatcctatgcagaaggcaggtaggttaaccaacaggcctccacagccttggacactatgcagaatatttcttgtctttagttcaatttaactcaattcatttgccatattacaggcacagtgtaagggaatacaatgataaatgcctgcactctacccccaaggagttcagagtccaagagagagacagatatatcagcaaatattaacagtacagagtgataagccaagagtctaagtatatgaatgattcacaggcaggaaaaagaagggagtgattatccatcatccccaccccgtcactgggaagtcttcgtggaagaggtgacacctactctgggctttgaaaggcatttcaggcagtggaattggggcacaaagtcacatagtgatgaaactgaatggcatgtttagaatgatgttgctggagggtaaaaggaggatgatggaggtgagtgcctgagaaagtggagaaggcagcaatggtaagattgtgaggggctttttgtaccctgattaggacttaacgcagatgccaaagggctgcgaggagagactcatgattcaattttggttttagcaagcactccaccaggacatggatgactgatgaagggaaggccaggatagagcagagagagcagtcagaaagctatcacagtaatccagacatgagacaaggagggccatggcatgcggatgaagtggagaggcgacacatgagaaaggcttaggaaagaatttgagggtatcagtgactggctggatgtgtcatgtgaagagtaggaaaaagtccagaattaatctcaggtttctgcctcaggaaagctgggtagatgatgataccaccaattgagagaaaatacagacagcagagggatagtgagaaggagaagagagaggtagatcagatcatttgaattggaggtagttgagcatttaagtggagatgtttcagaaaaaagttgggtatacatgtattgagcaggcggagaaagcagggcagaaatgtaaatatgaaatcttctggaatttaggtgtcagaatgaagggagagatggaaatctcctaagcaaagaagaca

SEQ ID NO: 50899 - DNA, 1472 bp, Homo sapiens
aattgcaactccacaacccattctttttctcattagacaaataatgcaaagagcttaactatcacaccagcatgctacgagaggctccctggtgtgcttcaatattggaccaaacacagacagatgtattcctggtgcctgtgtaacattacaactcattgatcacatgcagcaacatcaacatctcaaggagtccatttgttcaaaacacagtaaatgactccacattttccctttgagtcaacaaaagactctgcttgtcaccttgcctggagcggggtggtttttcactatgtgagtatctatctttttatttctgtcccttatgttggtgggcacatgtctgtattgctgtccctgttacaactcatcccagtgaatgttagctgtgatgccagtagttaccatctcttgactatttacccaacagataacaatgcttacaatgccttaaaaatattaccatttggcttaaacagtgatgaaagaaatatatttttctcttcattttatatgaggaaactagacaacaagagggtcagtaacttcctgaaagtcacacagatagtaagaggcagagctgggctatgcacttgtgcttatttttctcaatattcttgctgctacaaggaatcttgaaagaggagattttcaagaacgtgagcagattgtctcaggaattggaggaggataagcatctattacttatctctattcattttgactcaggcctgtgtaaaagcaggaaatagaaggcatgagtgttccccataatatttgcagttcataagttagaaattagcaatcagccccttttcacgtaggacacaataatagacactctggcacagtccctgcaatttggttatgcgaagaaaacaggaaacaagcacattttcactgtggtttcagtctgaggagggctggcatctgctgacgtgacggctagattttcttgtcaatatcgtatttactatcctgatcacatgagcggagagaggaggatgagtcacagttaactggctgctaaattaggaaaatgtaatccatttatttctttcaaattagattcccccaaagcattttagacctttttttcctcagcaaccatagccacaacctaaacagctaacacattcccaaactaggctaatctggctgtctattatagctagacaatctggctgtctattataagtaaataaattaccattttgtagcattttcttccaaaattagggcaggattttgagtatattagtcttcacctacaaatgccaaacttcttctgccctggcttgactcatgtccacccctcactgcctactttcaagagccatcaaaatacaatgtagtatgtcgatttatatttctagaaagccacaaagtagtccttaaccaataagaatcataaatcattagctctgtgaggaatctattggatcactcattttatagctaagggaaatgga

SEQ ID NO: 50900 - DNA, 2572 bp, Homo sapiens
cataaataaaagtagagacttgactgccccctggtataacttgtccctttgttctgagaaagcgatccaaatgatgcaaagaccattgattcaaagaaacacggatgagaagccatagctctaagaagcaaaactctccagtgggacattggaaatgtgctttctgtgatttaccctgagatgcttaaagggtttgttttagcagcagcgccatctttctctgtatttgtattagatggagcttatctctccaaaccaacaaaactctgttttttgaaacaacagaaacaaactgtttctttcatagaagttcctctttctacacacacacgcacgcacgcacgcacgcacacaaatgagttgtaacttatcacagctgtggaagcagagaatgtccagggcagcttgaaagttaaggaaagatctcaaggaccattgatttaggaaaactaactccaggggcattcatttcaccagccactttctccttccccccaacaggtgagagaagaagtttaagttctgcttacaaatgaggtgagagttcatttaatctattcaccatgaccaaagttacaaagggctctctggttattaagcattcagttattttttcttgttttcaaaaattgatttttttttcagtctaagaaagtaaataaagcttatttctttcaatctttcaaaatattacaatgagattatttgagcctctgttctggtaaaatcatcactttttcaaagatgatttcttgctgttgtctcattatttacatggtcagagaggttacttaaagagtaccgctttaaaatctggagcattgagagagaaccacaaacagccctataccatgaaaaatcctatttatgtgggagggaaattttcttaaacgtcagtttttaaatcagtttgggacattaaatctctccacctcccactctctcctccctcactgacttctgaggaacaacaaccaccaagaaaaaaaaaaaaaaaaaaccactgtgttttgaattccattatgtttccaaacttccaagtcagaggaaattatttaaaatgacttaccccacacaaatacacataaggagggagggaaaaacaaattgccagctcacaagattgtttctctactaaccacccgcttttgctgacctgacaaattaaaagtatgtaatttcctcacggcatttccgacatattttagtgatattttgtaagagttaagagagttctgtttgctctttttactcaagcctcttggactttggtcctctgaacaggatcctaagcttggaaactctccaagtgacagaaaattggcaagttcttcatcgttgattccttactggctctttggagaggaaaggagttctgctcaggatttggctgagccctttgcttggcaccccagccagtaactcaaaagttcaaggaacttgacagacagaggctgtttttctggtgagagatttgaacatgcccagttgagtctgtcatcgcacgtctgcatcttgtctccttccagaggaggcttatttctgaccaggcttgtgatggatgtattctatgcgggaagacttttgcctgcccctgtggcatttaccctggatcagggtgagccctgaatctctctattgcctcaatccatacagcctcactgtgccaagtggaagcagtggcagtgtgtgtatgtgtgtgtgttattcaaacagttaaaaaaaaaaaaaagacagaaggcttaggcagatttccagaaaacagactgtgtcagtctagactagtaaaacccagccagtttaatttctgaatttgtggttattatttctgaatttattttgtatttaacctacttcccccttgccgcatccccacaaaaaaagagtaaaaaggtgagaaaaatgaccaaccagtttcaaccactatcctggcatcatgaaagttaaaattccaaagattagagattatatattgctcctatgaaaaataacctttgtgtgaatctttaaagattcctactttttaaaaaaatagcaaaagcagcatatgttattgttgaaacttcagaaaaaaaataagcgaaaacaagaaaattgaaaccatgtataatttcaccatctagacataagattacatggttttgttaagtaagaatcggccttgagttaggtagaacggagttcaaattgtgggcctacctgtgtgattcagagcaagttaacctcactgagcattgaacttctctccataaagtgagacatagctataggggtgtggagggttgcagtaaaattctggacacaaaagtaattgctgattgataatatctgtattgtatcccctaaactactgatcatatttcattattaatttcatactacctgcagtttcagaaaatgagctcattaaatttttctcacattcctttctttgttatattgccatgacacaaatttacagcttcagtcttctgctttattgtttctattgcctatacttgtctggagtaagatgtacacagagccatatttttatagtgagtaagcctgatttcagtgctttattattttt

SEQ ID NO: 50901 - DNA, 576 bp, Homo sapiens
tgaaattggccatttttaggggacagatcatgtaagatcttgcagctattttaaggattttggtctttatgctaaaagcaatgggggaaccattgaagggatttaaacagtgacatgacaaactcagattggcatttggaaaagatcactctgctgctgtgtggggtagggattggatgggtgtggaatggttgtggggaaaccaggcttttgcagtcgtcaggttgatagaggctggttcctcagagtaggaaggttgcagtggtgatggacaagggtcagagttgagaaatacttaaggtgggtgatccttgttgatagtttgaatatgagcaactaggtaaggtcactgtcaaggatgatgtcaccttttctgacttgcccaaagctttcagattgtaactatgtttgagtaaactttgcatgcttccagaatatcttgcacaaagcttatgttcaccgaataataatttttgaaggaatgaatgagtcaataaaccaaatattacgttatattgaacacacccatatgaagcatgctgaatattaatgcaatgctgtagattattatttttt

SEQ ID NO: 50902 - DNA, 1435 bp, Homo sapiens
aatgtttttctccccaagttttatactgatgccccaagtcattcaggccttccctgaccacccagtagaaaaggtatcattcttcctgccctaacaaaccaaggcagtctctattttatcatcatttcattaactttattccattttgttttactcatcacatttcggatctgaaatttggtttgattaattatttttcttcccctgctagaatgtaagcttcattggaacagaaaccattagctgttttatttattgctgtatccccaacatctagaacagtgcccgggaaatagtagataataattagtgattagtctgtacttttctcctgatccaaacaggcttgctttctagatggataatactggcaacagtacggaaggttgatttgaggtgctacagagtgacttaggatggggactggctggacaagggcaggaatggtggagaaggagacatgccggaggcctggcaagctggcccgttattgatttatgtgtgcttgtgtgagaagatcaaggttttcctggcttggagccctggcgttggctgtgcaccatgcctggaatttctttcactggcttattatttcagtctcacattaaatgtaacctgctcatagaggcctttctggaggcctctctgtaaagtggatctccagagacttggtacaatcagtggagacattgagatgctgaataccctgagaatttaaacgtgtatgtcaaacatttaaaggtaggcactaaggccattagaatgtgagctccaatgaggcaggagttctgtctcttctctctcaccctgtttcagctcctggcacatagtaaatactcagcaaatatttatggaatgaatcaatatttggttttcctgtggcttgttttgttttcctgttaactttgcttttctactttgatgttgcgatgattaattttttttcctttgggcctaaacatttaaagctgttgctttgaatgacgtgtctgttttagaagacactctgccagattgtggtgctgtttatctgcatgtcagatgtctgccttcttccccgtgccactgctttttgggctggtttgacttggaggatatccctatcttgttaccctggcatctcttcagaaattcacagtcacagagaagctttcggtgggggaagagttcaagtatgaaatcctaagattcgtaggcactagttcaagacaggcttgtaagattatggatgatagaaaggtaggagaattcaaatcaaaccaaacatttatttagtgcttgctgtgtgcaggaaattgtagtgtatgctacggggaatatttcaaagttaatgtgccctgaagagcaaacaaggcagctcggaaagatgattccactccagaacaaccacatttacattgggacataccgagggagacattgtggaaacagatgt

SEQ ID NO: 50903 - DNA, 887 bp, Homo sapiens
gaaccatgtttattttgtcaacaaagacaaaatcagacagtgatttgatggcccgtttgcaggtgctggggaagaggagttcaagcctcaactagggactgtccacctcccctggcaccccttcttccgggaaaaaacatacaagttcacaaggagaggaccgaggcctgggcctgcgtagaaattgtttatacctaaactagcagagtaagttatacctttttttttttttttttgagaaaatgaagacaattatctgagtctctgcaaagtcacacactgcagtgggatggagaaaatacagatttttggcacgccaggaagggtacatgctctcagggtgagtcatatgtacttccagtctatgggaaagtctgtcaagtaaaaatagaatttgtttttactcgggacagtctaaagaaagccatcagttgtagagaatacgccgcccatccacgttctctataaaacaagggtgacacctagtgggaacatgagtaactacagaagcaggccgtccaggccccgggaagccccggccctgcggcctctttgttcatcttcccaatcattcagactctgtcccagccacagaggtctgggtccaggctgggcagggattaggaggctagctgggttcagagggtcttggcttttctcctcctgacagattttagggtaggaagctatttcagaattttaagtgacgctcctggagttgcttccatggtggagggagagtttggacagggctggctgacggtcagctggtctgcatgggcctctggtggcatctagcctatcagaaggttatgtgctttgtaacagttccagaatgtcctgaaacatcacttctggttagaaagaacttctctctgagcaaagat

SEQ ID NO: 50904 - DNA, 1800 bp, Homo sapiens
ggtctagtgtgttcatcaagtatttctaaactttcatgattttaattcttgttactacagtacttggataggcatactgcatcttaaagacttttttcatgtaacacaggcataatgcaatgtgaagaaaattatcactgaaaggaaaactgtttctccaaattatgacttacgtctacagtaatgagaagctattaaaatagatttttgcaaaatctctaagctgatctgctgcttagaattttgagatttcccactgctctgctattttcccattctgtacgcacagcacagattcctgccaagcctattacagtgaacaaacaatgtcctctctgtcagaacagagaatgaatagtatcacaaaattctcctctaatgtacagcctacatttccctcaccccaagcccttcagaagagaataaccaggatgaggaccgaggaggaaaacaggactctcccctggccaatctgaaactgccttccagaacactaagggctaggtagtatcaaccatatcatattaacttctaaacagagaaagttgacaagtttattttcttttaagggggatcatatgtttttgcatttctgtgtgcgggtacacaaatatctttataaggaaggaggtgtttcatcagataaaacaagacagcttttagctacagactgagcagcgacaggggaacttcatagaaatgacacagcaatttgtgctaaaacattggcagctaattcatgaatgccaaagctgactatgaattcagctgcttctgttaagcctttattcccactaagctcatgattcacaaagaaagcgcctagagttactcctctgaaacctatagtatcatgctgacagatccttctttggtctctctctctctctctctcacacacacacacacacacacacacccctccccacaagaggcattaaagatatgatttccaaaacaagaacttcatgaagcattcctcacaaaccaatgaaaggcttactaaaggcttacttagcaggtattttcatagaagaacatggagttccttaaaatctttcatacttgtctcagttggtgtaaaatattatgattcaggcttttccctcttgtgacatgaatacagcatatattttattttaacctctaaaggaaactactcatttttttcctcataaaggatgaaatgttattttcataatcgaaccccgctggcttttgtgttcacgagtatctgtaacacgaagaaaaaaggccagcctcttctttcctcctcatttcccacacatttttcgtacagctcagtgagctcccagattctgatggcattctcctggtaacacatttagaagaggctgcaggataccccaacagcactgctttcttctctctctctccctctctctctttctcttatgtcactctaggtctgtatgagactaaacaattaaacctttgtgctgtaccactgccattcaaaaattctagtgatgtgtccctttattggtacaatggtaatatttaccttggaggaaatgtttgtccagtagagtattccaagttctggcaatgtattccctttgaaatgttgtggtgagagttctctcttctttcttggcctatagccaaagagaaggaaagttagaaaaaaaggcagatggatatacactgtgaaagatacttgttcagttcactgtaaaaatgctagtgtacttatgccaaacactgagatttatattcttatattccttcctgaacaaagcaaactgaaatgtagaggcacaactatagacagtaata

SEQ ID NO: 50905 - DNA, 1289 bp, Homo sapiens
agcatcagtcatttttcagatcagtcttaaaaaaaaatggcaaaccccaaaacaattttagctggaatcatgggagttgttacactaagcagataacctagctccattgcaaactatcatgccctgactgggacaacttgagtataattctgatagaccaaacacttcttcaggtctcctttcatcttgctgattatttccaaaggtgatagagataattaggttatcagggtatagagataataaggttaatcactgcaaatgattattgacccaatcaaacagaaatcccataccttcaatattgatttctttttccaccgaatggaattttaggacttctgatactgacgatttagtcaaacatgacctctccctgaaacccacatatcctgtccatggaatgccacgcccagcagtttctgttacatctggctctctgacagttttcatgaggacggttggtgacttcttaatactaatgatgacattcataagaaggcccaagcaagtgaactccagttcaggatgtgtttttaccaaactaacctgaactcttgttctggctaaagccacccagcagaactgaaacagagctccattctgggacactgaaaccctgagggatgagatgggcacctgacagatggcctgggctgagcccccgctggcagtgctgaggagggtctaaggaaaggagtgttttctcgaggttatatcctaacagtctcttctggggaaggagtaatgatgttgagagtgtatctccctgctatctgggtagacaaatacagggattgaggagaatagacttcagcaatctactccaaattcatgtctgacttttaaaaactgtacctggaggcaagataactactcagtatgagaccagaatcatgaaactcaattacagattctcaaatttaaaagaaacttaaaggtcatccataaatcaaccccacttgatacttgaatcctttctacaatgtctgtgacatctcatcgataactgccatgtcaaaaggacttggttaaatagaacagttcaacgtactgagcatggaatgaatcacagtgcttggaatatagtaattgctcaatatttattcactgattgagtgaattcattttaaaaaaatcagagtaggctcaaggatgttgctataataaaacctctctcactcacagtccctgaagacagagaagagagtaggattaccggctgctcatgactggcatactgctgcagcaatatttcccacatgcaaacatcattccagtaaatacaa

SEQ ID NO: 50906 - DNA, 2037 bp, Homo sapiens
actgagtacctaccatacaacaaaccccacgctgggactggggatggagaaggtccctccctgctctcctggtctctccccgagtctgccccatttgacacaggatggcatgtttaatgtactattttcattttatatatggataaaaacaaaaattaacttgtaaatatttttcctataaaaacaaaactagggaaaactgccttaaaattaattcaacataatcattactttataacttaaacacgtttcattgctattcctcgatgctcaaaacagaatgatagtgttgcaattaaaattgagactgtaaattaaaaatatccttcagcattttgcaatgaagcatttaatcctcttattaaatgaatgagaatttaatcacataaattagtctacctcattcatatacccaaatgtcagaatttatctaataaagcaaacttagatttaaacattcacaggaagagtggtaagaaggtggctggagaagaccctctttgaaattcagttttgagttttacgcatctaaaatcacagagatctgaggttccagcaccatgttgcagttctcaagccacaattttagtataaagttaccccttcataagtgtagctgtcataaaatgccataagacatgggagagaccaaagcttagtcctgaaataaaaaaaaaatggtactcacagtcctttctatctgtatttgtctataagttaattcatgtgcggtaaatacatttggatttaaggcatttggattccttccagataggaaaacagaaagacaagtaaacccagtgagataatgtagagaaacccactgaggcaatgaaaggagagaagtaggtgcttgagtccatcagctggtgagtcaactccgcaatcgcatcctcacattcctgctgcatgagctggcagaagccagtagaacatgtgctcattccaaaggaaacacaaactcactgccttcagcctcccagaatcatcagtcttacagaattgaacaagtagagaaggtggccaaagtgaatttgagttgcccatattcttctatcactctctttctctacaggatggtgactttacgtttgtcttacattttacttttcttgagataaagcttatacatatatatgcctcttaatgaatgcagaattatttcttatgcagtgggtttttctccatccatctgtaagctgtctctgatactgagtgctgggctggatgacgtgatgccagctctatcacatgcccaagttaagcctgaaggctctgctcttatgtaaaatgagcactactggattagtgtccctgttagatgtgataagaggaaatagaaaaatgagaacagagaagtcctaatttatatgaatcacaggcaggtgccctttaaaaacgacttaagatttttgaaaccatcagccccaaactgtcacataaatttctatagaatggcacatctacttaggtatttctctatttgtgttcgattaattagaaatctaaatcttctgttcatcttcccaccttttttggcttattgcacatatataagattttggcaacccagaaaaagaaaaacatcagaagagacctaatttataaaaagacttcattccaaaaattcagtcattaggacgactgaacatcctttctcattagaatgatgagaaaaggagggtttttacattcttaagacaaacaggtcataacaatttttgtaaagttaaacaactttatagaaaacagagaaaacaatgaacattaaactctattgtactctgatgtttcctttgatctttgattttatgtaaatatttagcaagttgccatcagcaaatacagtgtcatgtgccattttcagttacgtaaaaaatgcatttctatgtttcaaaacagcctgcataaatcattttaaagactataaactattggccgggcgcggtggctcacacctgtaatcccagcactttgggaggctgaggtgggcggatcacgaggtcaggagatcgagaccgtcctggctaacacggt

SEQ ID NO: 50907 - DNA, 1409 bp, Homo sapiens
tccaattatgaaaaggttggcaacttctgcctaggggaagagtaaagcgggatgcgcgggaagcctgcaggcctgaaagaaatggctcgcccaaagatccatcgcagtgctggccacactccccagaggaattaggatggaggtgacaagaccctgcccagccccttcaccccaacgtaaacacagagtcaaggagcttggaatgaataattagcacgcagcagtcgaaatgccctaggagtacctgtcctctcccagcatatttccaactggcacattcgtgagatgctgaggtcagccagccctggactccagaccttccagctgccttgtccccttcttggcaccccgcactccctcctcgagctggaactctgttaacaagaggtgccaccctcggcttcccacaagaagataaaaacgaacctctccttcccacggctccctccaacttcagaaactacagtcaacttactgggactcaggaggcagggagtcttcctggcggacggcgctcggaggcagcctctgcaaactccggcgcgcagcgccgccgccccggcacagcccggcagcagcggcaagtgcaggaccaggcgccgccgctctgcaccagtcgccttggctcagctgtgccgggcgccgggcattcgccagggcacacgactcagcgaggcggcggctgggactgaggctactgcacccggccgcgcggacccgagcgctgcagctgcctccagccccggagcgcggcgctccgagcccctggtgggtgtctctggctccaagggaatcacggctcaattagggacctgccaggagaaaaaccgatgcgctgccgcaggcagagccgccagcccgcccccagtcggctggtcacatcgcgggcgcgcagacggacaagcgagcgggagggtaccgcagccagcactcgccgccgcgccgcggagaatgacaggcgccgaggcggagcagccgcgcggggagcggggcgcgagtgcgcatgatcctggccgcagcggcacgtcacgggggaggaggggcgggccgcggggcgggagggggcgagccgggcggggccgggctgggggtgcacacgggtgaggaccggcgcggggcctggcttgctcgcgggaggatgcaggaagtcttccctgccctgattttatgaacccaaagctctgtggttgaacttgtcccaggagcccattgtcctttaaacagcaccgtttaagcggtccttaaggtccctggggagcccacaaaagccaatttaattcaggttacagcttaaccgtaaagggttgccatttgggggacagtgatcttctattgtggctgtgcattaaaataacttggggagcttgtaagaaccctttgccccggacgcatcccagaacaagtacagg

SEQ ID NO: 50908 - DNA, 922 bp, Homo sapiens
tgtgctggtgttatcatctgggggaaaccttcaaccagggttcaacttccctgttatttgatgggaccattccaagggcattcttcacaattcctctgtgtgtccccagagggattgagtctcaattgcctacagtggtaactggctggtacagcaggcccttattcaccctgccttctcccactggttgagggttgcctagagttcttaacacctctgaaatttcaggctgtgttgttaactgagctttaaagaaagctttgtggcagagaaacagaaacatcatcacgtgagcttgaggtgggattccggtaactacactgcagactttgaactgtcagcaatagttggctgaaatcaataacacacatcagtttttatcacttccttgtcttactcctcatattctttttcctagcctagcctcccttataaaccacctgtacccaagcccttattttaagctgtgctttcaagggaactcaaaccaagacattaagctagtaagtctgctatattatattgcaaatccaatgaaacagaaccaaaggctgagtttcagtccattctcatcctttggctgaggattccctctacagcgtgaattccatactcaacgatttcatattgatttttcaggactctaaattctctcacctctgtatctttttccaaacccaattgtgcatctttaatgatcaaatcattcttttttttttttcttatgcaggagccatattggattgtgaaaggaactcagttgacctggcctattgcagatttattctgagaatttcaattcagtctttgctgctgtttggaaatctttcatgaatcttttaataacttccttacatacatcttgttccattaaagccccaaatttggctttgtcagctctctttcttcataatctttaggt

SEQ ID NO: 50909 - DNA, 1550 bp, Homo sapiens
tccagctccgaaattagtatttttttaaaaattgttgagcttataagagtagtttaaatatttatgtatttgccattttggcttttgagtggtcttttaatttagcagtttcccagctctgccaaatcatagtggccttctgtcaaaatatattacttaacaggccaatacgtctggatcagttacacccacttcatgcttccttcagattagtctaatgatctcttttcctcacaaaacattattgaaagtgactttcttcagttacttgggattttatcatcacgaccatgttaaccaaagaggtatcatctggacactgaaccagaaagaaaaccaggctgtagttcctgttgttactcaatatggctgccccattcaacctttttagaggcagagtgctgagaacattgtcctaaacttcaggaattcatggttcaataaaaggaaggtacaattaagaaacgtaagcatcaatatactgaacatgcactaaaaaggttgttttaaaaggtatacatatttgcagctactatttcttcagaaatatgcctttccttatggagaagggtctttgtagccactcaagagtctgaggtgtgtgaacctcactgccctattgcaaacaacttacttgtggctttctttcttggcataaacttatgcaattctccagcgtgagaataatattctcacaagactgtcaagatgctacttcacagctgtaatgtccacactaatttttccaaggaaattataattttatagagaaattaaggaaaacaagttctctgtagagaatcctaaagaacttcacagaagttatgtagccaattagttttggattgtattccaaccagattcattgttttctctttactatctttatgaccagtactttagactgagtttagttttaaagccatacgaagtacagagccttcagaatgccaataatagcatgctggggttaatcatcgactcagaaaggagaatgccaactaatgaatcatcaacatatctcttgccacacctagggttttctctggatgatttccacccaagtgttgacaaaacttgaccttgaatagtcactaagatgtgttgggactatggccaaaggtgcttacgtgccagtgggacaggctgcatgttcattaactaggttattctgctccacatatgacaagaagtgtactttttgcatttttcacattatttctgatttttaaagcttccagacaaaaagcctctaattattgtaatctcatgcagtgccctggaccctctccagatgtaaacttcagcgtgtagctaaattgaaagaccaaaccccagtgatgggccacctatatatgataagcatgcccatttattaaagttgaaaaacaggcccacaaccacaacactacattttaccttctgaatggtcctggctgcaattaaaagcaggatgatgcactattttccagttgaataaactgagagccaaaagttcaggagttctgactctagttgtgtatctgatttgtcctgggaagggcacttac

SEQ ID NO: 50910 - DNA, 1058 bp, Homo sapiens
aatataattgcagcattgtataggataaagagcagaagacgaaattagaggatctaggccagctctttaccagctaacatgaagataaccacattaattatcctctctaagcccatttcctcactggaaaagtggataataataatcatctgacctctcacaggggttgtggtgaggaccaaatgaaataatggaaaatttatttaaaactgtactaatgtaagcatactaaatgtcctttctcaaaacaaacaaacaaaaattctaggtgagttattagtatttttgttttaaattaacttgaatattttatgtaattatagagttaacaaataaatgtgtcaccatttaatatataaataaatgaattgctcatgacttacaaatttatttcataaaagggaatgtgatgaacattgagaataatgggaaagcacagttaccttgttagagatctgtctcttccttttacatgaaaaatagagtacttagtgaaccaaagttctgatgagaaaatgaggtaatttttggagacagaaatatccaattcattcctttgtaagtattttacccataaaaaccccagcctagtcatcagaaggtcaactgttttatagattaactcactcaacccatgtcagaggttaggaactctctggtgagaacagctgtgggttatttgtctttccacatcaaaaactcaggagattctttagtaaattagggaggtattaaggggatgaaattagttccttgtataaagaaagttcataccacaaaactagttatagtttccctataatgaaaataggaagtattaaaaattaattggagcagtgaagcctcctagagaatctgtcaccaatggtgaaacatgtaagattatttgatttttttattatacttaggatattttattcaaagattaaaaatatgacaaaaatcatatttaaaacaccacatatagatttacattggaaaattcttcatttttcatgtaaaatacagatttttcagagagcaaactcgactttattaaaaagtgacaacttattctt

SEQ ID NO: 50911 - DNA, 529 bp, Homo sapiens
tttatcaatttactatccaccagccaggcttggtaagtaggaatggttcctactctacattttagtcctgagttttaatgtaagttattaacaaggttgggggctagaaagaggtatcacatctgtcctagtgcaacatagagatgttaaatattgcacccaggatgactcagcgatctctctggacttggtcattgtgagctgcctcctagctgcaagtgttagcacactagctaggagtgttttctggaccattctgtgaacagtggcagtttaataacatgtggcagggcaccagtggatgatctcatgtgtgagtaaccactctgaaatcaccttagtattgctgttgattcatcggtgtgaaaaaagcaatatcaaagtaagccatgtaggagggtggaggcacctagacgttgtgctgttatcacagcaaaagttaacactagggtcttcctaaggcatctgcctatcatagtgtttgtttgaagttctgaagacaccagaacttttacaatgccactctaga

SEQ ID NO: 50912 - DNA, 1084 bp, Homo sapiens
ctaatcaaacattcttgaatggcaatgacagtcactaaagttgacacttcctgcagtcttttagtttagaaaccacacttcccgagacgtcccccatcccaacagggataaaatcctctagctcaactcaggtatatccccactattgggccagggagacctgcggatggcgagagcaggttctcttaggagggtgtggattgtgagcttgtgcgctggcgaggagcagaaggtcagggaggcaccgtagttaatgaatcaataaaccaaacagccgatcaatcacttcctgcagtccgagtccggcgagggctaatcgattggtccgggtattttgaaaggaaaaacggcggtggatatgttgtcaaacggaggggtgcaggagaggcggggccaggcctccaggtgacccctctggcttcctgggcctgcagaggcgccgaaacgtgcaggcgccggcgtccatgaggcgtggggcgcgccgggcgagtccctgcttgcaggaggcgcccgagaggccgtcgcgtaccctggcaagaggagctggttagcacctcccgaccccgagaaggcccagggggcgcccggcgggcggggcggggaccgggcgaggcccgcctcccattggccgcatagcgccgcccagcgcgggccgccgttataaagcagccgccggcgccgggtgcctcacagcacgctgccacgccgacgcagacccctctctgcacgccagcccgcccgcacccaccatggccacagttcagcagctggaaggaagatggcgcctggtggacagcaaaggctttgatgaatacatgaaggagctaggtgaggcacccggcctggcagcgcctgcaacgtggcgtgttgtgcggtcgtctgtccctaggtccccgtcagcgtgccagattctggggcaggagatgctcggcggcctacccccatcccctcccatcttccccaccacgcggccgttgggtgcagcgcgcgcagcaccacgcgggcaggcggcgaggagcagggagcgtgcgcgcctcttgcccgcccgcgggccgcaagattccggaggtggtccaccccgtgg

SEQ ID NO: 50913 - DNA, 926 bp, Homo sapiens
ttatttcttaaaatgtgttgccctgaactaaagaactcttcagatgaaagttaatctgaacaccacagcacattattgtaagatattagctatcacagacagctatataagcagtgattatttcagtctgaaatcaattaaaatctttaagtgttttctgaaactacagggaactcctagctgacacctgagttaaacatgttaacgttttttaaaagtaaaattatactttagttttgtttcctatagcgagtcttttagtttctcattttcttagcagaaggataaaaatgaagcatttattataagaaaaagcttttttttcctgtaaaatcatttaaatttggttttaaaatctcatacaggcctaatcagatgacattcatttttctctgtgtttagtcctgagttttgaaagtaacaccctggtactcatggccttggccctccctgggcaggaagcctgcccaggccctaggtcagcatgggcactcggtgagggaggtgcaggaggccagctggggaagaggccactggagcacagcagagccagattgcccaagtttccctctaggccaaacagacacgaagattgcatgagcattattattggcaaatcgggaaccttgcttctctactgcgtgctctgaaaggaggaagaatgctagggttttttccctggaagggagaaaagagtaaacagacaaaaaagcacatcaggacacattcctcccagtcctcctcacatactgaggctggaatgaatatgagtcagaggggagtctcttccatatggacctaagagggtgcattgcaattagagtaagaattctgttcattcatccttaggtaacggattttgagcaatttgcaggtctaggaaaggtaacagtagatgtgaggaagacccagtctgtactcgcagg

SEQ ID NO: 50914 - DNA, 1026 bp, Homo sapiens
atatatacgtaagtatatttatgtactatatataagtatacagaagtatatttatgtactatatataagtatatatactatacataagtatatttatgtactatatataaagtatataagtacattttatatatatttttatatatagttatatataatatatgaatagttatatatatataaatcacagtacatttattgatgggcagggtccgtagtttactcactttcattttcccaaagccataaacacctgaactgtttcctgctgtttctgtcctggtcacagccttccagcgtaggagccaggccaccttcctttttgccacctgtcccagcaccgcgactgcgggcagcacaggacctgggcgctgccccatcacttagagtgactacctgggcctggggatgcaccaagtttctaggagcttttcggagttggggacataaaaaggggcaattattccacagaagccgccacagaggttaagtgaggtcgcgtgagcgaaccgctactccaatgccggaactgttcccggtcgcccagggcagctccggataacgcagcaggcaggggtcacccagaggctgcctccaccctaggcgccgaccgcgcacggcgctcgcgcccgctcctgaggagggaaggggcctccctggaaacccacagcgcccgctgaacccggagggtgcggtgaggaaaataacggtctcaccttgagtcggaggacgtccggctagctctgtgaacggtgttaccgcactcgtctcttccggaggtagaggggctactcgcaacaggaagttccgcccttaaaaactccattcctgagggggcgtggttgctttgctgggccccgccccgagctgcgccctgcgagcctctgccaggccgggccgggtcctgacccgcgctggagcatgggatactgcctcttcattctagcttctggttcttttctcctgcttgtcttttcatctctcagtttttaaacattacttctctctttactttgcctttttctt

SEQ ID NO: 50915 - DNA, 2114 bp, Homo sapiens
ttacaaacaggaagaggcagcgtacaaactttagcaaaggagtacccaaacagcaaacccaaagcaggaactaagagacccaacagaatcacctctagattatctgtttttaagaacactaatcccactgtgaaagtcaaataaattcctacgaacattaaaataaaactcagaggtctaattattctctctaagaagcttgctttttcaggtattctatgcttgatgactattccaattgatactggcacaagtatgaaaaggagtgttgacacaattttagaaacaggaatatggaatgtacctgacaaccctaatatcctactgtatatataagaattgacaggcatcatgatcagagccaataatgttgatgtgcaagtcatcaaaatggccaatgtgaaatctccatctagaagcagagcaaagagatagcccccaccccctcctgggcacgtgcaggtcattacaactccaaaagcttgcgcctcaggcaatgccacaatctgagacaaaagaaacccgcaaaatggcatcagaaaaaactgtgtaactgccccaagaattactggcaaaggtctcttccatactgtttgaaacagctgtaattcaatcttacaaccaaatgcacacttattcaatagtattagtggtaaaataagcattaggatatttctatcaatatgcattggtgcctggagtagactgtctttttgtttgagcactttgactttcacattcttgatttcttcaatgagtctttcttgcctaccttcagaatcccagagttgaatagtcacatttgtttctccttcttcatcagtcaccagatttatggtaaagtttgtagcatctgatgagatcttcttggccacattcaccatttgtagtattttaggatcttctattttcacaaagaggtggctggaattaggccgtttattttcgtagcttgaacttacaaggatggtttcttcagtctttgtgaaaaatagtatttcagtcttctctatattcagaaaactgagcgatgacatccttgcttcttctatagtcacaagcaacaaaagtagaacaataaaaagttttctaatcattttgaaagctgaaataaatcatatatgcaaaatcgtttttaaaaaatgaaagaacattcttcatgcaggtgttccagtgacagtctgagggtgagttagataacagttgtttttgtaggatcaaagtccagtaggagggactgctgtacttttaaacaaatatatagccatctaagcagcaacacaaccggtttaacttgtgattaagacaattaaaaagtcatggcatttaacagattcgatttatcacaacagaaatctaatctcttcctcttgatttcctcatttctgcttatgcgaaaaaaaaaagcctcctatttacttgaatttaaagcttagtgtcatcattcgttagttatttcttgctaaaaaaaaaaaaattaaaagcagtcaggatcaagaaatctgtaacagacactgaggaaacctagagttcagtgttaccattttgttcaatcaagtcgaagtcaaatcaatattcactgaatgtctctttgcctagggcatggaattgggagctggccatcccataatgattaagccagatgcagtcgctgctctcctggagcttagtggggtgacccaatatcacaagttagaaaactgcagagcccagacactggccttggcagcatcccttggctgctaatagttttcctgcatctctgaaggatgatttaatctgtcaagcaaaaactgacactgttttttgtatacctaagtaggaaaaaaaattcctgaatggttaccagataacttggggacatagggaaagtaggtagctggtgccacggccaaaggtacaggctggttaagggaccacagctactggacacttggaccctgacacgatggggcaatggaaagacactggcattgattctaatcttttattccttgtttgtaacactactctctgttcacagttaggggcaagggcattcaattgacccaatttggtcatatcccttggttgccaggaatgagaaaaagcatcaggctttttggatttcaacc

SEQ ID NO: 50916 - DNA, 1803 bp, Homo sapiens
ggaactccactgaaactgggctaaatctcaagagtctttgacacggtaattcaggcacttgataccaatgactgaagttccaaggggagattaaacctgtttgctaccttatgtagtgtgtgaaacctagtaacaacgactgagcagtctgtgtggttctaatgcttcaaaaacttgccttttcaaggtgtatggcatcctgaagccaatgccacatcaccttggactaggtatatcccaaggtctctcagtgcaatggggagagcccattgccatattattaactaattctctctaaaatgcagcttactagttggaaaggtcttccgtgtaaaagactgtagtttacacccttatgtggtccaagcaccaaaatcaataatctgtaaatgtttgttcaaacaataataatgagaatcagggaatgacagagctgggagagcatgatgaccatttggtggaataatctgaggatcaggatgcctttgagaatttgataaaagctaaggaagggccttcttccggacacacatccacgtgaacactagttgggcgagttgacctcccccaactcctcctgacagctacgtaacagataagtaaaaaaaagtatgggaaagtagctggccgtaggtcgcagtggcaaagccaaaagacaacagtcccagaccaaacctacgcgtccccatacccgcgctcagcagagtaagtgtgagccacgcgatccagcagtgggcttcgtgcactgctcggacacggcacactcgaacaccaaaatgaacactgcaaggtacgttttcaggaattgcatggcttccttccaaggagaccacacgtcatttcaaaagctcacggccaaaaaaaacccgcaccaaccgatctcactgcagccccagaagaaacgctcccaccccgctcctcaggccctgcctcaggaattgcatggcttccttccaaggagaccacacgtcatttcaaaagctcacggccaaaaaaaacccgcaccaaccgatctcactgcagccccagaagaaacgctcccaccccgctcctcaggccctgcccagccttgtggcctcccttcacccgccgccaccatccgcggagccaaagcggagccctggtctcccgcggccggggatgggggctggaagctcccggatcacctcgctgccggcaatgctccacctggcagtgctgcccgatgtccaactccgccatctctccggcgccgtaaggggcggggcaaagcctgaggggcggggcaatgagcgcgcgcggcgcctgacgggagagtggcggacccagaggcggagtctacaggtgggggcggggcctggaaaccagctgtgcgatttgtcctaggtgcattcgccgtgaccaggaaaggccactgttctgtgagtgttcttctcggagcggaaggcctctcgcctagtccttaaagaaatacccacctgcagccgggcgcggtggctcacgcctgtaatcccagcaccctgtgaggccgaggcgggcggatcacctgaggtcaggagttcgagaccagcctgaccagtgtggcgaaacccccgtctctactaaaaatgcaaaattagccgggcgtggtggcacatgcctgtaatcccagctactcgggagactgaggcaggagaaacgcttgaacctgggaggcggaggtcgcagtgagccaaaattggaccattgcactccagcctgggcaagaagagcgaaactccgtctcaaaacataaaaaaagaaaatgaaaaagaaatgcccacctgcctttctggacgactgctt

SEQ ID NO: 50917 - DNA, 1805 bp, Homo sapiens
aatgtttctcttctccaggatattctctactttttgttacttaagtatctatgtaatagcatttgacatacagccaaacaccagggcagccccatttaaggtttttgatacactgaggatcattcagaaaacttcggattcctagttatagagttgaatccaaccaccaacacactccagaagtcctgacattaggaaaagagatggccaccatctttcacccacttcaagtcctgtaaggatgatctagaatctacactgtgccaactagcatccaggcacacatcaacctgcccggactaccaaatgcagaaacaagcccagtagcagcagctgctccgagcttgcccacacacctgcatcctagtggcagacaaatatcctggaagcctttgtgtccacacactcatacctacatgacatacacttagaggaaaagatctgaatattcttattcacaagaacagaggcctgaatacaggaacactatgctcacgtacacacaaaagacacgcatggaataaagcattttgcatatccagtcttgcgcacttacactttcaggtcctgcacaagacccctggacatcggtttgcttttctttgagccattcacaaactagttcctcgttcctgggaccgtccctagtgtggataaaagccaacttcccacagtctttgtcggtcttttcaacttttctctgctctcgctcaactcccagagggccgggtggcgccggccagccgacgtcccagcggtggcctccccgcccagccgctgtgcagcggggcggggccgaactggcagccaggaaatgccctggagtgtgtgtcacctgtccaggacgacttgttgattcccaggagggccgcctttccggtctgggtccccgagaggactgccttgctcacctgtcccctcggcgcggccccggggagctcccgagaggcccccgggatcgctggccctccgaactccacagcaatgagcaagttgggcaagttctttaaagggggcggctcttctaagagccgagccgctcccagtccccaggaggccctggtccgacttcgggagactgaggagatgctgggcaagaaacaagagtacctggaaaatcgaatccagagagaaatcgccctggccaagaagcacggcacgcagaataagcgaggtaggctggggtctggcccacaggcgggagcccatctgcctctagcctttcccttggggacaatcggcccacaccactgaggtccccaggtggccaggtttgctcctgcagtcttttctaggaactggtactgactcttagggcactgactagggtgagttgagctagacactggcactgatggcaaaatgtaaggggccgccaaaaatctcagtaatcaagatgaacaatactttaatgcaatacctaaaggactcagaaccaatgccaaaaaagaaatgatgaagaaaatatcaaaattttaaataaagacaagattggtattgatttttttcatttgcctctagctcttatgttgttatgtgcagcacatctttatttaaaattattttttataatgtgatgatttgttcatcgtggattttttaatattaattttgaattttaaaaatattgcattaaaatattatttgtcttgattactgagtgttttcgcacccctgtaaattttgctcctggtccagctttttctaggccagccttgctgactccaacactaaccatgaagttttctgctgtatgtttgtatattaaattacacattttaacttgcacgtaaatcttcagaaaa

SEQ ID NO: 50918 - DNA, 1620 bp, Homo sapiens
ggcctttgccactctactacctgaggccgcctggctggggggaggtcgcatatcaatacatatcaacacaaccactgacgtccgaagatgtgagcgctacccaagcgttaaaaaaacaaaacaagcaaacaaacaaacaaaaaaacgtgctgtgctcattaggagcgtcttcgcctctaccctgatgcggagttgctcccaggacgctcagttcattctcactctggaaaacctcaggtgaggtggcccgactctgagcaaccccgtgggcgggaggaaagaggcaaataccaggcacagttcgaccctcggaaggtaaggccggggtctgcgccggtcacgggtcttccgcactgcaggcggcgagacccgcagctccctgggatcacagactctcccgcctccgctgaccggtgcgcgcccagcgcctcccagacgcacagtggggtcggcggtggcctgaaggtggctgggcttcctgcggcgcctctccactctcccgcggagccccttgccgcccgccagacatcaaggttgcaggtgtcacccgtacgagaacccgggacagcgaccgcctgtcctgaggtaatgacccagtctttacctcagccccctcggcgatcccgaacgagcgcgcttcccggtgacggttaaaccggactctccttaaccgcagcttttcgcctcctccctcagcagcgagaagcctcacgtgacacccccgccccaaaagcagctgctccccgcctcagccagtctctgcccgggcccaagatccctgctgtgtggaaggaggggccgaactgggcggggggggggggggggggagagagagagagagagagggagggagggagggagggagggagagagagagagagagagagagagagagagagagagagacagagacagagagaaagagagagagagagggcaagagcgagagacagagagagagagagagagagagagagagagagagagagagagagagagagagagagaaagagaaagaaaacgagcgagggagagagcgagagcgagagagagagagagagagcgtcacacacacatctctgccggaagtgatgtcacggcatgggcgcccgcccaccggaggagcgactggagttgatcggctgggcgctcaggtagcgaagataaatgtaatcttgtggcaggaaatcgacattctctgcactatctttagttttccaactgaacttctgagaaatggaggctacaatacctagtttgccaaacaggagaagactacaattcccagaaggaactgcgaccaacattggtccgtgctcatactttgcatcatgggacttgtagtcatcaccagcttgcgctgattctaacaggttatagattgttttctagaattagcagcgctttaagggatgacaatcgattagaagagtaggaagatagaacactgcttagtagctgatccgttctacataattcagaagttctcattggcagagaacccctgaaattctgtagtgtctttttactatccggtgagcaatttgatcccgatgatggaatattagccttgttagacatgcgcttctgaagacctgtgcagtagggaaagccgagttt

SEQ ID NO: 50919 - DNA, 891 bp, Homo sapiens
cataataactaagttttaagaatttatattcatattctttgcagaaaataaaatagagtaatgtaagagttgcttaggtgggggaagtgaagcaattatagattggggtatcaaatcaagtttttctgagaatgtgtcatgactgctgaaattttagtgtctacaagaaaacaaccttgcaaaaatctggtggctgagcttccaggaaaactgcctcacaagaaaaagggaaacttgttatcaaaagtgctcccttttccttcttgtaagagctccaattccaggaagtaagtgctagatgtttctctaatcacatatgtgatccatatgtccctgagacattagatttctaaatttaatacccaattcctcctcatttcaaaccctgacttccttgttaaggaattcaggcacttgtagatttttcttttcctgaatattcttggcatccctaaaaggcatattcaatgctttagggaatctgttctggttgttgttccctgtcactgttgctggatgaggtgctgtcattgcctttgccgctggctgagtcactgcttgccttgacagttctgcactagcctttgccctaaaagagattagtcatgcagtgtctcttgagttaaattctgacactatggatgcaagctagagagctgtcggtaatactacctacctccactaagctggagactcagtacaagtcaactgaaatggagaagcttctttaatttttacatgaatctgaaagtattacagagtttagtgagccagttctttcagttttgttcacaatcctcttctcctcagggagcaccatactgcgtgggtggctgagttggcagaagcttctgtaacaactgtctaatggaccttactggcagccaactc

SEQ ID NO: 50920 - DNA, 437 bp, Homo sapiens
agagcaaagacactttgacaaaatgaagacccacttaattacttaatgggactgcaaaataccaggtgcagccataaaatgctaaaagttcatagcaggaaaaccttttggtgttacaaattttcatcaacatcgtcatggagatattaacatatgccttctaaaaccaggtcagaaattacatcatgcctggtttgtggccagttgttggcaggctaggagtaactctagagcgttaggcaacagacacttgtcatactcaaagcatcttttctctgtgtgattgcataagctatctaactggaaaggtacgactcctgaagctgcattggcttggttttcccagtgaaaatttaaaataggcaaaaatgtttgctacaaacatcagtttgtggatatttaaaacttatttgctatttaaagaacaaattattttg

SEQ ID NO: 50921 - DNA, 671 bp, Homo sapiens
ctatcacaataggagagagaaagaccaaaatgtagtctgaacttgactgtgccaaaacaaagggtgggaagacttttaagcgctggggtgagctggagaccagaggccatcagtgtttgctaattagcttcacccaaaggaaaaataaatgttctcttattgttgtgacaggaggtagtttcataattaaagcaaggctccagcagaagttaggcttccagcatcccacaaaattgggaaacagcagcactatctcccttgatgtttacatttgaaagagatggctgccaggtccttgagaaagagattcctgggttgtaaaactggcaagaggcttttaaaaatatttacataagggcataggaaaaatttactattgcaagttttttaaagtaaagaaaaaaatgctgtaagaaaagggaaatcagggcctagtcagaaggaagcaggtacggagtttttccaagctgaggagaaccctaaggtctttttgatcaatgcttatttctcattatataagaggagttgtaaatggctaggtgagtgcaagaatgttttaaaaccagttgatttgtattgggaaattgcgttcagaatattttttttttatttatctcccactagtagagtatgaggatttccattttgctatgtgtgtgccaacatgagat

SEQ ID NO: 50922 - DNA, 648 bp, Homo sapiens
cttattggtatcttcagtttcatatgaggataatagtagtatctaaaactcagctgtccctgaaactcttggctgggcagggagtttactaattcctgttaaaagcttgactggaaaattaataattctgaaaaacatgctatcaattcattattctaaaagcttctcctgtatttttcaagtcctgtcaaaagctggctctcatagaaagcaaggaaggtcgccaaaatgagagcaaatagaggccactcaatcagaccttgttataacaaaggtcaccgaccttcacttgtgtgactcacagaagtcacacttgtggcagagactcaaaggtagacagagaagtgggttaactttgtactaaaaaaaaaaagaatctgggaagacctcagttttgctctgattggaggttgttggcatggggaagctgtaggtgggcaacctagaatgggaggcatcttttatgtttggctagggaacataattgactttctctggggttggccctgcattcaaagcagggcaaaaattggggaagctgacagtccttgaccaagtcctaattctcctgcattgattgctgcagaggttgtgcatcagagttctattgtcacgtatgatctctcactccccagatattacctacag

SEQ ID NO: 50923 - DNA, 2367 bp, Homo sapiens
aaaaaaaaaaaaaaatctatacacagggttctgtatatcctttaggattctcctttaatctcatatacttttgtagataatccttttattaaactttcctaaattacttgcttttcccgaagattctgttcatcatcattatacacaaatgttacatgagaatttcatgcttaaaataagttttctcttttgaatgcaaaaatcaatatttttctcttcctttcatagacattgtaatcaaagataggcaacatagcctaaacatttatatattaaagtgaaagtttgggcaaaccattttattaaccatgaaaatggcacagatttgttttcctaaaatgaccaaagcacgtgttttaggattaaaatagtgcctgaaattccaaaggaccaattttaccctgagaaacaagttcagttattttcaaatcattttatttcctaactttaaaatgatcaattgattgattgtttctgtgtctttgttctggaaactattatatcgttggtatatctaataattattcttacaaaaaaggaaaaatgtactgcagtgagaacacatactctttttaagattactgggctactgcttacattcttgcctcctccccttgaatctagttttcagacattagaaaagtgtatccaaatattccttaagtattctcttaataaaaatcctgctgttttctatttgagcttcttttcccagggtagattacagaatctacctcatctacagaatttagaaacattaatgacttcagatcaccagggtatcatgtaatgtccagcagtaagttgttagagactgaaatatgactgaaattaaaaattgcttcctgagatttggagtttaaagctgatttgagcaaatggatttgatccatagtagcatcataggctaatttaatcttgctggaaaaaagtgtaatatctgatatgtgtcgaatacatatggacgagtagaccagtgagttccaacctgactcgttattcttattgtgtcaaataaatagtatttgattattaattaattatattttaagctgagtataaataatattctgaactgatcaagaaatatctatctaatgtatctgctaaatttagaatatcattaatatctggaaaagatgaaatacaaagagtgcactttgttctgagtaactcattactgactcattatcatcatcaaaaagaaactaaagtgggttaatgaataatcttgcctttgactgtactttgtgcttctaatgatcttacctcaatgagaaaataaaaatgcttactttaagatctgtttgtaggattcccttaggaagacaaccttctttgtttaggaatacaccttaatgagtgtttttggttttgtaattaaggacttctgtgcgtattctaaattggatagagcaagaaaaacagctgaaatgctttttgggagaaaacacagaaaagtaaacagggatttttacaggatgtaagcaaattaatcaagaggagatgggaagaagaaagccaagaaatgtggtgataagagagcgttcaagataggggacttttggagttcctattgtgttgaaaaaagaagccattttctggagatcctagtagaaagtagaaggactagtgatagcagagatgacttttatatctgtacagatttctcattctgagtaataaagcacagctatgaaaatatgcccaaagtagacttaataatatttgttgtaattaattttatctgcaactgatggatgaccttataaagtaaggagctcataaaatagagatattcagagaaaaaaaagtctaaaataaatagaaaatttccatattcctgcattgtttttatactattttaatgtttagtattatctgggcttacagatctctgaacatatttactacaaaatacatactttgttatcatagccaagtattataaatagcagaaacaaagttcagtgtgctagcaggagatgtagaagccttggccaaagcaagataaaaagaagaattaggatctgagaacaggtcaatttttaagagatgattaatgacttttataaattacgttcttctaaatttcattgttccattttcactagattacatagaaatacaattttttttgtatattgactttgcatcctgtaacattataaaattgaagtatttgttttttaggtttgttgtagaattcatgagtattttgttgctgttgtttgtttctgagacaggatcttgatctgttacccaggctggagtgcaatggcaccatcatagctcactgcagcctcaaattcttgggctcaggtgatcctaataattcagcttcccaagtaactaggactacttcta

SEQ ID NO: 50924 - DNA, 431 bp, Homo sapiens
tttagcttccttgatttgtataactccacttacttttgattttggaataactgtctggttagtcacactttattttctctgtagactgttctttcacttcctacatcttaacgctatttcccaaagttcccttcttgtctcgtaattttctcactgccttcagcatttgtactgcatactctctcttcgtgacctcatccttctccttgttgttaaagaggcatgtagtgttgccataaaaatgccttaaccatgacatcatatgcagtgacttcccaagctgtatttctagatctttccctcgagctccagactgaaacatatccaataattgcatcaaattcaaaatatccaataactgtttttcatctttccctacaaatcttgttttctaatctattcacttgcccaggtcagaaatctataagtca

SEQ ID NO: 50925 - DNA, 806 bp, Homo sapiens
ctgtgaaaaccgccttcagaagtcagtcggctactaggcaaatatacagaagcacacaggacaaatccattcattctccagctcctacacgcccgggaagcagttttactttacagcaagttcaagagtcgcaccgcagatgctgtaaaaacgaaagaagcccacagttgggacgaggattccagttttgcgtcaccgtcaaggcgggaaagttcccggctgtcggttggagggtgggtcctcgccccgccccgccccctcgggccgcccttccgcgcttccgggaggcttgtcccaagctcacggacccctcgctgggtgccggttaagaccccgctccccgtcgccagtgctatggaggcggcggcggcggtggtggcggcagaggcggaagtggaaaacgaagacggcgacagcagctgcggggatgtatgcttcatggacaaaggcttgcagaggtaaagggcgctccgcagccaggagcgacccgcgcactccccagagccggggccacgagtggctggcggcgacaccagagtggaggcgcggcactgctttaccaagaccataagtgaacgcagtctggctttcggcctccccgctcctccaaaacttacctgccgaagtgccaggttgaatgagccgtggatgccttcccgcccgtgtctcctgcccagcgtttcacacgactctgcttagcctagaaactgccccaggaccttgtcctccaccagcttctgaccactctttccttctgctggttttccttacttactggtggttattcctttgcttgccgtttaatt

SEQ ID NO: 50926 - DNA, 1953 bp, Homo sapiens
ccttggaaaggattgatgaaaaccaaccctaaaactccacgatgcctttttctgtactccgaatctaaaagggtgagctatgaagtaaaactctgcacttggtccaagtcattgaaatatttgcaaacgatgctagagctcgaaaagagcaaagatagcagaaaccgtccagagaaagtaacctactgctgaagctctgcaaacttgagcagtcaaccaacttcaccgctcacaaacgtttggccgctaggcattgtgactttctgcccagataaaagtctttttttcttttgtctcctttttttcttcctccctgctttgccgcgtgagattaccactcctcgggtcagctcgcgaacgccagggaggcgagtgtgaaacacacgcgccaacacccctcctcctcctcgtgcgctcctccttcctacagaaaaatgtgtttctaggcaacggcgggcggcggcgtcacttcctgccatttaaactcaggtccccacccctcgcagccccttctcctcgtttccacccctcccccctcggtcgtgggcctcattcacgcttccccgggcttggggagggggcggaggcccggcgtgacaagcggcccagactcccgtgggcgccgcacacctgttgtttgcagcagccagcgacccgcactaccgctctcggcgggcggggaagcggccgcagcggagccgacccggcaggtggccgcgggcggggccggcgagcgaaagtgcgcgggggcccgaccaccgcggggccgggacgcgatggcggcggcagagcccgcgagctcgggccagcaggcgccggcagggcaggggcagggccagcggccgccgccgcagcctccgcaggcgcaagccccgcagccgcccccgccgccgcagctcgggggcgccgggggcggcagcagcaggcacgagaagagcctggggctgctcactaccaagttcgtgtcgctgctgcaggaggccaaggacggcgttctggatctcaaagcggtgagctccggaggcggggacgggggcggacttcggaacccgtggcccccggggaagcccagcccctcgccgcgtgggtctagcggcgtggtgtagacgcgccttgcggggacccgggaccgggcaatccgaggaccatgtggcctgcgcccgggtcgtggacgccgggatgggggagggacgagggaccaggatggcaccgagcggacgcgtaaccaatggggcccggcgccacgctgggctctcgacaaagagcccaggacctcgagcgcgcccgcgtggcttctgtctccgggcgcagggacctgagggtaaccgagtgtctgttgctctgcgtccacctgtggcagaggctcacggggtaacgggcgctttgcccggagacaccgtggatatcgattttgctgttaagaatggatggttttaataggcgattccagttggaaccatgttcctgtagtttaaataaaaaggaggaaaaacaaaacccagtctgccatctctaccagatgaaagaaaaaaaaaaaagagtacttctttccacgcccctccccgataaaatagtattaaatcttccttgtgcacttctttcatcaccctgatagttaggaggggtatttgatttgtgacttcatttggcatgtgtcatgggtttccaaaagtgagatctgctgtcacacgaaaaggggatattttacaactttcacccaaagaggtggaagtgctcagtaaactctctccctgcgtcgtcctttacagcgttcagatttttcaaacaggagcaggcatcaaaagctgttctgtcatacagaatgacttaaccgatctaggaaggatttggaagaattcaacagcgctcaggataatgagaatgtggtcactccgcgcgaagtttaagaactaaagttttagaaacaaacaaacaaaaaacactaactgccca

SEQ ID NO: 50927 - DNA, 617 bp, Homo sapiens
ttacttttaagtgagttttagactttcagattgttttgtgttactccttagcatcctttttttttttttttttttggagattgaagacttccctttaccattttttgtaaaacacttctggtagtcatgaactcccttatcttctgtttttctggaacaggctttatctcttcttcatttctgaaggacagctttgtggggtttggtattcttggctggcagggtttctttcagcactttgagcactgaggcaggccagaagcttttggcagatgtggccagcacaggagtggtgcaatctgaagccaaagttcactgagatatccctggtattgtgagctgtccagagccctggactgctgacatcagcctggcattggtgcagcccagagattgagtttgccttgaaagcctgaagcctcgggttatgtgatcctgcttggcaccaggctggatctagagcttcagtctatgcgcactagcctggaacatggggttgtggtggtctcaccagtgttaggttttactttggcaatcctagcattggagctaaaggtatggtgtctctctccttgctgtgcttcctagggttgagggaaggatgacggggtaatata

SEQ ID NO: 50928 - DNA, 2647 bp, Homo sapiens
ataaaataattacaatagtaaccaaaatccaatcattcatctagtataaatcaattgctatatgccacgtgtggtagagaacctatattttatacacaaaaaatatatatggaacataaataatgacagtatatatacggaacatacacagacatgataggtatattgtacatgacactacctataatatacacatggaccatgaacagacagtctacaagtggagaggtttactagagctgtagacctgagcaaggttcgtggagaaagtaatacactagtgggggtgtgcgagtggagggaaattctctgaaaaccacgtagaaactgatcatgaaagacacagcccaaaactgggaccccgtcaggagatgaaagcccaacaagcaccggggtttcgggcctgctacccagtagggctgcctgaggcagagcgcgacggaaccgagcctacaggccacagcggtacgagaccggcccaatccaaccccgacccctgcaaacttcacgccagccctccagaaaacttaatttattaaactctcaccagaagtttaacacttgcgtgcagctttttaagctccaggtaacaccatctggcacgtacggcgtctaggaagttccggggaggatgaaccagtcaggattccgctcacgagccgtagctccgcccaccgaacggagccccgtccataggcggaagtcccgcccatagagtgagttcccacccacctggcgtagtcccgcccatagagccaagtctaaggagcaaggtgcagtgaaaaagcgaagccccacccatagagcgaggttcggaagtccagtctcattagcatcccttgtcttccgcggtgttgcagacttatcctcagctcaagcgagtttggggcgttatggagccagccaagtctccccttgctggcgtgggtacttgtgcagaaacttcccgaggtgcttctgagactgcacagtgaagaccgccgcaccggaggtcagcgctccgccgcggactcccggctgactctgccactctcccaggaggaggcgctgtgcacctctgggtggtttccagggctcggctggcggtagagggagccttgaggttggaaaagatctagagctataatctccgaaaggaagatttgtaatgcactgcgagttagaaatgtttttctcactgcagcttccttgtttcaaaaagagaatttttgacagcactgcaaaggcacaagaaaccaggcacagtataaaatatacaaataaaacaggtaccaaggaacttaaaacattcaacccataacgtcgtctaggtttttctgctttaagaaaattgactcaattcttccaagagaataaccctattaaaggtaagttttcacatgtgcctctatttattttgttgaggtcataggaaaagctggatttcaaacaaacgtagatgtaagaattaaatagaggagagaagcacgaagggtggctttatagtcaacagggacaggtttattttaaataaacctgagactggcagctggccaagttaggtcagagccacactctcttacagactaagagtttttaaggattcagggtgggagagtttaacagaggcttggactgcttctgtgtctctttgctgtgcttatctgggagggagagttgtgtgtctgttcccatacatctttctgcagctgcaggcatacccgcagctaaaagtctgcttttagcttccctatcttagtacacctgaagggaaaggaatgtgcttattaaggcccactgtttcactggggctcattgtatgagggtgaggtttggtagttagccaagagattttccccctacttcactctgcctgagctgtcttatctgtgttttactgactgctctttctatctgcttgtaattagaagagaagtgatttccttgaaattcatgaggctagaaagggagctggaacttaaaaatggcggtgtttgtccgagatgacggtgctcctgctctgtcagtaaaactgacatttatatgccattttgtagcttacaaaagatttcagcctacactatgctcaaaataaggtgataaaaccactcctgttttgcaagtgatgatactactaaggttcagagtttaagccgtgtgctggcagccacacaactaactagaaattgacaaagccagacggttttgtaaaactaagcatttttttaaaacagtttttaaaaaggttttgtaaacttgataattcgcaaatccacattggttagcacttggtcaagtcctctttccaacaaaccaggcacttgcctgcttacagaaagataagcaatttttgcaataaatcatttaattatgcccatcacaaaaaaaattaaggaacagaatatactaaggggagaggaataattgcttgccaatgtatgtttattcaaacttttgtattctttctgacgatccacctgttaaaaacacctaaaaatgctggtataaaatgcccataaagtgtaagagcaaaacaaaaacagaaaaccgttagacttttttataaggccagagttattcacaaatactgaggtgaataagttgggtacaattatttggttctttgaatgtgaggctattgatatatatatacagaaggcaaagaaat

SEQ ID NO: 50929 - DNA, 1734 bp, Homo sapiens
aggcagttgacccgagacaaggacgtagaaagtggttcatgtacccaatttttatttttcactttgaacccagaacattcacgactccaggccagaaattcaagactctgcagctagttctgactccagtcctagggtaacaagcccaccaagaatccagggcagatgtcctgaaaacccttcttgcggggtcaggagggcagcagaattttgggaccaaatctcaacaactggttttggtttcctcactcaccaagccacaagcctgcagagtgagaagaggtaaggaaaggatgaatgggcaatggagccagcccaggaccgggagctggtcctctctaacagcgaccccgcccgctttagctgagcgacccggggcaggttacatagtgtctctaacttaagccacgtgtttctcgaggaaatgctgagaggatctaatgggaaaacgtgggtacacgtcttagctaagaccctcgcccacgataagcccttaataagtagttatttttcagtggtggtgattaccatcgtcattattgttttgtatttgtaatcatcactgccacgaccatcaccgacctcttttacgcctccaccgggatccccacctcccagcctggcagttccaggctctggtgactcattcacttcctggaagtcctctaggcaacactttcctctcccgagtgacgactcctcagaaggcaggagatcccccccggaaacctttctctctccgtctctccctctaactcaaatctctcattcccgagtccaaactaagagagactcgcgccccaggagtcagccagcggcgcgggcgccttccccgcacgcctctgccgtctggaggacgcaggcgggagcgccccggaccgggttcacggtctcgcactcctgccgccggcgccccgcggtcccgccctagcaggctccttcccgggcccctccccgctccctcctctttctcgctgctcagtcacatctttctcttccttccaccccgagggaccatgtcgaggctcagctggggataccgcgagcacaacggtgagcgccttttcctgatccaagggggggtttgtgcgggggacgagaggactagcgcgacgccccggcgctcgctgaccacacactgggctcgcacattgagaaactttttcggttcctctttaaactaagcagcactcctgggagcccagtgcgagaagcggagagcagtcttgtcagggtagacgggttgttggtggtggatgtgagcgttggtgtgtgttatctctgtcaggattccccaaactcccaagtgttcatacgtgtgagttcaccttcatctgaaaagccaaggactttgcctagtaacagccacgtatcaattacaggcttggagatcagaagtctgatgacacacttcagtgaaataaggacaagttcgctttcagtcttttaagctcactattcacttaggagaaacaaatcatagaaaatctttaaaaatatatttaggaaatcttaacttgcattgtgacactgaagattaagttggcttcgtggcaaacaaaatactgcatgtttcctaatagttgttactgtaaatattcccacagcaatttgcagttggctgactactactggggactttagtaagggttcaggttctcgctgggaaattaagttacattgtgggttacttctccactcttcttctccacgctcatccttgcagggtgagca

SEQ ID NO: 50930 - DNA, 587 bp, Homo sapiens
cacacagctaaaaagtaacaaagaatttgaactaaattatatggggctgaaaagtccatgacgttccattatggcatgcttccaatagcagcgtgcttgtgggtaagaataggaactgagtgatgatgtaattccggatagtcacaaagagttgaataactgaatgcagggaatgttaactcatggactgatctcaatcttgagggacatccccagagttgtcacagggctctgagaatggctggatcccatttgataatcttatcaacaacataaatgaagacagagggcaggatgaccacatttgttgttgacacaaagctggaagtgatagttgatatgctcaaagaaagaatcaggatttgaaaagatctcattagactggaactatgggctgaaattaatacgggattgagggagaactggattaacaggaattcacatgaaaaagacttggatattttaattgacagcaagctcaatatgattcaaaggtgttagccaaaaaagctaaggcattcttatcctgcattaaaatatagtgtctaggaaaaggaatgtaattgcactctggtcactgctattgt

SEQ ID NO: 50931 - DNA, 1746 bp, Homo sapiens
ctttggaagaaattatctttctcttactggattcttctgagaaaagtgatttgttaaaagttttggttatttcaaatcaatatgtactcaactaggacgtctcctcacccacgttaattttttaaagaggaggaaagtaggagaagatgagcgcttcatgtaaggctctgccagcctacgaggaaatgcaatcctccaggctcgcccgagcgtgggctgcgggcaggggactgtggggccgttgtctcgttttattccacggccgtgcagcagagggcgcgtgcctctcagcactcatgctgcgcgctcccctgcgcctctaggatcgtatccctatttgccccaaggtcatagctcctaacccagcttgccagccccaggccggggacaccagagactgagcccttcgcgctggagaccccggcgcgggtggggcgggagggctccggggccaagagacaggtcacaatggggacaggggacgaaaggcgccgggggtccgggtcccgagcagtccccgccgccgccagactccgcagccgggagggggatggggtgcgcgtagaggctccgcggcccgggttggacggaggagcccaggagccaccgcagccgccgcacgcccagagctccgagcttcgctgccagcccaggacaccggggccctgccgtgggccgaggggagccgggcggcgggagaggagccccggagccccggagccccggagccccgccgggcgccagccgagagggcgttttccccgcccccggagactcgcccgcccggcccgccccgccccgagcgcggggagttcacctccgcccgtcaccacctccccttgtcgcctaggtccacccgagccccctcccccgggccgcccccgagcacgaagttggcgggagcctataaaagctggtgccggcgcgacccgcggacacacagtgcaggcgcccaagccgccgccgccagatcggtgccgattcctgccctgccccgaccgccagcgcgaccatgtcccatcactgggggtacggcaaacacaacggtgagtgccggcgacggccagcgcgggggcgccccgatccccgatccccgatccccgatccccgagcccggatgccggcccggggcccgcagcgcccgcacatgctgtttaccgcggccgcggggagtgctggaggctcaggtgcgccccgggcgctcgctccgctcgcggctccgcggcgccggggatgtcccccttgccccagctgcgaggccactgtggaggaatccccgcgtccgccggaggcgcgtagggcccgagggaggggaggcgcagccctggccgcgggacccgaggacagtccctcccgggtcccgacctggggatcattttaaccggacctaggaggaggcgggaaagggttgtaacggaaaattctagttgttgatcgcagagaaattaagagactcccctcccccctcccccaccttccacccccaccccacccctccagcttcagcaccacctgtggctaaggcgctcagcacgaactgtcccggggcattttccagtgctggtttgaatccatggctctgatttccgagttttcccttcatctctcgacttctaatgttagggggtcggacatcaggaatcgggttttatcttggcctcagatctggttcttcggagccagcggagcagaggagcatgcgtctggcgcacctagcgcatctttggagggtgtggggcttcccag

SEQ ID NO: 50932 - DNA, 1527 bp, Homo sapiens
tggcgtgcccctgtaatcccagctactctggaggctgaggcaagagaattgcttgaacccaggaggtggaggttgcaatgaactgagattgcaccagggcactccagactgggcaacagagcaagactctgcctcacaaaaaaaaaaaaaaaaaaaaaaaagattgtatcatgctgtattcatgtcccagggagggctgcgagagggaagtaccataaactgggtggcttaaaacaatagaaatttattgtttcataattctgtaaactcaaagtcatgagtcaaggtgttgtcatcgcgatgtttactctgaaacctgaaaaagaggatccttccttgcttcttcttagcctctgatgatttgccagcagtcagtgggtttctgtggtttgcagaaccatcattctaaccttctatcctcacatggcattctctttctgtatcttcacaacatttttcctttgtatgtatccacctctgtgtttgaatttcccctttttatgatgacaccagtgctattggattagggccaccctcatgacctcgtttgaacttgattacctctatagagactatttccaaataaggtcacattctcacattctgaggtactgggtgtgggacttctgcctatctttttggagatacaattccacccatgacatgctggctacacatctttcgaaataaccacaaaatacacgaaaggtattatgctcagatttaaggactataccctttggtttacagatttaaatgttttctactatggaagcaggctgaagggcttgaatgggaagaggatggatggttgcacggctgccctggtagatgctgaatgtcctctgggtgataccattagtaatggtccatctgttctcttccagtgccctgatcaccctcctgtggccagtaatcctcaaacctcattttttcttattgaggatttaagctgagctttctttaaatgattggtggtttgaggctaggtgagaatatttgagttggggacatggtttgagaataaatacgtacagatccacatatatgccaactctaatggagacagcacctgggcctgcctggcaggaggtctgtgtagagactttgaccttcaaaacacacactccccattcctctttatttgctgcactaatgcctgtgtggtaaatgtttgctgcactctggattgtgttataacactctacacctctttaatgcctgggaattaaggtggaggtgtcagattaccttgcataaaatattactgtacactattttgacatgtaggaataggacaacaggaaatgaaaatactaaagagaattgggtctccatccttttctttggaaggaatctaaatcaatattaagtattttctttctgcactgaaaaattagagaacttgctgtctgtgacagccttttggaaattatgcaagtcactgacttgtgggtgtcatattatatgcctatgtcttatttacaaattatggtgtatggacatttgggagacaggaatcaagct

SEQ ID NO: 50933 - DNA, 1934 bp, Homo sapiens
ataattacaaatttaataagttctctagagctgtggtttttactcccaagcaggagtaattttgccccctccccctcagaagacttttggcaatgtctggcaacatttttggttgtcataaattaaccactaaagataaagggcacatttgttttgccctgttttctttgcttgccaacatacacagaagtaaagacttcaagtagggaacactctgcattcgcttctgtaatgagaaggtcagaatcgggatatctggagagcaccaacttgaggaatgaatgaccaggataaggggtggggtggtgctaccaacatctagtgggtagagtccaaggatgctgcaaaacatcttaaaatgcatagtgcagccctgcatgacaaagaatcatccagcccaaaatgtcaacagtgtcaaggttgagaaaccctgctgtaaagggaaaatatgtagtatttagagagcatatattggtggggagattgggaattaggtaaagcctctctaatgtctagcattgacattcacagagaggcaaatcaatcactaaagacaaagggcacatttgttttgtcctagtttctttccttgccaacatacacagaataaaaaaactttgaataggaaagactctgcattcctttctctaatgaggaggtcagaaaatgatgggatatttgggaaacaacaacttgaagaatgaaagtagagactggaactagataccatctcagtaatgcatcagcattgtagcatgagggctatgatgatcagaaactagattttgttccttgtttgttatttcagttatgcccattttttttcatgatgcaaagcaacaaacaaacaaacctcccaaaaacaaaaaccaaaaactctgacaaacttgaagggcctatgtgactgtctttgaaagtgacatggcagaggagaaagacggagctccactctgcagccagccatggggaagagaaggacaaggtgctgcagctctagaaatgctgcgacagctgaccaatgtcagaaatttgtggaaaaggagagcctcggaagtgactcatgttaacagcataaagatccacctagggtttgccagtggtaagcagtgagcctgacgcaattatcggctatgcctatcagcctatttttctggctggtttggtgtgattacagtggttaatgattaatgggctcaccagctcccttaggtaaaaagtttctggttctttcccagaagtttccattaacacaggaggagaaatacagtggaatatatccagaagaaccttcctaacaggagcatatggataaatctatccagaaactgcaaggtcatcaccaacccagaaaggcatgacatgaaatgacaaatggtacaatgctatgtgtgtccctatctagtcaaaattaaggccagtgggatattgcagttcttccctcattcctgcctggaaggctctgctgcaacctatcttacaaaaaggacactgtagtttttccccactgtagctcccacttctgtatacatattgctcatcacctctcaagccctttctgcatgggctccaaaccaaagatattaacacctctgacaaatgggaaatagattaactcagtacacaatcaaatggttgagactttttcatagcaagggaaacttttctacttgagctcatgttgtgagtttttcataaaaagtatcttgggccacatttgagttaaaagtggttaccatagtattttctttttaatttaactttcaaaaatgtatagtgtaggattgtttcatattacaaaaattgtgtaagacctatagaaaatccagaaataacacaaggaagaaaataaaattcctttaattccaacatcaagcagtcacttttgttactatgttaaattacatcctattcctatcttgtccctatccctgcct

SEQ ID NO: 50934 - DNA, 591 bp, Homo sapiens
ggtagattcttattcctttcatttcttgaggggcatgctgttttctgtcatttttgggggattgttcattgctagtactttcccatgagggcataaagtggtagacaaagataattggtcaatattgtttgagttgctttaacctaggagtctgactgccttcctccctccccactgagttcactagtactgtatctctaagtgcctgagttccagctcttgttcaacagcagccagtttcacaatcttggccaggagggaataattgaaaccagcagaagaaagaacagttttaaaaagagattgcgacatgatgactcagtgacaatcaattgaaggagagtggaggagtggggaagtgccgtgaaggccactgtttcattcattgagagtgctgaactggcaccataaggaagccaggaaaagctccatgaagccagatctccaggcggagttcttcagggcagaggggcaccacgcctctttttttttttttttttttttttttttttttttttttttttttttttttttttgaggcggagtttcgctcttgttgcccaaggctggagtgtgatttcgtgatctcgg

SEQ ID NO: 50935 - DNA, 1111 bp, Homo sapiens
ggtaatgtatgaaaaagttcacttcatgctttctttaaagtgaaggtttaaaaaatgcaaaggcagaagaaggtctgaagtaaaggactgaatgaaggacagaaatcagatcatgttctgaaacattcgtctgagtgccatggaagccaggaagttgtagctgaccgaagtcctagtgcttaccctaagagaaccacaacttcagggagacattttaggttcttcaggatgaaacctttggaataacccgaagctgtaacagatggtgtgtttgtcatttttgtagtgtcattgcaggcatatttggaaagccattctgaactttcacttcaagaaccacacggagagttatttcacagttcagtgctgttgggttgcaagcctgagcacagcacacgctttgaaccagcatgatgagatacaccccgactgccaaaaatccagagctggcaggaattcccacagtttcctaagccaactttgttcaaggcccactccatcctaaaagaatctggttaacaaaattttgcttcatttactaggtttgtttgcacgaattatctcctactgaaaaagcatgggatcctgagtcaaacagaacagggtttgaactctggctctgcctcctacaagctgagtgttgttgggcatattaaatctccttcctgaaccttaatttctttctttataaagtgagggcaataacgtcataagtgaaaggacttcaaagaggaatacgtgaaaaacgtgtgtaaaatgcacctggaagaatccctagttcatagtggatattccctaaatgttcgttcaacttcgaaatttttaaatatgattttattaggggagaagaaaactagcttgtggttaaatgtttcccatccatagttactgactaaaagatagaactactaaagttatagccaagaacatcattttccctagggcatatcgataaaatcttgcagtttgcattacggaggtattaggaggtcatgctggttaatagttaagctaggcaacaattctatttcaaatcaaatcctcattctaatgcctcttaattgggtaatcttgttatttaatctctcagcgacttggttttctcatctat

SEQ ID NO: 50936 - DNA, 1124 bp, Homo sapiens
tgacctcaagtgatccacccgcctcagactttcaaagtgctgggattacaggcgtgagccaccgcgcctgtccgcagagtatttttcaaggttgtgtgtatatgtggtgtattttgttggtatctgcaaggcccttcctaaaaagtaaaaaccttaaggagaaacccaaaatgtaaaagagatgaaagaagatgccaggattactcacagaacgtattcctcctcccagtgatggttgggaggaagtagaaagtgcttaggctttgggctgagtcagatccaaattcatacctaatcttcaatagctggcatgagagaggctctgcaagcagtggtgcctcctgcaaaaatacctggcatggataattatggaaacagtaaagattcctgagctgaaggacaaaatggccctagttgtgtggaaggaaaaataacaatcaatatactagacaacatttacagaatattacaatatgccggggactttattaggttggaaagctaagtgctttacaaatattacctcatttaaccctcctgacaagtcttactcaattcttaccatcaccattctaaggatgaggaacctagaacttaagtgcaataatctgccctgatcacagatctaacgagcggtggagtcatgatttgaaatagttgttagcagtaggcttcataaaattattttgctcagattttagttgagttcagaaaatctgaccatgacagtgacagagggcagcccaattttatctgaatcagaaagctgccagggtttgtactttgggattgggaaacaaatctcatataaaggcaatgtgcccagaatacactgggaaatgctctagttctaaaaacagctgtgagtcctttggtcaaaggttccgctcactgatgatcccacagatttcttgtttcctaatcataggatcttttttttttttttttttgagatggagtcactctcacccaggctatagtgcagtggcgcaatctcggcttactgcaagctccaccccccaggttcaagtaattctcctgcttcagccttccaagtagctgggtctacaggtgcacaccaccgtacccagctaatttttgtgtttttagtagagatgaggttt

SEQ ID NO: 50937 - DNA, 1155 bp, Homo sapiens
aaaactccaacccaggataaaagagagcaacaaaagactgaaaggaggaacatcctgaatatgattaaatctcaaaattaaatgactgaaaaataactcaattgacctttacttaaaaatgactaagttttctgccacatgacaaagaagggcctagagacaaaaatcaaagtgaactatacagacaatgaaggaatggacactagagaaacttctagatgaagaactctacccttcactgaggttctcaaactttaactcgagaatgtggcaggaatagctaacctgaaatttgcatgaggacatgctggtgggcacttaatccccatgtatcattggcaaatctaaaaatgccaggactgtcactagtaatgaactaccaaagagtgagtgagacatctaaacaaaacattgcatgtggaagacctaaagaggaaacctgggaactcattatttacttattttaataatttacagattgggcacaaaggtttacttatacaaacattgattttaaaatcagagatctttcaactatgttgtccttgaactttggaatctggttaaataatgtctatttagattctcagactaatacaggcatagatacattgttccaatagattcttttacatttccttgaatctagtaaaaactgaaaagcatgttctgtttttttcctcttatttagatatcttctaagtggccatttcgtgcaaggaaatgatataggtttgctttaaatatgttttactcaacattaagcattttggttttgatcctgttccgttgaaaacgtttataatataccaacttgtgttctttagccttgccttatttgtcgcacactgatgcacttatgtcatttagctgatgggtgtaccattaaaatatgccgtatttctctacatggaaatagaaaaacatgggtgagtaatcaaatgttaacaatcacttgtgacctcatattttaacttggatcaaaaattcacaattatgacataatccatgtacctcagaagttgatatttctacagaaaaagtggggaaattacttgaaactgaaaatttggataactttttcattactagttctgttgcataacatgttatataacatgctggcaaagaaaaaaaaaaccttacaaaattata

SEQ ID NO: 50938 - DNA, 1270 bp, Homo sapiens
tcatgtaacaaaactacacttgtaccccttaaatttataccaaaaaaaaaagtaggcagtccctattcttatgtcaactttcgttttgtctcctccatagcgcacttcctttggtgactcaagtcatgtttatggctttatagataccctacattatagtcaccttgggactccatgccaatttcactacacagtctgttcttttctgtctccatagctttatcactgttgtttactctgcctaaaatgttttcttagggatcatttttcaaggttgagctcagattgccaccttctccatgaagccttctaatggaaatgaacattagtttctatgaatgtccattttatttatttgcacagccttgatagcactctgcagacattgcctcattgtttgttctggagcctcagtccatgccaaaggaagacaaaggtatgacgaagcagcaaattcatgtagtagagggcgaggaagccatcagcagtaagagaatgaaactgatgtgcagaaagatggtcaaggtgggctggttcccagaactttctgttttttgtgtctctccgtcggcacctttacaagaaaccccagaggcacatcttttaaaacaaacttgagtgggcttgtgctccaggcaataaatttaagtagaaaaattgtgtgaaataccaatgagggaggagaatagggtctggaggcagggaacgttcctaaggccaattcacactgacttcctagaactaaattaaaaggaaaaccccgactttccacacaactaacaaaaggaccagaagctactccctttgccacccccctgcctttctgcacggcagatggaaaattgaaagtacctctgattggtactcctatgcaaaccaaccagacttttgcacaggagtgtaacgttgtagcttcacttcagcctctgattggttgcttttcacaaccaatgagacagattgtgggccgccacttcatttgcaggaggcgaacaccaagtggccaatggaaaacctcttgcaggtatttggaccccaggaaaatctgcaaccgggcttttgggcccctatgcttgggcccgctcccaccctgtggagtgtactttcattttcaataaatctgcttttgttgcttcattctttccttgctttgtgagttttgttcaattctttgttcaagacaccaaaaatctgcactccctccactggcaacatgtagtatactatgtgaggtatgctctttgctggttttaaaaacatttttatcatg

SEQ ID NO: 50939 - DNA, 2284 bp, Homo sapiens
ttactggattttaaagcggattattttatcctgcaacttaataaaatttactcttcttgctttcaaagaaagagattgtgtgcatagtcatcatataaagcatacatcctcttagtgtcttcaaaagttacttttgttaatagaatattattttcactttgattatgcaacctaaagagacatgtatttgaaggatggtggtgtccatgataataaatgtagtcacataacatgttcagaaacactgggccaagtttttgttttgtttcgtttttcctttttagagacagggtctcactctgttgcccaggctggagtgcagtggtgcaatcacgactcactgcaatttggacttccaggctagagtattcctcccacctcagcctccagggctgggtagctgggactacagaccactaagcctggctaattttttgtagagacggggttacatcatgctgccctggctggtctggaactcctgggctaagtgatcctgccacctcggcctcccgcaacgttgggattagaggcttgagctgccacgcctggcctggaccaagtttttattcactcaaacaattttctaagaatggaaaaggaaattgggagaggaaggaagactgactcagcgggaggctgtttgttaattagtaaacaagtgctgtatacatattgagccaagtggctgcttttcaaaaaagcaaagtacatgaggaatctcagctgtttcctgaaaataggctcacttacacttccctgatggagacatgttttattatctgtgagaactgaggagtttgtttatcaagaagaaagagacaaaatgggggtgggggtggggtgaggaagttgaagtgtcatctcggcagatggctggagagagaacgtggttgtggctgaggcttgttcaatagaagcaagcatattcttcttaccaaaagaacggttatttttcattctcggaaaatttacaatatcagaattgagggcagaatttgggtggggacagggtgggaagtcagggacagttgttttccagatatgtttaaaatgtaggcattctaatcaaggactgtctggatctccaggactcttataccgttcaaagtacatggctgtatcaccaagttcatggacttttgtttatttattcaataaatatttactgagaacatatgaaaagccagacattgttccagatgctgagaacacagcactgggggagaaaaaccagattaaagtctctgctctaaaggaatttatttacattttactggaaggggcaggagacagacaataagcaaataaatacaattttcagatgacgataagtatcatgaagaaattaaaccagagtaatataacagagactgaccttgacatttagtaaaatgaaatcctcttcaaggtaccagactggctccactgaggtctgacccatcagaccccctataagaattagaagacaatgcattcatccttattggacgatagctctgaagtcttctaactggtcctagacctccttggctacaaaaggctctttaggagccagaagtaggaatgttgtccagtagctctgagctgctatgaaattataggcctctttcagcagacactccttgattgaaataatggctccctccaagcatgcactgatttatggtctgctggattgtttttcttgattgtctcaatgttgttgatatcagattccatttaactttgagcctcctcttctttctctactgccatccccacactatactggttgctttctgttgcaagtcaagcttgcctaatcctacacagggcctaactctgcctagctattgtgagttggatggaacatgctgctgacatgccccacaatgatgacatccatgataaacctggttttttgatttccttgtgtcagcacaacgattttggccaacatgtctgttcttacaaatgttccagcaatgccttctaaatctgtactatgcagaatattttgccaactgaagttaagatgttattatttgaacacttggtggtagggcatcctgagtaagatatctaaacactgggcctgctaactggcagagaaaaactcagtgcattacaaaaaatgtcaacagtctgagaggcattcatgtgggcatgagtagaggaagcacaggcagccatgggaatacctagttaagacctgttatgtcaagggtgtggtcattctaccaaagagtatagggttccctgaaatagctaagcagcttctcattccaaaaccatttgcctg

SEQ ID NO: 50940 - DNA, 3102 bp, Homo sapiens
attatgctgaggagttgtaggcagtggagagggtgaagttaaagatgtgccaaggaccgcccacagtggggagcaggcagtggagaggagcagggacatctagcctccgagatagaaggaaaactagtaagtctgggtgtggacgtagatataatctatgggggttggtcaggtggttgggcaaaagctgtagaaatccatgcctgaaggcttctgcttctctgaagtagaaaccgggtcacctggtaagcaatgtggtcccactgacttctatttgcacattggcctttcttctaaaagcaatacacataaccaacagtacttttctaaactagttgacttttctgtaaaatgcagacagtagacactactttgtcagattgttgtgtgcgttaattgtgcggacacgtatactcggtcaataagtatctgctttatcaccgggctgatgtgagtgaggactaggtggtggggcttccacagatgaacgttttgattaataaaaaatggactgaaagtcttcgggtatgaccaatggctaaatgcaattatttactcttgcaatgtgttcgaggtcacccagctaggtcaaggagtatttatggacagcctacttttgcccccggaccttaagaagtcctgctccgggatcagccgccgaccggaaagtcaaattagcagtgcccagcgcgagcttagagcagcctcttcccaaatctcagcggcggccccgccccttccacacgttcaggccccgcccctccctactattggctgtccgtccccctccgctagactgctcggaagacccggaggagcggagttttcctaaggcagcatccgagcgccctcgctgcgcatgctcgggggaggcggattccgggtccggagttggaggctttgggcggccgcggcgtagcgcgcggtgccggggccggcggggaggcgcgcgcttagggcgcggcgccggcgacgcggccacgcggcgcgctcccgaggaagggaggtgtggggtcggctgggggtggcgcgtggacggggtgggggtggggggagggtcgggtgtcggcgagctccgcgtgcgggttccgagtggctgctggcggcctgggctgccggggccgacgcctgggtggctgctgccgccgcgcctgctgcgagatggcgatcttgggcgcggaagggtgagggcgcccgccgcaggaggaggtgccgctgccgtggccgcccggctgccgggagccgacagcttcgcgccgggtaaggacggcgcggcgcggggctgggggtgcgaatgggcagggcgggagggggcacgggccctgagccttggccgcggtgctgggcgcccggcgccgtccgcccccgggctggaccctcctaggacccgtcgggggacggtccgccctaccttggctaccttctccagcccgggagtcgggagttttctggggtggggtcacgggtcttgcccggagttcgccctggcaaaggcctgtgccagtgatcctggagcggagcgaagtgtttccgtgactctgcagccgcagttcttaggcttccttagccttctcttcgccttcctccacctttccctaacacctccctgaaaacacaaatacatggactcattgcccgttccctgactttcaccccaatttcagcgttgcaaaccaaggactccagctttggaacgtctttttctgacatgtttttatcactctccgttcttcaccgactctgcagctccccatcccccgcccccccagcgcaacccccacctccaccttttgtgacctggtaggttccagtgaccttgcagattttaccagtccttatcttgtctgtgacttacagactctcctttcatcttcgtgttctttttttaaaaaaatttaattttgtagtttgctccttacctttacgacctttaaatgatcagtcttgttcacagtcctttctttgctctgccgatttggagttttctctgctgtggtaaatatatgaaaccttcattaccaaagaagagtagtgtctgttataattttgacatttttactctttcagaataaaatattttccaggggcttgattttgccttctttttctatttgataagtttaacaaatttttttctgtgtgtgtgtaggttaatgtggaacaagattttgtgtttctgctttaaaatgttactggtaatagtagtgggaaaaaaaatcatgtccaaaattatctttgttttccccgtttggtgtttttacctgaaatagttggtttacagttacctgcattttttttttttaacaagagttcatgtttatgtgtaaatccactttacctgcctcaccaaatctgtgtgtattatacaagcaaaatgcaccttttaaagaagaaagtcgttcttttattgtgtgacttgtttttagccatcaagtagtaaattagctgcaactagaaatgatcatttttcataaatggttagtattttaaaaaatggaaagtgtagtggccaagtattgggagctactcagattgagaattgtaaagtatgtggaatagttctttgggacatagcttatcaacattttcagatagttcttaccttaaaatgtgaaactgctggtaagatctacatcagggttttgaaaagcaataattatgagctaccggcataatacaggatgtcgcagataaagtttctgccttcaaagagatggtaatctttgctgtttaccccacggtggctgaaatttcctttacttccttgtacagttgttaagcatttactgcataattgtgggaggtattttgggaaatacaaagatgaaccgattagcaatttctgccttcacactaattaggtagatagtgctatacacaaatgccttatttgtcttttaatatataagtttcataaatggtaccaaaatcctctcagaagtcaacttcaaagagagtagagctcagatcttacttggcaaggtagggataagagggttagtttgtagagctcctggcttctgaaatcgtggttttgaaggacgattatgactttggataggcaggaaaggtaatcctagcagagaggtatctctaagagag

SEQ ID NO: 50941 - DNA, 727 bp, Homo sapiens
tgaaagtttgtttttctgtgtgtgtgtgtgtgtgtgtatgtgtgtgtatgtaagtaaaatcagtagataaatagcaatctggtatacacagagatatttatataaaacacacttcttactgtgtaaactgtggtcaaaaaaagtttaaaagccactaatccaggggagaaattaagagagcctgaagtgaggtaaatgctaatattttaggttgacataagatgggtcttgataagttgtggggagatagaatagaaaaagagtggaaccaaggtggattcttctggcatacacagcaccaggctgtgtaaccctttgagtcagcagttttcaactccacatcatcttccctctttgcttaaaaatcttaccttagttcctgtgttttcttttgtttggtaacttactgagtcatttagctaacaacaggataggactatgggtgcctcaatcctgttgattgtaatgtacagccaagttgagaactgctacttcaagttcttttgttaaccctttactctccacattttttaattcactttatatagagatatgtagatgaaataaaaaaattctgtgtatcaaaatctaaagtatgcatcagtgaaaaattggacagtgtattaatattgagtacttttcagagagattaaaaatacattctgaatcccccccccatccccccacccccgcccctaaatagcgattaggcaactgggtcatggca

SEQ ID NO: 50942 - DNA, 639 bp, Homo sapiens
gttaagaaatatacagactcctatgcaattctttgcacctaacagcttactataaataattaactttaggggaaaatatttttaataaaacacacatacaatatacacacagatatcaatcttaaatagaattattactacaaggagtggtgtgtcaattgtgttaaagactgttacactggaccacgctttccatattcaggaacttgtgtcaatgctcccctcccacagaaactgggcttgcccttgtgacttgtttagattaacaggatattaccaagtgtgatgcaagcagaggcttgctagaactttgtacattggatcttttcccatggaacactcattcttggaagccgactaccatgctataatgaaggttgagctagacaactaagtgataaaaaaacaagtgaggagaaactctcataggtaagaggccatcttggacactgtagtctcagctgagggcccaggtgaatgcagctgtctaaatgaccccagctataccaagcaatgtagaagtgccactgcgctcagttaacccaaagaattgcaagaaataacaaactgtcggctgggcacagtggctcacacctataatcccagcactttgaaaggccgaggcaggtggatcacctg

SEQ ID NO: 50943 - DNA, 1417 bp, Homo sapiens
aacttccaaggaaggggaatatgccaaattttaaccacccctccccaccatcagtcccataataattctgaaagattttaactgagcagttaaaaatttgagtttaaaataatgaaacccctagttcatgtgaaatatatcatatgcattaatgccattccaattccctgacaagaataaacagaggcccacgagcagtctaatagaaataccagaactgagactacaacatgccgacaaccttcattgacgttatgcagatacaacgggcaactgagaaataaacatttttaaacaaaaacctaaacagtatgaaatctctgcttctgagtcgtagaactttttaaatcacacaccacacttttcaaagtctgaaaggggcagcctcaagcgctgttgtatctgtcatcgcctacagggagaataatttcacagcggtcaaggttctttcccgtcctgttttacatttcgcacaagaagggcgggtagcaggcagcttctggggcgcgtgggggcaaaccccactccttctctgacagccccagttaaggatagtggaggtttgcaaaatggaagggacctgtccgggcgttccaggcacagtggccccgagttctttcctcggttcaccacattccttaggcagcgcggggccgccaccacttaagttaagggggagccggaacccactgagtaggaagtgaggagcgggagccaggaccacgggggtacctcgaagccgcggaatcgacaggggccgcaatgcccgcggctgcccgaagtccccgcagggagacgagaccccggggcggctccacgtcggaaaggcagaaggcgccacagtcgagcagccagcgccatgacctgcaacttgcgggctgaccctgcactacttcaggcagctacggaggcgggcggggctaaaggagattcaatccttccggaaagaaccgcgcccgcccgcctcctgcacagcacctcttccgcctcctgcccagcacctcttccgcccccatggtttccggtgcacgggcttagggggtgggaaataccccgattgggtgggacttaatggactttccgcgcctgcgtccaggactgaggccgtgagagcgctctcttcaggcgctctgacttgtttctgctccatctctctagggggtctttcatggtttgggcacaaggattcgtcgccagaatagaactgaaagctcggaaatagacccgagaatacaagtatgccagaaaaaaaattgtcattttaattatctgctgccttcaaaagtagattgaatcttggtactagtgggtcttttttggaagtaaataattggaagaattatgttgcccaacatgaagaagggaaagtctcagtctcttcgactgagcgactcaagggggtagattcaagagagag

SEQ ID NO: 50944 - DNA, 1432 bp, Homo sapiens
cagctatttttttttttactttttgtagcggtggagggggtctcatttttttgccccaggctggggctggtctccaactcctgggcacaagccatcctcccacctctgcctcccaaaatgtttggattacaggtgtgagccactgcgcccagtcttctcagttcagatatggcataaattttctcaaatatttaaattatttaatccttaaggaatttattttggtgcaccaaaccacttaccttaaagtcagttttgccttttcagtaagcgactggcctccagaatggcctcgaagcgccagcctactggcaaggagctgacatgcagcccggagtcagctccctgcggatgggctgatcctcgcgcaggctgtgcggggcgggcgcgcactggacccgccccatccccgccccctccccgcccccttgctctgccagtccagccctaggttctcctgaatcctgcggtcccagcgtcgctccggacgctgccaacctgttctccaccgtcgctcgacttccacctctaagactcccacgtgagtgcgggcgtctcccagttcctgggccggtgaggcagcagcccagcaaccgtaccgcccgggggaaaaggaaagtcctggcctggaggatccgagcccgcaggctccgtgcggcaggtcccgccgggccctgctgctggaagtgctccgtgggcttcgcgcagctggggatcggcaggtcgcggggaggctcccgagctaggtcgcggcctggctggacccaggcaccgccgacgcctcctggaggagcccgggctcggggctcagctccgggccgcaaggccccgcctgggcctggcgctcgcgcacctggggctggggataggctgggatccgccctccttccctgggcggagagggtcgggcttgtggcccagagaagggtgacaggtcccgaaatcgctgcagcaccacgcggggagagggatagggtacccacaccacgtccgtggtgaagccaatgcccagttgagcggggggcgcgcgcttcagagcacccgagaagctggcagatggagtgggaagaggtgactcttgatttcagggtaaacaaggagattgtgagaagtagtctagcagctcccgtttctcctccagcttcaagattcttctgtctagtgttttgggttccctacaccaggattgtggaggaagcgcacggccagaacccgttgggaccgagcagatcaaccatttatgttgcacttaatgatcatctgcactttttgcatatccttagtgttgtctttgtgaggccacctctataatggataatcaaatagagggaagggcgggattgaatattgtgacttgatttcaatgtcccacaacaactgtgctagacagtttttatatgttaggttatttaacgctcccaagcacttatta

SEQ ID NO: 50945 - DNA, 553 bp, Homo sapiens
ttatttatcgctttattatagggactattttccttccacttacaggcaaggttaaaatgaaaaaaagagagtttgtctattgtgttggtaaagaaagacagaagtgggaggaggagaggaaaataagtgctttatgataatttatttttcccagaataggaattcactgggtgcacacaatataattctttttctcatttccgtctaccccttagccattgttttcctttgatcttttttcagctttgcaattattgtgtgtggctgcatgatgtctagtggaccggcactagagggcagtgtgagtgcatgtttatgggtgttaaacgacactgttcaaaggccgttctaagcagagttcaagctttgttgtaactgattgctactgtgcctcttttttcttaacttaatccatgcttttgttcggcagcctgtacaataggagccagtgctggggagactattgcatgttgccagggagcttgtacaaccaagtaaagcctcattcgggtcttatacggtgaatgtattcattcagtgatttgtatttttc

SEQ ID NO: 50946 - DNA, 1089 bp, Homo sapiens
gagtacttttctgtaaacatgaacagttcttaaagggcatcacatccaggtacatggaaatagaaatagtctgaatgcgataagaagctctaatcacctttggctttccttaatcttcatgaaaagctatttcagaattgaatatcttttgattaaaaatgattctaatcaactctattaccaactctaacatagaagtatttcaaagtagatgaaataaaacaaaataattccacatatctctttaatttccagttgtatatatttttattgggaaagtgtacagatgtgggtctgtaatgatcaggtatacagctggatgtagaggaaggggaggaggagaggaaacagaattaagtcacaacatgtaacttataaaaatcacattctacctttaacataaaatcattatcttaataaggattctggcagggtgcagtgactcatgcctacaatcccagctctttgggaggccaaaatggaaagattgcttgaggtcaggagcttgagatcagcctgggcaacaaagcaagaccttgtctctaaaaaataattttaaaaatattttaaatctgtcagagtgtcacaggtaggaagtggatgccacataagccaagcagggctgtgtattcatccagccttgtgacttacattccagagagatgtgtcaggcaaaatggtgacaaagggtccagaattactactgtttgagtaagactgctgaaatggttttggattttgtccatagtacaaccattttggtggtatttccacatagtagcctgtgatgaaagtgttccagacactgagagcacctatttgaaatgactaaggttggagaaaagggaagagtgagtctacatgctcaaaatacattaatcattcagaaggataggctagaactggatagttccaattgcattccactgcatagctctcagaagagtgataatacatagtcgtagataaaacggactggtgctttttgcgttctagattctgtggcccatctgcaggtccatctactcattcagtcctcatagtgaccttataagaatggtgcttttattattcttgttaaagagatgg

SEQ ID NO: 50947 - DNA, 1000 bp, Homo sapiens
ctctttgcagccacaagacagcctttagttctgtgctctactatactaaattcatggtatttagttatgaaattctggacttttgacaatcctctagcagaaaagccatgggtttccatatgccctcgaatatagcacttctgaaactttactgtgtatatgaatcacctaaaaaccttctgagaaatattcttagttcacatttcaaagggctccgtgcaaacaaagcagcaatggctggaaattattcggcctttgttgtttccctgtttctacctctgctcagtgacaaaaaactaaagaacatacatattgtccttaatgtatgactgcaactattaacactaggtaaattataatccatagtccagtctagtgtttgtaaagaaatccccattctaactggctagtctccctgctatgatgtaatcttttcttgtgtgtcattccagtcccttacagtaatttcctaatttcaggggaaaattgagtttgcctctcaaaacaaagctgatacatggtattgcaaagaaaagaacaagatttcaatgcatcttattttaatagtctattatgaagcaagtcactacaaccagcctttacaaaacagcttatgttaaaagttgggatattctgaaaggtagttaaagagtaatttttatttgttctgcacaaaataacctttcctctaatttaaacaatgcaagtgtaaactaacagcataatcccaatatataactctttccaaatccagagaaagaaatgaagtgatgtcttttaaccatctttctgtctctaagaataagagattatagaagatgaaatgtaggagacacagtatgagatcttctcagagagctttagggcccctgctacttgtagataagaatgagctaattagtgggtttgagcaacagggatttgatgatgccacaccaggaagaccctcaatcagtgcccattgcaggaaagagtgccaaggtgttctcatcagcccagc

SEQ ID NO: 50948 - DNA, 559 bp, Homo sapiens
agaattggccagaaaacaacacttattattgtcattatttacgaatattgacaggcttataaagtccttatatattcattgtgtaacttgagcctctcagaacaatcttggaagataaatagaccatagtacctccacattgcacaacttcaggggccccaatgatcatgtattccatgtgaatgatacctccccactgtgaacaacatccccactggagttgtacaaaaatggctgccctggaagggcagacatttctattctgtttgacaactattaaaattgagccaaagaaggttcctgagtgctctttatgtcccaataaactccacagttttgtcatgttcagctgctgacgttggatccctgatgcagtcatagttcccccttccagagaattgcaccagcccgccctgtgatgacctagattacacaggctactacaataagaacagctccgccttcttctacaactgtatctgcccaaaacaggatgttaaaaaggttactgaacttataacctcctttcacagtcacttcttaagaagtgtgtgtgtgt

SEQ ID NO: 50949 - DNA, 701 bp, Homo sapiens
accttagtatattttgtttatgacccaggagtgacaggtgaaaaatacaattttgaattctgaaaaaaaattaaaaagcaaaatatcccgctgaattcaaaggcgaaaatgtttaaatgcaagcgaaatactagttacatgttcttccacattcttggaaacctgccaagtaaaatataaaaggaaaatggaatttcctaagtagtgtctattaataataaatatttttccaattatgtctttttgtagctgggaaattccctcttgtcactaagtttctctcctcagacattacagaaagtaaaaccgaaactgaagcactctactgataaatcaagtagttcccagaaataatatgaactttgattcaaacagatgtgttcagaaatcctatctccataatttacaaaactgtgacttctggcaatttacctaacctctacagacctcactttcattaaattaacatacatacttctctcgcctattattatgagtgtaacctggaattccctatcagaacctggacttccctattctaaaattaatgacgctgtaactgcatattgtggtgtctatcttctttagaacactaaaaacatttcagggcagagaccacatgcattttgttattcttgtatttccatcacctagcccaatggtacataaaatatctgttgttttttgtttgtttgtttcat

SEQ ID NO: 50950 - DNA, 3356 bp, Homo sapiens
gagttggtattgtatataacatttgcactcacgtcttacaaaatagtcatctaagtagaaaggtattcaaggcagaaggatggaaaaacgtttgcagtcttttttggttggcatgaaacactgactgcattcctcccagatttataagaaagaaatatttgcagtcttacctggagttagatggatggactctctcaaggttatttttcaatctctgcacatacatacttatggaagtaagaaagaagagggagaaaaggcagatcccccataacagcggttaaacacctgaacttgctccactatgacagggtttatcatccacctctcagtcctcaagtggctggaaatatggaaattggagtccaggtagacaggtgagtgtacaacctcttaagtgtggagccctcggaattcacaacactccccaaatcgcttcctgcgcaggcgcggagtcggaagggagtcggaaagcagaccccggtgccccctaataaagcccccagccggacgctgccgctaccggggtttggcaacttccggaagacctgtggcccaaaggagaatcctgttgggggaggcgggggccggtggtcgctaaccaatccgacacccgccagcaggctgaagagaggggctttcccaaaaggaaaactttcccaaacctgggggatgggaagagaagacaaaaggagctccctttcccacttcccagccgcccgtcccagccctcggcctccgctgcgcgacccgggcggaggatcccggccgcaggccgaggcgagagccaggcgggagggccgcgagcgggctgcccctctccccgccttgccgtccgccgctgacgtaacctgcgaagtttggggagggaggagctcgggcggccggagctggtcgctgcgcgcgccggggggagggccggggctgcgagagaggaagctctttcgcggcgctacggcgttggcaccagtctctagaaaagaagtcagctctggttcggagaagcagcggctggcgtgggccatccggggaatgggcgccctcgtgacctagtgttgcggggcaaaaagggtcttgccggcctcgctcgtgcaggggcgtatctgggcgcctgagcgcggcgtgggagccttgggagccgccgcagcagggggcacacccggaaccggcctgagcgcccgggaccatgaacggggaggccatctgcagcgccctgcccaccattccctaccacaaactcgccgacctgcgctacctgagccgcggcgcctctggcactgtgtcgtccgcccgccacgcagactggcgcgtccaggtggccgtgaagcacctgcacatccacactccgctgctcgacaggtaggcagtcactggggttccctggaagagccctcaactcctgcatcccctcaagccccctgacaagcgggctctagagcccaaatggcagtgaccgcttggggccggcctcacctcgtcacctctagggagcccttcaagcttgggagatagggagcacccacccttcaagctctggcaccgtagggagcacaggcttctctggagatgcagcagttgcattcctccacacatctctccattaccctttctctccttccctcttactcctaggcgttctggctccgtactccaaaaatcagcaatcactgcctaactctaaacgctgggtttactgaaattgatgtgtgtttatatatagtgggtgtgggttttgtttgctttgttttttccttatttttgaaattgggctgtagggctgcactgtccagtaggtagctcttagccacaggtggctattgagcacttgaaatgtgcccgtccgaattgaagtgtgacctaagtgtaaaataccagagttcgaatgcttagtatttattaaaaaaagaacttataatattttattatttgtttattgattatatgctgaaataacatttttgatatcttgggttaaatataagattaaaattcattttatgtgtttctttttactttatgtggccacgagaaaattttaaattgtatgtggtggtgttcacattatatgtttattggaccgcactgctttagaatcaaggatgttttgcttcttattgtttttattttggttttggtttattatgtgttgtcaggaacgttttatatcaaactcaatactagcagttcagtttctcccagtctcagtttctctcacagggaagattaagtagaggaaatgtgtgctatttttgccacaataaattgaaccaaaagactgttaaatggccagaaattgtaaatggctttcacttattggtttgtacaggttttaagggaaggttagcattagtttctgttttcagaagaacattacaaccgcgtgccatagacctgtgactgtgtattagtcaatgggtcactagtcttgtgtattttacttcctacagggatttaactaggcccagcattcagttcttagtgagttaacatccatgattacaacattctcttctcctcctcctatatctaatgtgaaaatacgtcatccccgatgcctgattggccagaagctgtgagtatccagcatcagataaattcctcagcttccgccctgccaaagttactggattttcacctgcctgtggcttttcttcattgtctctcactgtcaggcttcgatggcctaaatggcacaggagatttgggacacttctagagcttgtttccacttcttgtctatcataatccagattcagtgatatacaaggtgtggtgtctgtttactccaggccttatattctgtggagcaagtgctggacaagtgtgtatatgtgtctgtagtcaacttttaagggtggtggttggttagagagggtggatatatgttagaaccagttatgcaaacactatatggaaatgtagcactgatggacccattaggtattgaaaagccaattgatcctcccactttgggtgctgcttctcaggattttgatttatctaagctttgtgcagtttggggaccaagaagtgaagagggagtttccttcccatactcatgaacaattttcatagtctaaaattcttcactgaattgggtaggaaattaattctgtcttcgaggaagccataagaccagcgaaacactctggcatttactgcatcacattcttttctccaatttgttacttaagatcttatcattgcagtatttatgtagtctgagcattagatgaggctatgcagttgactcactggtgtctctttcctcacttataaaatacgaataataaatacatgtgtttctcggactatggagaacaatgtttgcattgttctttgggatgacctgaaaa

SEQ ID NO: 50951 - DNA, 6421 bp, Homo sapiens
ttgttagggtagataaccagtccaagcctctagcttccatatctttggttgattcctttttggatgtatttagcaaccctgagcaaacagggaagctaccaacaaaataactgcaagtacttttcattgctagtttgaagtctcctgccctcactaaacacatgttgctgagcttttgccttctcactgtgactgatgcactcctcatcatactaagagatgcttaggactggcaggatgcccatcacctttgtttccaccagtgccccttagtggaatggtacaaagtctaaaggggcaagaaaaaaattttttgaaaaattaactctttagtgttttgggcacagcctgatcacaaacacatgagatatattttgcataggcctcccgacaaagttaaaaggactcaaaattccgaattaatttcgactccagaagagagttaatagttttagaattttaagctcattaatctaactgaattcattctaaggaatatggaagctagtactgggagcctggtcccaagacaatgttttaattttaattgtttttaaattagaagaaaaaaatgaatatataacaatgaacagtttagattacatatatctttataataatgcaattgtaaaaaataattttaatatcttttatagaggacagagccacaaaagcataagtgcctatgtcagaggtgtttgaaccagagcaactccattttgaataggggctgagtaaaataaggctgaaaactactgggctacattcccaggaggttaggcattcttagtcaggatgagacagaaggttggcacaagatacaggtcataaaaaccctactgataaaacaggatgtggtaaagaagtcagccaaaaccaagatggtgacaaaagtgacctctgttcatcttcactgctcattatatgctaattataatataattataatgcattagattgctaagagatactcccaccagggccatgacagtttacaaatgccatggcaacctagggaagttagcttatatggtctaaaagggagaggaatcctcagttctgggaattgcccacccctttcctggaaaactcatgaataatccacttcttatttagcatataaccaagaaataactataagtatactcagttgagcagcccatgccactgctctgtctatacagtagccatttttttattcctttaccttcttaataaacttgctttcactttatggactcaccctgaatttttttcttgcacaaagttcaagaacctctcttggggtctggataaggacacctttccagtaacacctagggcccacgaatgtcctattgcagctctgattgtgaaatgacttacctgacggtagtctgaaaagtttgcttgagactgtagccacagcaaaagttgaccttacaaactgggtcattcttgtcacacccaactaaaacagcgcaatcagaccacgtaccattgctccaagaatgtaattctctgcaagcttggctgctgagactgcctgctataacctgaaaccagttttatctaaaggctactgaaacaatctactgcacctctaagactagttttacccaccaccatcactcaccaaaaagcttgctagctccccaaaaccttacttgagccaatgaactttctagagtagtggtatgtaatgtttctcctttttataaaagctctaaccttctctttgttctttagatataccaaagacaacccggtctgtgtgtatgcccctagttgcaattctttcttgccaaataaaatattttaatttcagagattcatctttatattttatttgactttgacagcactaatcagacacagtactccagaggtgctaggatagggggcaaagggcaaggaaactgaatagtggcagattgggcttgtccatgtcaggaaggaccagtggcccacaacactagcatgtagaggaaaaagcaagtagaaacacaatgaatactgcaggttaaaggcgtggccctcagagcttgagcattctcacctttccacttgccaagaccctgaaaaaaggcggagattcagacttcccaccaaccctttcaggttagagcctgggccacattcaatttaacttagaaacataaataaatctgtcttgttcctcagtgttataggcaaaatcatgcctgatatattgactggtatggtcttgtttattactattattgctttaggttgtgtattgactggttgcccccaaaatgatctgctgaagtcctaatccccagaacctgtgagtgtgacctatttggaaagtgggtttttacaaatgtcattaaattaaagatctcaagatgagaccatcctggattaactgggtgtgccgtaaatccagtgacaagtgtccttataagaagagggctgggcatggtggctcacgcctgtaatcccagcactttgggaggccaatgcaggcaggtcacttgaggccaggagtttgagaccagcctggccaacacggagaaatcccatctctactaaaaatacaaaaattagccaggcgtggcagcgggcacctgtagtctcagctacccaggaggctgaggcagaagaatttcttgaacccaagaggcagaggctgcagtgagttgagatcacaccactgcactccagtctgggcaacagagtgagacactgtctcaaaaaaaaggaaaagaaaaaaaggagagaagacacagacaaaagaaaaggccatggaaggcagaggcagagataggaatggcacagccacatgccaaagaatgcctggaatcaccaaaagctggaaaaggaaaaggcaaaggacttttacccctctagccttcagagggcgtgtggccctgccaacaccttgattttggactacagacctcctgaactgtgagagaataaatttctattattttaggccaccaagtttacggtaatatgttaatgatagtcctaggacactaagatacttcatttttaaaaatatacttaattttttagaatagttcatgatttcttgaaagattgaaaagctagtgtagaaagttcccatatactctgcacccagttccccctactattgacatcttccatgagtatagtgtatttgttaaaattaatgaactactattgataatataaaataaaaaatctcagaaccctctaaatttatcatgccaagggggaaattaagctctggagactgagtcatgaagcatgtttgcaattagattatagattaactctcttgctcattgttcttgttctgtaaatgactagaagagactagagaccagacctttctccacttgcaattactgatctttgttatagattaactgcctcctttattgttcaatacctaactcagaccagatggtgcaaaagaccccataactattagattctcagtgtgaaatgttaaatatacctctgaaaataggtaattggaaatccaagctgttggaactctaaattactttgaaccttaaagaaatgtgaggttatggggactgagtcatgtgacaggcagctgtaacctttcttgctctgattatagattagccttcctcacctacattgttttctaaaatgttatatattactaaagggcaccagggaagaccccttccctcttccctgttgatctttattatagattaacttcctcttatctttctcacaaaaaggctttatggttatcacattgtcttcagatggaatattaaaaatactcttttaaattggaaaggacatgaaaacaagctgtatggaaaacaaaatgaactataactaattaaatgtttataactcaaaaacaagctttgtatagaaaatgttatatataatcctactctattttctgtctatataagaacctttaacttcagagccctgaccccatttctctggagtctgtgtcttttaaatagccattcccagcttttcactttaataaactctttataacttgattctgatccgtttgactgtttcagcttgacgtgcctttcctgaaagaaaaataccacctcaacaaatcagatcattgtaactatacattaagcctaacataggaaggtgttgatattctgctaaacttccctaaactttgtgaatatgagtgaaaacttctatactttggaacactgacttccattctttagaatctgtgcttcccaagaagcccggcttcaaactttgcacttgaatcaactctgtttaaactagattctgagtcaggcatggtggctcacgcctgtagtcccaacactttgggaggctgtggtaggctaatcacttgagaccaggagtttgagaccagcctggccaacatggtaaaccccatctctactaaaaatacaaaaaaaaaaaaaaaagttaatcaggcaatcccagctacttgggtggctgaggcaagagaattgtttgaactcaggaggcagagattgtagtgagctgagatcacaccattgcactccagcctgggcaacagagcgagactcgcctaatgtcttttttctgctccaagatcccatccaggatgctgatgaggtgtggaaaatgattccccagcctgtggggcttgggcatgctgagtgcttttgaaaattgaaaggccccagaaacaaggtcctgtctaaccttgtgttgtttccccagcccacttcacctcccaggacaggaagggactctctctggagtttcctcatctgttcaaaaaagtctcttacaaaaaaaaaaaaattgccttctatctgcttcctaaaatggcattatctattgcagaaaaaagacaagaatgcaaccacacctggacagacttgtttttaagaagataattcctgccactggagctcagagaaaattccagagaaaatcctttacaagttaattactgttccctggtccgtccattctccctaatagtcatttactgcccctcaaagaattgtctatatcccccagcgcttccctcccctatgaaaaagggtatataagctgtacccattggaagattgggggaatccctttgtgattccaccacattaatacatttgtatgccttttctgcctttcatcaattgatttcagcaaaccttcagagggcaaaggggaagttttcccctggcctctataataccacattacatttggttgccctgtctcctcaaacctttgcactttttgacccatcaatgaaaacacctttgcaaatattatgacagtgagagaacgctagcatgactcatgccctcttgcttctagtctcacaggctggctgtcttcactcattcctgggcatagaccaagctaatcatgggaaaatcttagtatatagtttaattttgaaacaaggatcataatagtccttccctaaaactgatccctgccttgctcagagaccaaagctgcctttgtaaaactaatgaacgtttatgacataggattgtgggagggatctgaattctgctaaaatgtaggcatagtttctatgttcccttactgctcaggagtggagtcatgtggccagaggtcacaagatttgtgacttccccacttgctcctaaagatagtgtcactgctgtagaacctgaggttggtcttttgagatgtttttcagatttttgcattctggcaactgactgatcccacccaaacccatgactcatgactcaaccggttctactgctctcactcagaggcagatacagcacacaagcaccattttccacacccctatgatttcattctcacccaatcagcagcacccattccctatccccctgcccaccaaattatccataaaaaccctagcctctgagttcttcgtgagactgatatgagtaataactccagcccttccatttggctagctccacgttaattaaactctttctctactgcaatactgcagtctcagtgaaatggttttgtctgtgcaactggcaggaagaacccatcaggggattacacgaattcaatatccaagaatttattctaaggaaataatcataggtgtgtgtaaagattaagccatgatgatggtcactgaggcattgcttaaaaactattgagaaaccaaaagagattttgcttttgggggttatatcaatccttatttgccactagaaattaaaactgagaagtcaagaatatattaattcatttaaaacatccaaagtgaaaaacagttgatgagaagaaccatgttattttacatttttgcatatctctttgaatgtttaaaaaagtaagtaaatagaagagaactgggttttcatatctgcattcaatctgttgcaaaatcacatgtcatgtagcctctggaaaactccactgttcacctgtgagagtatgggagtaataaatgcaataacatctcagaattatt

SEQ ID NO: 50952 - DNA, 915 bp, Homo sapiens
ttagactaaactgagccaactatttcaaggggggtggggaaaacgaaaaattctttacttatcatcacctttgtatccatgatacaagtaaatgttattatagtgataaggaaatgattaataaatccaatcagaactcctaagaaacaataatataatgaaagattagaaagacttacaaatattaaataaatcaatgaattgtaggttaacatgtcaacacaagctgatattagaaagaccccttcctcccaatacaaacacatggatcaaatataataatggaagatttggttgtaatgtcaagcttgaaattgacaggaaaatctccaaactaaattccctgcatacaaccaggagtcgtaaggggctgatcatcccatgaaatgaaagaagctcagccactgaccctgcctaggaaactgtaaggaagctttgccctctgtctaaaatattaggtggaaaagaagtcacccactggaagccagcacctccgcctgcaggtaactgtggaatgatcctaaactgagatgtttgcattgtaactggtccaggtatggcaaaatccatcagcctaggcagaggcaaatgtgaaactacactgtggttcagattccatatcctgagtacataacaagaatgcccaaatcaaccccctgctggagaagaatttacagttggagattataatctgtttaaggaaataagtgaatcactgtaagaaagtattagccagacacaacaaataggagaatttgtaagccaaggaagagaaaaaaggatatagtttagttgtaaagatactttgaaataagtatttgtaaggaaggaaggaatacaatgacaatgaaagaacaaggctgtattgtaagtcagagcaggcagatttgtacaggagccaaacagaatcctcct

SEQ ID NO: 50953 - DNA, 963 bp, Homo sapiens
aggggatagctcttaactactatagtaaattggacttgaaatatggagatagctgcatattttaattgctatcagaagaaaataaaaaacacaaaattaacattttattgtatttcaacctcacatgtggtcacaaagtactatataatagaagagaaaaaaattgaattcatttatatcaacctctttcttttataaataacctaagtgacactgagaggaatgaagtactttgatcaatattacatatttatttaacagacaacatgagattatagcccagatcttctgactgacagcccagatatccagcaggcttcataggggtacagaatatttgcctggtgaggtatataattcttcaaaaaactttatgcaagcgtgtaatgctagcacattccaaacatattacataacatgggttaacacttatcttttatggagataatgagttaaatgctatttgagaggccactgaaattcaacgagtatttattgagtgctcagtcatgttcggtattgttctagatacttaagtttcatcagtgaatgaaatgaaaaatacctgatcatatttgtttacattctagtgggtggaaacaaacattacacaataggtacaagaagtgggcaaattctacgttagacactgataagtgctacgataaaaagaaagtagagcagagtgagcttgggagtgccattttggcgcctggcgggcaggtcagtctcattgaggaggtgaggtagtaagctatgcatataggaagggaaagtgtcccaggcagaaggaacagccaatgcaaaattctgagcaagttctcttccttagaatatcaggttgaaaatcgtcgacaaagtggttcaatgctctaatctgttttgcccaattcaatcaattgtgcagaaattgcaggtgacttttatattaatgatttgaatcatgggactgaggtcccttca

SEQ ID NO: 50954 - DNA, 1861 bp, Homo sapiens
gttcaagggattctcctgcctcagcctcccaagtagctgggattacaggtgcccgccaccatgctcagctaatttttatatttttattagagacggggtttcaccacgttggccaggctggtctcgaactcctgacctcaggtgatccacctgccttggcctttcaaagtgctgggattacaggtgtgagccaccgcacccagccctgtctctataaaaaataaaaaaaattagctggcatggtggcttacgcctgtagtcccagctactcagaaggcagagagggaggatcacttaagcctaggaggtcaaggctttagtgagccatgactgggccattgtacagcagcctgggcaacaaagtgagaccctgtgtggaccaaattaaaaaaaggaattctaagtttaaagtcatttctcctaggaacttttagggtttcttgtatcttaacactcactcaaaagtttgttgccagcctgattctcattcctttatggagtacttgaactttcttcctagaagcttttagaatcctcttcattcttgctatccttaaatttcatgatatatctatgtatatacatatttttcttttttctgttcagtactcagtaggtcttctacatttgcagaatcatgtttccctttagttctgaaatttttttcttattaagcaagtttcatccaaccactttctcttctctaactttcaggaacttctactattctgatgttgaaaatgtaaattcttaggatttatcttttctttctctgttgttctctacttttcctcttttctttaatcttgtagtaatgcaaattgagcctaccaactgaccttacagactatgagacagagaaataaatctctcatgactcatgtttattctttccacttagttaaaaggtttacccaatatcagcccagctgggtttagtgggtgagtgctacctatgactgtgagtattcattcctactacaagtcaagattcattctcagtgctgtgtatataacagtgaacaaagaaaaaaattcctgacttcttgaactgactttgtagtagagggacacagacaataaaaaattaaaatgttgcatgtccagtataattctggagtcagcagctgtagctgcagttttctgattttgtaggcagctttttgttcagagacaggcagcagcttctttggtggcttgctcttatagtgtgactctaggaatttttctcagagttctatgtttcttcagccctcctatgattcagcagaatatgtaatacttgttgagaaattctttttatctttaaattatagagcacatagaatgatttctatgaattctattctctgtaactgaacctgactgctacaatagtcacaaaaataaattgtacttttcagcaagaagcctccttggtatttttctttctgtcctctgagaccaaactctaggggcaaagctcatttaagttcccagcacagcccctacctcaattttgtatgtactcagggaagcattcctactatttgccatctagacagataatttaactgatgagaattccaagctgacagctaaacggaatactgtaccaaaaagtatcaatgagcactttgggaggccgaggtgggcagatcacgaggtcaggagattgagactatcctggctaacacggggaaaccctgtctctactaaaaatacaaaaaattagccgggcgtggtggccggtgcctgtagtcccagctactcgggaggctgaggcaggagaatggcgtgaacccgcgaggcagagctagcagtgagccaagatcgcgccactgcactccagcctgggtgacagagcaagactccatcaaaa

SEQ ID NO: 50955 - DNA, 2345 bp, Homo sapiens
acttaaaagtggttaatatactcttagattgcataactctggggcagtctgagtcctatgattttcttttaagaccccaagactctaaaatacctgctcatcacaagtttgttcagtgacaacattcagtaaaacttaacatttgttttacaaaattatgttgaaagatataaacataaacgtatatttgaagcacaaaaataattacggctttttttggaagcggagttagacatttccgtagaaaagtagatgcaatcaatctctcctgatttttgtcctccccacctttaatttttgacaaaccgaataacgacactcactattgagtacttttctaactccctattgcatcacaaacgcccgcaggggcttaaaaagcagcaggggttcctgcccttccccacactggccggtgtggtctggggcgggcctgatgagcacctggattttcacccggcgtgctggtaattcctacacttgtgggtgtttgagagacatgaagaggggaggatgacctcttcccggaagcgggacttccataaaagaagcgtggtgggcgggtcccgggcacctgtggtttggtgagtcctccaggtaactgtgatgcgggggtcagcgggagaggcacccggaagctcccggcgtctgcaccccggcagcgcgaggaaatgcccaaaggtgggttctcaggcgtgggaagctcgacccttcccggggtcctcggcgaagtggccgaggccgcgccttacgcagggaactccgccgggccatctgggtggcccgagttcgcagcagcttctcttccgctcgtccctcggccctctcgacgcgcacccaccggcctcaccaagtcgcacgcagaggggcggcggggcgctgaccgaggtctaggtctcgattgccgccggtcgagccgcgcagtttgcctgcagacctcggtcccctgcccgcgcagcctcggctccatcaggcccggcccctcgcccgggccgtggctccaccaatcgcagacttcgcccgccgcagccgcacctgcgaggaggggcccgcgcgccgctgcagccgccgtcgcagcgtccccgccccgctccgcccctatcgcggcgccccgagatcacccgcctccggcgcctggctccctgcaggcgaggagcggaagccgctatctggaggcggactccggcgccacagagccggggcagccgcggcaacggcgaggcgcgaggcaggggcgcccggcagaccccgcgaccccgagccagcgggcgccccgagcgggcagcctcgccgggggaggcggaggcggccacggcggccgcgctcgggcgcccctcgcgcagcgctccatgcccgtgtggtgctgccgctgctccctggccggtcatttcaggtgacttcctcgccggggatgggaggggagcaggcggggatgccgcgctctcgagctttttggcctggcccgggccgggaccggggtggagggcgagcgcctggaccgcagcgtcctcccgcctcggccgtcctgcctggcgtgggggtggggtggggtgcggtgtggtggggtccttgctccggggagccctgcgctgttcccttttctcgctctggaccgcgcgggtcacgggactgcgggatcggctaggccggactgagtcggttacggcgagctgagacttcccagtagtgcaaagttttagtgaagggggttctacgaagtgcctgcctccctaaaaaaaaattatttcttaaaaagtcttctaaataatgtaatgagtggaaggaaggtagggaactacatttcagtgtcatctaatcacaaatagattctgccttgttaagatgttagccatggtaagacgtgtgtgttgtagaaatttaaagaatgaggcggttttacaatcaccttatggggaaaggttttaggggtgataaaatataatacatttctaaaataaaagtatgttttctagatctagcacatttggtcaacacctcagtcattggtggaaagaccagacactagaaactgattttaaccctggggtgaagaatggttaagcatagggaatactttagtaccttgctttacatatactgatgttccagaataattctatgtaagacttcttccctggtaaaatatgaaattttgatcaagccttcctaaatagtgggtttcatacaatttaggtaacccatgaacttggatggaaagaaaggtatatcatttcactaaattttaaaaactaatattcagttaaaatataagcaacaaatcacagtagtatctgtgactgtcatcagtagagatcataaaatatgtttatatcacattgcagtta

SEQ ID NO: 50956 - DNA, 1714 bp, Homo sapiens
atcaggaaactataaaaaaagatgctcaagcctgtaatcccagctacttgggaggctgaagcaagagaactgcttgaacccaggggatggaggttgcagtgagccgacacagtgccactgcactccagcctcggtgacagagtgagactccgtctcaaaaaaaaaaaaaaatcaagaaaaatgtgaataatataataggagcttgccctaccagatggcaaaatatgccataaaactaaaagtatggtactggaccatgagtaaacaacacagaccaatgcaacaaagtccagactaagatgcacgtgtacattttttgaaaatttgtttttatcttaaagataacatctccaatcagtgggaaagggttatcagtttcttttaaaattgctgtaaatcataagttgttggagtaacagtatatatattggagacatgcggagttgagtctgggagcataatttcattacccgagtggcagggagattagggcagataaagagtagggagtccagaagagccaggtctccagggacgccttgacctgtgagtcttcacagtataaaatttatttagtttggcgctctccatactctcttaccctgccagtccatttagtctctacatagatctttgccaatcatcatgtaaacttcccgaggacaagacccttcacacccaccacgggcaaccaattaacatgtgatcacatttcacaccgctggaaatgaatgggaaaaaatcgacttttcccattgttctgatgacattgtggaaaaggagtctgaaacaaaactgaaagtaagccttttcgtggtagtcatttccccaaactgtccagtagttcttcacaagtcatgtgtggcccccgtgtggtccgcccatgctaacttcctgccgggggttcccactaggcgcctgctgccgcttacccgcaggccatccagccctagcgctgcaacggcgcgggggtgaggctgggagggagggggagtcaggggaggggcgcggaggactgccaccagggggcgccgcaatcaccccaccgcccgcgctgaattccagctcacagccgccgtgctgcccgggaagaatatgcgcttgccatacagcgtactcgccgcttctgcgaccgcttccgcagcgtccccgggcaggaacggacgcgacgcaggaatcacccgcaggccctcccccgaggcagtcgctaccgggaaaataggccccgaggcttcccttctgcccttacctcctgccgggcccgcggcgggcagcagtttccacatcggtccggctcctcagggctggggccgacgtgcaaccgcgtaaccggggctgctagacgagcgcggatacggcgcctgcggtcggcatgggctccgggacgtgcgcgctcccgggagccacgcaggctgccttggatgaggcgggagtgcgacttgggcgcttgcccgccacctggtggttggaaaaggaacagcacaatctgtattgaaatgtgctgcgttaaaagggtatgtttctaaggtgtcgctgaatgtaaggttactacctttcctgattatgaacgaaaagaattttaaaaactaactccaaagcaacataaggaaaatttttaattaaatgcattaaaatacttaccagttatgtagtttcgtgcgtttgcagtttcttaaattgcaggtattcctttggaatctagtaatggtgataa

SEQ ID NO: 50957 - DNA, 2608 bp, Homo sapiens
ggctatatttggagatagagtctttagggaggtaattccagttaaattaggtcattgagggtgggccttaatccaacacgactggtgtcctcataagaagaggcaatttagatatggaaaggtacacaggaggatcatgtaaagacacagggagaagatggtcccacagtggctccacaagaaaccaactctgctgacttgtggcctccagaattgtgagaaaacaaatttccatttaagccacccaatctgtggtagttttgttcctggaccaaactgagggtcaggctgctatttcttgctgccaataatgagatgtcgatgaactggggatgaagaaagtttttatttctgtaaccagttacaggcagaaggcctggaaattatcaccagaccaactcaaaattacaaagtttttcagagtttatataccttataagctatatgtctacatgtaagtgtacattcctctgaagatataaatgtttctttatcagcatttggaacatgccaggcaaatagtaaacactcaatatcatctaccatcagcctcagcctggggcctcacacccatcttcttttatctaaaattctgaattagctatgaatattctcattttacgaatgaggaaagaaatgtgatctgagctaatgccttgtgtcaacaggtatattacactaagatggagaatgatatactgaatctgtgtttgcctttaacgtgtgtttaacttcgagaaaaaagccaaggctgggcggtcgcagtcacgctgcatccggcgacagggggcggtgtgtcctgcgaaaagtcaaaacgccggaagctgcccttagtgtttttcagcctcttggtcttagggaaagtgaggccgtgttttacatccaacatattattattctgataatatgtgacttggcgccacgcgcactctgcacttaaacacgcacttaagggataaacacatacgactgaaaaagagtttcgcccttgataggcagtgtatggggtgcgcagctgcaatctgcaaacccttgcagggcgcggggtttcgtacacccgctcaaggacgcaaagaacctccattctctgccatacaaagcactcctggcccagagagcaggaaagagcatcagctaggcccagctaggcggcgccctcggccggactctgaaggtcagggccgctgggcgtccacgccgcctgggtcccagtccccgtcccatcccccggcggcctaggcagcgtttccagccccgagaactttgttctttttgtcccgccccctgcgcccaaccgcctgcgccgccttccggcccgagttctggagactcaacatgaagctaccggccagggttttctttactctggggtcccggctgccctgtggcctcgctcctcggagggtaaggcggccgggggcgcggggagcgaggacagggcgtctcgacgcgcaaagagagaggacagggcgtcacgggggctcggggagcgaggacaaggcatcctggggcgcaaagagagaggacagggcgtcccgggggttcggggagcgaggacagggcatcccgaggcgcagagagagagaggacagggcgtcccggggcctcggggagcgaggacagggtgtcccggggctcaaagagagaggacagggcgttctggagcgctaagagagcacagagcaacccggggagcgagagagaggacaggacgtctcggggcgcaagagaaagggcaggaagtcttggggcacaaagagaggacccggcgtccctggggctcagggagctaggacagggcgttttggggcgcagagagagaggaccaccaggtcccggagcgaagggcaacgccgggagtgagcaccggggcccgggtcgtattccactgtcagatgaagccctgatgtgtgtaggggaatagggaagagacgtgattttcgaagttttcacagttctgcaagtttccaacttgtgtgtaaataggtagaaagaggtagggaaggatacggcgcccgtccaccccttaaggagtgagaggggatcaggccgagcgagcactgacctttgacgtcctttgttgtgaggaaagtccatctatgtgttagttatggaattaaacactaatacaaacaaattatcataaaaatgaaacaaaaacaaaaccccagctgtttatagactccccttcccagatgtatagctgggagaggtccgtctcacactggcttccccctctctctggcccacactcctgtcaccatctccattgcacccatagtggaaatagctaggaagtgaaaacagctaggaagaagaaagagaaacaaaaacaaaaagaagcaataatatccaagacaagccctccccacatctaaattacaaaattgttataagtaaactaaaaagcacattttctttagccaggtagaaaaattaatatgtcaactgtgaaaaaacttcttttgatttgatagaatagacagccatggtgttgtttttcaaaaaatatgggcagcagtagttccaaataggaatacaaagaattagtatggtggttccctcaagtaaggtatctttcttttaaaaagtgagatttgttcagggt

SEQ ID NO: 50958 - DNA, 1024 bp, Homo sapiens
tgggttctgggttcaggctaatttacatgttaaatgtgtgtggaatatgttgtcttctcttaatttctactgccctcggtatctctcatgtacacttaatgacttctgtctgatgagtctccatttccttttttctggctcacatttaaatcttaatttttctagaacacaaaggcagtgcagatgtaacagggatattgaggtaaagatgagagaggtagaaaaatctctctcagttcttttcagtaaacaggagacctgtttatatgctgttaatgaaacaggcaaaaatgtgatgaaatagatcaagaacaaaagtccaagctcatgttgttgggcaagaggcaagaagaaatcatggatctagtggatatcttaaatatcctgacttgatcattacacattctatgcatggaataaaatatcacatgtaccccataaataggttaaaatgttatgtattaataaaacattaagaaaaagaagaaataattggaccaggcgatattaggtacagtggtgactcattacgtcctcattttttgggacctttgctcttgcaagtagttttatttgctaacttcccaccagttcacatgatagcatcctgggctaagcatcaccatctcttgcctggcttgttatacaagtgtcctaatagtttccctgcttccaaccttgccctctacactccatggcagccagaacaatccccttaaaacttaaggcagatcatgtccattctctccttaaaacttagaagatgtttcccacttgcctcagagtaaaagcctaagtctccgtagtggctgactcagcctgcatggtccagtcccctttacctcactgacctcttctcctgcccctgtctccctccttccttcttctccagccacactggcttcctgactgttaccccatccataagcatgccccctgcttagggcctttgctcccaatcccttttgcctaaaaccctgtgattcattcttctccttcacgtctttgctccaatgtcaccttc

SEQ ID NO: 50959 - DNA, 565 bp, Homo sapiens
atttcaatcatatattcacataagactacatgtctgtatccatgtgctttctaatgcaattggagtctggccaaccaagtgttacattaagtaagacaagcatttaccgaatgcctaactggtgccagaaactgtactatagtgatgaatataaggtcgtgtccctggcttcctaagcatcctgatatgttgaaatgaattgtggcaactccttagcaggccaatttggaagccttccatttgcctgtttttaatagggtacaatttaaagtgttgacagagatattgacaatgttgtctggttttgaaggccaattctgctgggttgagaaagacagtgggtggttcaggccaatgagaaagcaggagcaaaggccagaaggtgaaagtagttggcaagtttttggaattgtgagggcttggtaagtgtagagtttacttctacatggcagatcagtcacgaggtggggctaggaaagtattaatacgttggcaccatattgtccagtggcttgaatgccatgctcaagagtttgatttttgtctttttgactttggaaggcat

SEQ ID NO: 50960 - DNA, 1582 bp, Homo sapiens
attatctagggaaagctccatatgatgctttttctgtgttaagccatttgttatctgctccaatttgatatttctagtgtcattaacatacccattttaaaggatgactggctttgacgttttttggtgaagtgtttcataatagagatttcagccttgcccatcatcagtactaatttaagagttctgattcagagaaatatgtgttcattacaaatctaggctagaaatgctttcacttcagttttctcatcacaggaaacaaagcgatggttttcatcaacttgttttcaatatatttgaatactttcataattttctaagaagacatattcaaatatcttggcatttgtgaatgagacccttcactatgtgttctaaatatactgtcattccttttgttccaatcttttggatcttttatattaccacagagctagttataaacacaaaacaaggtcatttcttacgaaatctgagttcagtggccagcctgcctattaagaaatcaggtgaaggtgagggagattctgattattagcatgtaaataacaattaaaccaccagagagagcataagaaatattggtacatttcttataaagagtatcatgtaggccactgagaggtgtaagctaagctcatattcataaatgagagcactgagctatctctatactgattaatacattaaattgagtcataatcagagggtttcataagactttctccttgaaatcctgaaagaaatgctgctaggacccacatcatgaacttctccttgtgtaaaagagccagaagatctgtaattagtcagacacgatgcctgctttttacaaaacatgcatttccaatgacgtcaaaccaagtgagattgcacaaggggctctcacttcctgtgcttgtgagcatggctttcagcgtgtgctaaccacagctcctaagtacatggcccacattgagtttcatctgtgtctagattcaagagtagattttagcaagggggcaaattgagccatcaattagcaaatccatcccattcaaatggcagtgcccattgcttccaccaatgtccaggggtcaactgtgtgtctatgctagggctgtggcacccgatgcagccacacctcaaaatgccttctccttgacagttcactgtggcacttttccagagtaatctgagatatgctaagggaggcactgacctccttttgaaatcccataaagggctaattcactttttttttctctctctctcagaccaatttctgagcagcaagcattcagtgtaaacagaagtctggaaataaagaccaatcctaattcttcatgattaaaaatttactcactcactaatttttgctgcttcttatcttcaaaatatctagtcaaattttcaagttttagagacaaactccaactttatatcatttaaaaaaattttaggatagcctagtttttgtatcttaattaggttaccagatctctattctttgctacataaatcctacttcatatatttaacagtactttaaacatagtaacaataccttatatttgtgctacgtctgattttttttaaa

SEQ ID NO: 50961 - DNA, 834 bp, Homo sapiens
gggaactctcatttataaacccattagatctcataagacttattcactaccatgagaacagaataggggaaaccactcccatgattcaattatctcctacctggccctgcccttgacacgtggggatcattataattcaaggtgagatttggataggggcacagtccaatcacatcagcaacatagtaagaccttgtctctactaaaaataaagcaaaaaaacctagctgggtgtagtgatgtgtgcgcctgtaggcccagctactgattaatctgaagtggaaagattgctagagcccaggagttaaaggtcacagtgagctatgattgtaccgttacactccagcctgtgtgacagagtgattccctgtccccatctctaaaaaagcaaagaaaaacagaaaagaacaaaaaaaaggcttactacagtatttgtttgaagtttctcatttaccttaaaaatttaacaaacctgattttcatcctatccttctatattaaaatgatttttaaaatattgatctaagcaattgcaatttcactgcaaatgttccaagtaaaattgacactagaggaagatgtgttatgttccatggtcacatgtatcctaggcacaaggtccacagacccaagggtgtggaaacctggatttggacactatggcctaacggattgttttattacagacttgtgatatgcagcctcaccctggctctcattctgatccacaacattttcattcattaaatattgactttctgccatattattcacaaatactgtattgaaatttcccctcttcaaattcgaacctcatttgtattttcctcactg

SEQ ID NO: 50962 - DNA, 727 bp, Homo sapiens
tgggtcataacaacagaaacgacaaaagccaacacgtgtttgttaagccaggctctgctgcatgtattcatctcatgtaatcttctcaataatcctatggaagtaggtatcattactttcctcattttacaaataagaaactgaagcccagagagaataaacaacttgcccaaggtcactagattctaagcagacagcaggatttcacaacaccagccctgtgctcccaactagtagacactagtctataatatgtgcataattaacttctgcagggctggtttaaggatcagaaatatgtggaaagagccgaggacagtagttggcacacggtagatggacaagaaaaggcccaaggatacatgctatattgaaacacaaactaacagaatcaatctatttaggttccttagcccaaccttctttcaaagtcctgggacagtttatttattattacccaagactgggtcaaagttcaagtttatatttcatactataggagggtatgaaaaagaaatttaagactaagactataccaaactactgctaacactaaactttatctctacagaaaaccccttatctgtttccactgcctctaccaaataccattccatagtcattgctgctgttgcttggaatcaagaggtttgcaaaaggcatttaaaagaaaagaaaaaagagaaaggttttaatttcatcacaaagaggcagattggttagtatt

SEQ ID NO: 50963 - DNA, 2305 bp, Homo sapiens
gaaagataaacagtaggattttcttctttacatcacattaaagcacaattacttgaagaagaaaaagcccatttcaaatttagcaaactccaaaatctggagtctgcaactagctcctccactgtttactgaaacacttcctttggtccatgtcgctaaaaacttgaatcaaaaccctggatgtatttatgtaagcaagagagaaagctttcctccctaaatgttgccaaagctgctacaaaagatgacaagtattaaagatgggcatttccattcatgtccctgcatgcctattgttaagagggcttttcatttttaattacattcccatccctaaaagaaacattagttttttatctaacaaactctctttcgaggctccgcgttaggtatgttttatgtgtaggacagacttcccaggctgcgatggaaagtaatcgtaactcctgccgtcaatgtcacttctctgctggtatttatctgatagagcgccctcctagggccgccacaagaccgctcaaaaacagacttggagagggataggccagcgggaccccacttaccgaaaacactgcattctgaagcccaaaaggtatgggtgtcagtctggccagcgccaccactttcaggccgcttcctccctccactacgcgaataaccgcgctcagcttctcgctgctctggatcctggcggccacccaggcggtgaggagccgcttgcagaccacatgggcgatgaaggtgccgatgaggacgcccaccatcatcagacccatgcccagcacgaagccgtacaggtagccagcggccacgttgagcacgatgtagccccagccgcaggggaaagagaccacgatgaagcccacgacgaagagcaggacccccagcagcgagtcaaggctctccacccacagcaggaggtggtgaaggtagcggcggaccagggccagggaagcgaagcacagggcggccaacacgcagaccagcacgaggctccggcaccaacaggtgctgccgaggcagcagcagcgccagtttctcacctcagccacgccgaccaccacgccgccgccgccactcccggggccgcccgccaaggccccgcccggctccggcagctccgaagcctcgggcggaccgtggcgctccagataggcgccgagcagggcgcccgaggccgccgctgctgccgccgccgcgctcgccccgcccccgcggggaaggcggtccgccgggccgtccccgcccgcaccccgcggcagggcccagcgggccggcagctcggcgaggcccgggagggcggcgtgctgcagcagccggggcagcgcctggagcaggatcccgcccgggctccgcatgcctcggcccagcgcgggccctcagccggccagcccctccgccgcggcgcccgttaggcagctgcccttcatggcgcccggttcgcccggcatcgactccctgcgtccgctcagagggtgggagacggcccgtagaagggcgcggagtcagcggaggagcgacggccaggcggggagtgaggaaactcctgccccagcacccacggagcccactccggtggtgcccgccccttgtcggccagagggggcggggccgcgggcgatggggcggagcgggctgtgttctggtccgctcccgtgacgcgctgcccgccaggctgcgggggtcgcggggcgtccgcgtgggccagcggaggcccacagctgcggagggaaaccactgggaggggagaaggagctctagggagagcgaggctgcaacgaggggagagccgggcgacgggcaggggcccaggcgcgctccccgacttcccacaggcgcgcgcatgcctgcgtgtcagggcgcgcgctccccctctcggaccgaggcgaccccagtccgtgagcggcttggatcctcgcccgttccctcctggtcgtttccgcagtaacctcttatcagagcgggcagctgtgagtggcgctcacatccgccgctgccctgtcgaatgggggaaagagttcttgtgttctgaggagggtttggctatggtccttgaccctattcttgtctcagacttgcctcccaggtatcgaggtctccctgtgggtttcatatggcttggtcctttaggagctggaaaaattaggcataaagtccccccacccccttgacagaacgccccttctgactccagaggtcctttatcgagtgccaggcattggtctaggggcatttgaaaaagattcactgaaggacatttttaagagttcgctttctcagagggcagcttctcaaactcattcgc

SEQ ID NO: 50964 - DNA, 904 bp, Homo sapiens
ttttgctcctttggaaacagaaaaagtgcttcaccttgtatttgtgcaggcagatacattctaaagcttgatgagttaggtgatgaagcccctttctttcttgagttatcttttacactgcttaagtggacatacgctgtgggcagtagaaaaagaaggaagggtcagtgctcatggaataggcagtaagttggtccaaagagcatggagcacaatctgcatgacattgcaactacaaagcttattgcaattccaatagtggacaagagagatctcctgcttaacatagcttataccatcttcaactaagctgaagtcttggaaagcagtaccaagacttaagttcctggagaatagagcaggccacagtcccaggtactcagctaagcaagtgtggtatgactgagagatacacaggaaggaacaagaaaagagagagagatggtgtggctatatatcaagagaacaaagtaaagatcaaagtccagagtacatcagactaacatgcaatgaacaaaccgggcttgccaggcttgggtttcagcaatacaaatttggccaaggagccatggcagaactgtgctccaggtattcagacaagccctgaactggccatcagtaaactagcagagaacacagagtccagttagaacttctttctatccatgaaccgaggcttggctgtggaaactaggcagtgggctgatctttgtccaggctttaagtagctttcttggcataagcagatacaggccagcagatgtatgctttttttgagagagaggcatgattttcagaatactttgcatgccagatgagggatggagtcagaggaaccacaaagctgtggagagaataacatacttttgacagatttttctcaactcctcttaggccctacttg

SEQ ID NO: 50965 - DNA, 535 bp, Homo sapiens
ttcttcaggaagttcttctagttaccaaaggaaagcattttaaggaatcaatatttgttccaagtcattctttctaatgccatgacttaaggacaatatacatttgccctactcacactggtattgtgattcaaatgagaaacatcagtcacaaacatgagaaacttggaataaaactttagtccaagctcagccacttccaaatatgtcactgtccttccctcctgcctaccacatcttggagtttgcagatctgctgaaattctggactccaccgctcattccacttcaaagctttggcatggctcatagtcctagttgtgtgatgaaatccctcctggcagttgatacctcccttctctcttgatggtgtcaccaacattcccaaatcatccttagtgcatcccttccttttctgataggagaatttgaggatgtcactctcctttccatggcttcccattgcccatagtggtctcgaatttactctgcatcataatctcctagggaacctcgccctcaacccaaagattgt

SEQ ID NO: 50966 - DNA, 1952 bp, Homo sapiens
ctcaaagaatgggcaattttaataaaggaaaaagagaagagaagaacctgcagataatgaccctactttgactttttaaggaggcagctatgaagcctagttccatcagaggccctctttcatgtccagaagaggctgtggtttacagatggaggggtcaggtcatgctgactgcagttggtatttcaccttatttacagtttctcgaatgaatgtataaatagcaaactgtgatcttgcaaataatcttgaatcaaggggacttaaaaaaaattcttaacagattgctagagctgtggtaggtagaagctccaggtcaactgctggtgtaccccaaatccacagaggtccctattagtaatcattttttttcatgattgttttctattttcagacagtcctaccaatccttcctccccatcccaaccagaaataaggtatagtgataaattatttttattttgtttcacgtacctataatttcaaatagccatttttttcctttgtagggattttcttttatttatcttacttagattgctagcgggaacatttatattcctaatagaaagtgggagttaattttctgcctaatgaaaggacgagtacaaagtacactgttctatttaaaaagaaaagctgttttactttgcccaaaaatatagttctgaactacagttgcctgagtgaacatacagccccatttctgaagaactgaactttgaaattctaaaagctagataagggagagaagttaatgcagacattcatgggggataaacagcacagtatgtgattccttctgtcacgagaattaaatttgatatgactcatttcttttgcctgaagtggaaaagtgcagagggagagattaaaaattggtctgtgttgtgtttctcagatctgataggcatcagttattatcatgttgaagttgttctttcccatttttatttacaaaaaggaaatactaaatattgcaaaccagaaatactaaatgttatttgagaattaattagttttggcaaagttcttattttcaaaataagtacatccaaaagaatgtactttcaaaaagaaaatgaatatgtgcaaaaaaagctattataggtgcttccccttggctgcaggacaagagagctcagggccacatggtattgtgtgacatccctttggaatgatttatcccgtgacctgtcagttgtgtaataacacatggaatgtagttctaacagccgtgcagggttattgaattgactgagatctctgggaaactttcctacaatttctttggatttcagtttgaatttctgttatggatcatactcactttttaggactaccaattatgccacaagcagcctagtttctgacagtatgggaaggagatgttttcatcagttgtacatgcaggtttcagaatactggctgtgtattattactctgtaagactgaatgtctatctgggagaccacttagctttattttatgaaccaaaataataataataataatgtaataacatagctaacatctatggagccattaccagtttccaggtacaatcctaagtacttttattttagtaatgtattttatcctaatcttcttggggtagattcagtgattatcactgtaagtgtaacaggaaacgaagacaaaaaatgtcagctaacgccctcaaggtcacacagctgagatgtggatagcgatcttaagttgatccctgtgaattgctttctggtcctccttggcatgaagctattatagtttctagtcaatttcttgagaagatgacaaaaattatggctgagaagacagaaaatatattgaaggatttgttagttgtaatcgttatctactgtggaagtttctgtgggtcaggaatccaagggtggcttaagtgggtgattcctattcagagattatcatgagattgtagtcattttaag

SEQ ID NO: 50967 - DNA, 552 bp, Homo sapiens
tccggagtgggatgctgacagcagaggcgagcgttcgtccaccccatcagcagccatgactgcggcagcggcggggcctggggaggccgagccggggttgcggcctcggcggagtggtggctactgctgctgcctctgctgccgctgctgccgctgcagctgctgctgctgccgcctccgggagggcccgggatgtgtcacaaggcaggaagcggggggaggggaggggagggtgcaggaccaggaggcgggggaagggaagcgcgctgggaggcatggctgggggaggggaggggagggagaaagaaagaacccgcagagtgggaggagcagcagtggaggagcgggagcccagccagccagagaaaaggggaacaaattaggaccaactgggaaacgcgaggaaaagaagatgccaagtaactgaaagggggtcgagagtaaatgggatggagggggacaagtcctttgctctaggaaagacggataaaaagcagcctgaaaggggctagcgaagaggaaaggcctgtgacttgattacaagaaaactgg

SEQ ID NO: 50968 - DNA, 1754 bp, Homo sapiens
gctgctttcttttcattaaactttaaaggtatcctatgagccttttccatttgtagatctagttcgttcttcaattctggaaaattttttcaagtagatcctttattgtttcagctccacttgctctgtcctcagtttcaggtattcctattatgcatagattgtatctcctggaccggccctctagatctctctttttctcctcttaatttcttttccccttttctctgtattctgtgacaatttgtcgttttgcacttacttcagtaattcgattttgtggccaatccagcgtgcgcccttctgttaactctctcaacttcctggtattttccaagcgctctaatagtaccctctttatcatcgcgcataggtgtttaagctcctgtattatatgattctcaatccttcttatatcttgtttccatctctatatccgtttcaagaggaggcattttctcgattatttagcgctgctccttttttctcaggggcggtattacgaccttggagacaataaacataatttaattccacacagccccaaacagcccaaagattcccattgataattatcgacggctttattaaaatgcgttatttttctttcttaccttttcagttgcttttcttagaaacagggaccaaaatcaaagattaaagaggtcctctgaagcagggaatgaaatagacgttgaaaactattcccgttacgccatctctgcgcgcctcacgtcagggccaagagcctagcgcgtagctttatggctgactcggctctggcgctctagccaattccgaggctgcaaactccgcttctccgctcgcagtctggttcctcccctgccgccccgcccatcacggcagggtcacggtagcgcgcacgcgcagcaccccatttaagtttctcgtctttgcagtggctttgcttagatccggtgccgccttgaaggcggggctgggtcccagccgtagccaatggagccccgggtgagggttgaggggtggaaggtgcctactagccggtgcaggtttcttctagcgcgtgtgctggggtacctggtcgtcatggaggcggtattgaccgaagagcttgatgaggaagagcagctgctgagaaggcatcgcaaagagaagaaggagttgcaaggtgaggcggaaggaagtgggaatctggaagccgccgcgactgggggaagggcgcgtggcgggtcgattctggggaatctcaaggcgtgacttatctggatcaccctagacttcccctagtagcaagtggcctcttctctcttcacctaccccggcggccctttaattccccaaccttcagaggcttccccttctgaggcctgcggcgtgccccctaccccgcgccgccgccggggtgcaggtgtctgaaaatacctagaagccgccgtcttggtccgctcccaaacccacgatgcctcccttttctatacctgccccagttaccgatacttgtccctaatgggtgtattttgaatggacccgcctcagtttaggaggttcagaaaggataccggaaagatttaaaactggctacagtcaggtttttttccttctcttatctcgccaaacaaccgaaacatattcaagattttgttaatgaagttttttttttttttggtctcagctttatctgggatcttctctctctgtagctgcctgttacgtgatgactctttcttccataattactttttctgtacccttcgcccgttaccatcccctta

SEQ ID NO: 50969 - DNA, 2236 bp, Homo sapiens
ggtttctcaaagtggtaaatgacaccaaaaaggttagtcatcctcgcattaaaaggtaatgtttcccaatcttttcaggtatatatatatatctatatatatatatatatctagtgatattaaagaggaaaaggtgtcattcaagacattacaggttctacctaaccagaaccaacacagaatcaataatgaatagatgagttaatttcttccccatttctaaataaccctaagattaaaaaaaaaaaaaatcacaagggaaatttgaaaatacttaaagctgaatggcaatacttatacgtgtttataaatttggatcatatacacaaaaagattaaaagtgtaatcaataatgctttacatttgtgtggatcattactttaatgatactttcacaaccaattattcctccttttttaggaaggaagggcatatcctagagtctccaatttacagataacgaaacaattattgcccaaggacaaacatttcttaaccatgccagtttcctgacttgtaggccaatgctcctcccaatgttaacaagcagcacaagcttccttcctgggggtttgcactgtaaacctgccagaggaaaataaaagatttttacctcttttgttttttctctctggaatgtttgttgtgctgaatcattaggagacagagtatatgagcaaacaaaggcagatttaaaatggttatctgaggttaccatctcacaccatacttgttgatcattaagtatgagccgagtgaagcaaaaacagctctacaggtttagcacacctctccacagtagagaatgaaagggagattatacattggggctcctctagcaataaattgcttcaacttcttcaggaggcttattaagctcaaacaagcagcagagaactccaagtagaagaaacctaatctccaatccccttttcctagtcatccacgcggacaccaacatctgatggattcaggaatacaccaagctccaagaaaaatacccccgccccacaacctcaccaccaccgataaagccacctaatcctgtctgaatctcttctctgcaaatgttttggtatgcaaatactcgttcattaataagaggaagcaggaaaaagagtgaagaggagtaccatgggaaagggggccccaaaagggaacggcagaacccagagagctgcactgacaagtaagcgaccgcgagtaatcggtcagcacaaaggagccaatcccgagccgcgtggaagaccttgggaggtgggcgggactaacgtgtccagggcccagcggctggcgccagacacgctggcagggcgggaaccgcgcgttccttagcaaccgcaatggccacgcccaccgaacccagcaccctccatcccccatcccgcagccagcgccctactcaacgggaacgggtccttcagtgatcaccgtacctactgggtttcccggactccgggtttctcttgcagagcctccctccgcccagccccaccaagtgccgctcccagggacggaacgatcgtctcccaaacgctttagggctcgctaaagaggtgcgcccgctttcattcccggaccccgagcttcccgggcagggtctccccaatcccctcgcactcgccggacacacacctcagctctgccaaggcaagggccgacaaacttcgtgtcctgtgggaaatgttgctgtccacggttctgtcactcaggggcaggggcgggacaagccagccgcacacccctactcccaaagggtgaggcggaaaagaggcgaggctctgcccccaggggcgggaccaggcctcagcctgctctcggattggtcggcctttctcccgtctgtacgccggtccaggacgcaaaggcgctggccctgaggcctttccctcattttgatgccactccggagttctaatacctgtctcacgaggtgactgtagaaattaaaaataaagactgtgacttgtttagttaatataaaacggaaaaatatgttattttgattattgaaccctcccatctcacacacacacactccccaattcacaggatcatccctaaggagcgtccctaagtggaagggcgcactgtctgtgtaaacaatcaattaattgcccattcaaacagcaaaaaagaaaaaaaaatcgttttatattaacattaaccagagattaataaatttaggaaagattgcaaaaacgtgactgacaattaggatttaggagcctatgtt

SEQ ID NO: 50970 - DNA, 792 bp, Homo sapiens
gttccttatgagtcgattgctgaaagttcagggtgaatgagcctttattgatgctcatctactctttaaaaggaaatcactgcagaaatcaactgtaccgtacaaactaggtgaaatatttctttactgtggaagtctggtcaagttccctccagagacggatatctctgctttgaaagataattttcaggggtccaagcagaacaaatgaaatctttacgggttcaagcttctgatcatgtgtcaatccctgaatgcagtatttccaggaatgacccaacagtttcatatattgtgaaatatttgagatcgtgtcgtcatttattcctggaagagccactggccaagagagagggggagggggtgagcgtttctgggaatggtctgaaaaagtggtgaccccaattgttttgatgtagctgaagacatagttaaaggaaaggcatataagcgtgtgcaaataatgggaaatggttaatctatgtagtttatggaaaggaaatattctgggctttgaaatgctaatttactagaattattattcaaattcaaagaaaaaacatgtttccaggaagctctgcttgaccccctgtcttccccaactcagaatgggttttgggtctctctccctacatttctaaattgattgcataaagctttcacagagcactcacaagatcatattgtaataatttttgtgtttatgacctactacttcttcaagaacagtgattatattttgaaacaactgtttaattccagatcttgtcatgatgtcagatgtagagtaaa

SEQ ID NO: 50971 - DNA, 2166 bp, Homo sapiens
ttaaccttgttcaatcatgatgaaattcagtaaactcaggacacatttttggatactttgttttcccagctaaagataagagttgctcctaagactcagacctttagtataatgtacactgatggtttttatttttttctttccagaatggacttcagtgcaacagggaattaaactgaaatcattaaattctttctgcttagcactttagagaaaatttctatcagcctgcctaaggttagtgaatactgtaataataaattgttaatactgaagtctttggaatttatctgattttcaaatgatttttttcacctcattaagtagagtcttattttctctgagttctttgggtaagaaacagagacaataatcttgatggtcttaaagcaaaggctctcagataaacttttttatttttgagacggagtctcactctgtctcccaggctggagtgcagtggcgcaatcttggctcactgcaagctccgcctcccaggttcatgccattctcctgcctcagcctcccgaggagctgggactacagaagcctgccaccaccccggctaatttttttgtatttttagtagagacagggtttcaccgtgttagccaggatggtctcgatctcctgacctcgtcatccgcccgcctcagcctcccaaagtgctgggattacaggcgtgagccacggcgcccggcctcagataaacttttggcctcagataaacttttaaatgccatggaagttcataaggacaggtcagaatctgcagacagttgagtaatagctccaaagacttgggttcttatttattaactgatttgtgctttttatacacaatttgacgtctgtttcttgggcctaacgtgacagtgctcaccatgggaaactgaaaccaggaatttaatctcaaatttctgaagacattcagacttatccattgttctatgaatcaggaatatgttaacagaagttctggttattgaagaatcttcagaatgaaaatcaaattatgaaatccccaggtaatttgacttcatggccagcattgcatctcagaatattttttataagggctacaaaagtgtgactattaagcttttaaaaaaaattaaaatatcttttcagttgtaatattcccaccatgggtgaagtctgctgtctgattgctagaattttggccgatgccttcttgcacctctatgaacccgactccagcccctcccctctaattactgcccacagtgaagagagaatttctgcccactccctgcaagcccaggtaggggagcatttgccaagaagcctgccctttaccgcaagtgtgcaaagtggcaaccgcagctgacaacatccccaggggccctgtcttgtggtctggccgcagtgagaattttctcggcttcctaggggagagggcactgacccagctttcagctggagcctgctgctggagaactaattactagtgtgaaaaaagcctggattcaggtcaatgttttctcaaacattgtttacatttgattttaaatccatacaatggcagaattgacatttgcagcttgctaccacattcatttgtgaggttttatgttactttatttttaggttggaaatgtttgaggaggcatttatcatgaaagccgtggcctttgctcctaaagcttcgtctcacaagtacaataacaaaaactgctaattaaaagagggaaaacaaccaggagtcaaacacaaaggggcatccctgcctcatcagcacagaacaatcgaccggctcccttcactgcccatgcgaggctccatgtgaggaagcctgctctgcccttccaggtatgtccatgtaaatctgtctatgagcatgagtgggagaaaacactcttctcttataaaataataatctgagataggctaggttattctcaataacaaagaagcctcaaatcgctgtgatttaaaccaacaacatttctttctcgcagtcccaaaagccactgtgcgtccaggtgactccagagctactgcccccatagagtgactcagtcacccagagggtgactcagaaatccaacggtggtgccaccatcacctggaggtaccatctggaaaagtgccctccttgttctatctggcaggagaaaaaaatgctagtctctcactagtaat

SEQ ID NO: 50972 - DNA, 1104 bp, Homo sapiens
tcttagattcaataacttgctagaacaactcacagaactcaggaaaatgttatacttacaattatagtttattataagagatacaaatgaacaaccagatgaggtacatagggtgaggtctgaaagggtcccgcatgcagcaacctctatccctcaaagttggagtgtgccatcctccttttacatggatgtgttcatcaacccagaagctctcagaacactgtcattgagggatttttatggaggtttcattatgtaggcagaattgattaaatcatcggccattgatgatctctgtctataacccctttgccgtccatccccagaggttgggggtgggctgaaagttccaaccctgtaatcacatggttagttcatctggcaatcaacccccatcctgcagctatctaggggcctgccaagatgtgtcaccacatgagaacaaaagatgttcctatcacctttatgactcaggaaatttcaaaggtttcaggagctctgtgccataaactgaggacaaagaccaaatacttttcttattataccacattactgcataatgaggatagaggccttttaatactcccatgctttttgataaaagtaaatagaaaactacagtaacccagcataggtgggggctgctgatagcacagacctttaggagtgaaggcttaggtccccttcctgccaccaggctaggaactgtgaagagttgaggtgcttgcttgagcaaagggatatggaatggctactggaagaaggaagttctaaataccatctaagaccatgtgactacttgcagaaaaaaggacagtagtacttactagtatttctttcttactttgatataaatatatattttctttttttctcctctctgattctcctactatctgatgtaagatgtgtccatagttgctaacattatatatcagcatttaagttacaagatatcagggggtggatatgttgagctagaggaggaatgaacattccccagtgagtaaattgacatatgaaaactcaaatgctcttttagggagtgagttagagtgtttttaattgtatcacattaagcagaagcaagacttttatcgttat

SEQ ID NO: 50973 - DNA, 1867 bp, Homo sapiens
caataggtggctgttattatgattagtattcataaattatggcttacttaactctttgattttcatgattatagcaaaggtatttcatttcccccaggcaagaaagatgttatttatgaaattataagttaataattaactataaatcatagtaagtatgaaatccatgcaataccattttgacctgctatttaaaaaaaaaaaaaaacttagtaatctgtggttatgactatagactggtgaagaataaaaccgctcagcacatttgtctaaatccagtcctcctcctgggtcctctgtatccatggttggcattcccatccatccagtcaccaagctagaagtcttggaggcatcctgtaccctctccatctctcccataccctctcaataagtcatcaagtcttccctctcttccctcttgccagccaactgtgcctgccatgtccacttttcacctagaccactgagctcatcacttggcattgtagattctaaaagatccatcatgatttgccctgttccccacctttccaggctcatccctcaccactccttgcctcgcatgtgatgtttcagaaacaccaaaatattttcaattcctcccacacacacttgttttcacaagttaccccgtctgcctagaatctccagtagaagctgaatctgctgtttcaggtctatagttaaacattaaactcaaaaaccactatctccaaaatgctttctctgactctcaaaggtagatggaatccctcttctctgattactcagcccccaggcatgcttcatcattgcatttatcattgtctagtgcaatgttctcctcaggggaagttccagagtaagatgattgtgagtggaaaaaccaactcaaactatgtttttctctgctcccacaccacaacagcaatcaacacagaagacttctgtgtccaaatatgtggaggattttcccccacaacaagcaagcagtcagttctgcagtggacaccagctgggtgtcctctaatttaattcaattcggacactatttccctagagatagggtcagatcccacaggttgagaacttagtcccacaagaccagcccccacccccatgagttgcaggtctgggcctccaaaacttccaactaactggcttcatgttggggttcccattgtcccctctttgggttctattagtttgctagagtggcttacagaactcagggaaacacatttacccttattatgaaggatactaaaaggagacagatgaagagatgcacagggtgaggtatgggaaaaaggacacaaagcttccatgccctcctttgcactccaccctccagggacctccatgttttcagttgtctggaagctcctgaacccagtccttttgggtttttatgaaggcttcattatgtaggcatgattgattaaaccattggtcattggtgatcaacttaatcatcagtccctctctcctccacagaaggtggggagaggggctgaaagtctcaaccctctaatcatgccttggtctttcaggtgaccagcctctatccagaagctgcttaggagcttttagccatcagtcaacctttagtatacaaaaagacatcactttggagattctaaggatttaaagaatgccaagaaacggagttgaaaaacaaataaattcatcacaatgttgcaatgatccaagttcaaatctgactctgtcacttactagctatgtgattttgagcaagccctttagtgtcacagtttcctaatctgaaaaaatggggtaataaatgatgaacaaaatgacacatataaagaactcagcatagcacctggcaaattataaaccttaataaatcaaaggtctcgtt

SEQ ID NO: 50974 - DNA, 1280 bp, Homo sapiens
aataaatttgcacagagcccagccaaataatgtgtagtaaatgatcaatgttatctgagggagaagatgattgatcctttatttcttacaccctctcatgcataatgcatacaacccaggatgtcctcagcttgcctcaggacctagcagtgatgtaccgcattaccatgcagaacactcatgctgaatttctagggaccgtctccacattcctgagcaagtgagagccaggaatgcttcagaaatcaagagtccctgataacggtgtgatggattcttgaatcttttccaggcctttttacaaacatatgcatgactcagggaaagtctcagagagacttcagacctcagtatcctttaatgcaaaacataattggtaatattggcttctttcagaatatcagttaaaagattagaaaaatggaaatctttcgaaaaaccaaaaatgcgggagatctctataaaggaaaatgaactgtattaactttttattatagtgattccatttcagagaaccaaggtaatcatttgtgattttgaagaaagctggcttctcaaatgttgtatgttaagtttagactattgttgctaattctctatacccattaaatagtgatgatgatgatggtgatgataacaataatggcagctaacatttttaaactcctatttgccaggctttaagttaaggactgtacatatgttatctcatgtaatgtaaactaaggtttagagaacttcattaatttgcccaacgttcatagctaataatcaataaattccagagccaccagtaccagttcctacacgtgaatgctactagtctggggttggggttaaaatagaggaatcagaatataaagtggaactggccatcctcaataactacaactggctgttagaagattttgtaaactaacaaaaattgaaaaaaactgatgaattttagtccttactatgagccagtcgcaatactagattcttcacataaattttaataataataatgaataaaatgataaccaatctgtagagtagatgatatctcgccgtgttggttattaagtgagggtttctcaatttaaaaccagcttctctactctgctcacaagatactggggctgcaactctggaactctgcagaccacgtcgtttccgctttgccagaggctccattaggctctgccaagagggggcgccagagagaccacgacgctaaaggagtaagagggattttgatccttgttgttttacttcctattcttgtcagcagcatctca

SEQ ID NO: 50975 - DNA, 2617 bp, Homo sapiens
ggtttggtagagaactgtagtaatatgttaataggaacaagactggtgggaagacacatgaaatatttaaaattttgaagttgagaagcagcatggcccagaacgcacgaggctaatattaccgattctgcagccaaactaactctctgggttagaatcttgaatcttccacctaacagccatgtgaccaagagaagtacctactctctgtgcctcagtttcctcatctctagaatggatgcacgactgagttgtaataaaggttgaataaattagagggctatgaaagtgcttgtgaaatttttcaacaagtattttgtattagtcagcgttctccagacaaacagaatcaataggatataaagatataaagaattcattatgagggattggctcacatgattatggagacttgggaagtcccttgtactgccatttgcaagcttcagacccaggaaacccaatggtgtcattcggtcaaagttcaaaggcttaggaaccagggaagccaatggtatgagttcccgtctgagggcaggagaaaactgaagtcctaactcaagaaagtcaggcagacagaatacttctatgttctattcaggccctcaacagattggatgatgttcagccacacactgggatgggaaaactgctttactcaggttaccagtttaaatagtaatgtgttccagaaacaccctcacagacacacccaaaaataatgtttaaccagatatctgggcatcctgtggcccagccaagtggacacataaaattaaccatcacacatctgttggactaaaaccaaatactatgtgtgtgcagtgaaaacaaattcctggaagatgaattatttgaatgggaaggaattcaccatctgggggtgtgcaggggtgcactctcccggatggaatccaagcaaaggccaaggcaggaaggtgagagcaggtttgggaaaaagtggacaagcacacttagctacagccctggagctgtgcctcaagaagacagacactggcctgaaagagtagattagaggcttagcaacaccctggctgccaactaaggatcaggatttcactgaaagattttaaataaaggagacccctgaccagtgctatacttggggaaagtcaacctgtcccatggattagatgaggacatggggacgccagttatgaaaccattgtgtaacaaaatatcaggagaggtatagtacaggctaaagcagaatttgagggtgaaataaataagaaacagaaatgaacagtaactgagtaaagagagtgatggaagaaatggcatccccaatacaccaagcccaaggtgtcattcattccaagtttgaaggcttagaacctagggagccagaaatagaagagaagacatagaaaacaatgacaagaaagctgagaagtagaaaagaaagaaatagaaaactgtggaaagaaatctaagaacttgctacatgtcaaacatactgatcacttttctataagttttcccttttgatacataaagataactgtggaaactggtaaaattatccccttgtttacccagcaagaagctgaggctcagaaaagtgaaattatttgcctacctcacatggccagtcagaaacaaagccaggatttaaacccaaagcttccttgctccagagttcatgcttactatactagaccacgctagttaggggatgcagagggtaggagatttcgcctcttttttggacacatcactggacttccagatgaatttgttgaatgggtggcagctgtaaaagcatgaagaggtctgaggggagaaatgagggttagagaatggaatccagaagcttcatggaggttttgtaagaattagtgaagccactgaagtgaataatctataacagatcatttataattattaacttgcacgttcatgtgctggaatgtaatcatgtttgtctgaagggccaacacagcagttttaaagggattcacaaacagaagaaagctgctgttctctccagtaagcaatattttagtggcaaaacaccccgtgaatggtttgtgagtacaaagcagcagcatgtgaatagctttttacaatatcacgttctctccttccacttgggaaggaagcacaatgctaccataagcagatactaacagagcacagatgctggcgctgatgtcagcgtaaatgctgtcccgcaccagaaaaaaaaaaaaaaaaaacctcccaaagtactgtgcctgcataaatcttatatttttatgaatcactgccatcactgcaacctcacactgaaaatttgtgtcttagatgtgaatggattattccagatagtttctcttagactcataatttatacttgtccacatatcatatccaaacagggctttgcttcctaggttgcccaagtggcagcctgtacctagtgtggctaaagttcgaaaatatcatttaatttttatccagaggagcaaaatcggtctgatgcttctgttgtaaacatccaaccacagattcaacataaatatttccacttctgatcaacagcagttttccagagccaacaaatacattccactatacaattttatgctttgtaaaaggtgacctatacttt

SEQ ID NO: 50976 - DNA, 2330 bp, Homo sapiens
cgtggtttggaatatttaagtaaacgaaacagattaaccctttaacattcctacagatacaggcaattttataaagggcatgaaaatacagtctcaacaactctaaaaataagaaaaaggaactatggatttacttgcttagattagacatcctttgttcctatgtgagttccggtcttttacactaatctttgatattgtttaaaatgtactctacctgtttttgaaaatttcacagatgaaaacaagacccctgcagaaagagtgtattcctaaagaaactcctgacagtcatcaagtaccttaaaaatcctactacaaagtgtaaccatacataaagaagatttcaaacaggaaagaagattatgaacaaagaaagtgtattagtatttacacaatgatcttggtactttcaatttcaccctggtgaaatatcaacatttcagtggcaacaatgtgtttgtcaatttggtgatctgttgaggaatatcacatccaaatctaagaagcaattacctttcaggatgcaacaaatacagttaattaacctggcaaatagagcccaaagagaaggattaaattgaaaagtaatcatatcatgatagggaggcatgaaaatattgcacgctgaagaaagaagcatgatctgatgtcttaaataatgaaaaccatgtcaggtggtctaagatggtttccttgcctcttccaggaatggtttctatgaattctagatgaatgggccactagattgaatccaaacccaaagtttcaatttgatttcatttaccttctctgagtcagacagggcttttctaaggtcactgaaattgtccacagtcacaagtagcacaaaccataacttccaggtcaaagcagaaataaattggaacttaccgttctcacttacaggctgctgaaagtttctacttctattgtaatatcaccgaaccaagtgacaaggtcaaatgagaactctcagagctatcaatctactgtagatacccacgtgggccaatggatagtcaagtcataaatgcagtaggatcagagaattgttagctcaaataagcaagttacttattgaacacctgttactggcgaggcactgtcctgagatgcagatcaagatgccacattggcctcagaaagcttaccacctcactaataacacagacaggttctcccacaaggttctgagccattaagctggtgtatgataaatatgaactaaatactataaaaggaatttaaaagatgatgagattcccgctgtcccagataattaaggaccttctttaagaggaatttaagatcaaccttgaaggctgaaaaagttcggatggttttagaagtctcatcaggtgggagaagctttacaacggttcaaggcaggaaatatttagtgggagaagtaggaataattggaaggaactgcaggtagccactctggttacagctgagaattaatgtccaaaactatgggagttaaaggaaatgattttaggcagtaccacaagtaggcactaaataacactgaattacaaagtcagaaaaataatcccgtagtaactctgttaattctcttcgttgcctcaagaagatagtctgtttggtgccaatatatctttaacaccactgcagtacttgctaaatccccgttcttaacagagagccaggcccaaggctcaaagtctacagactaaaacttgataacattgtttggtttcatgtgtttatttttagtattacctcatgttataccaagtagtacttactggtcttccatttgcgtggtaatataaaatttcctttcaagaagtttatttaaaatgttaaagattagttgttttttaaaaaaaaaatagatgatagaactggtgataatgaaggcaagtgatttaaaatttgtatctaacaggatagagtaaccagcaagatacagagatgagttggtctcaggccagatttgactcaaaccagatttgactggtttcaagtctagcctttgatttcaattcaatttgataattctaagtacctctgttttcctcatatgtgtggtgctaaaagaggcattgctgaggtcatgtttgtgaaatctccttcaggcctagaattttaacaaaaatatacctaaaccaattatatataaatgcaaaagaaacattatttatactggcaagagagagaaaagcataataggtcaccaagcctcagagatttaccataaaagatataaactaaaatacttcaccagaagcaaaaggatattgctttcattagatcactcagaatttcacaccatatacttaagtatgatttagcataat

SEQ ID NO: 50977 - DNA, 1699 bp, Homo sapiens
ctcagttcttgacaccttactgtctccagaatcttacagaaacctgagaggcttacatggtatccagaaaatagagataagcttccagttttccatcccgctgatgacagctggttctttacagtccaggctcactttgttcatagagggatattgaccctctatgtgtcaaaatagacaatgaaatatttgccttgactggcgaaccctgtgcttaggatctagctttccacatttccattcccctctgaggccctgccacctcctgccactatatgggaacagagcacagatatccactactccaagatctggtcagtcttggaggatcccatctctctcctgttattccttcttttacctgtcctcttacatctgtctcctgacatccagggcacgttagtataatcgcctcaagttaaggctttcaccaaagacaagaagagaagttcccttctggtccaaactttccctgaggcaagtggacccaaagagcagcccccttgtctttgtgcacaggaaaggcaaaacaggtcgtagctcaacaaattatctgccacagcagtaagcattctgtgtgattaactgtggctaacttttgtttacttatggcatctctttaccttttgtgtctttggctttagttgcaggaaatgtttcccttgctctccccctcagttacatcgagctagtggttaggaaactatctcagctctctttcttctggtccaccaaattaagaagaatactatctgaagtaccataaacacaaaaaatacataaaataataatgatgatgatataacaatgaacaccctccttctctcctatgtatatttcttcttcctgcctggctgcccccagcaaagaggtgtagaaaaatgaagagaaataaagtgaaaccaagtccgctttgaaaggattctgggcaacctttggattttgccttatttgcaaccagttacgtcagtgttagtgtccttttagccgtgggttttatgctgaaatatctgtgacagttaatataactggagtggcaagatttcctgtagatgccaactcttgttctcccagttttaaataaatcctcaattctcctagtccccaaacagtcctaggtatgtgctcaccattggcagtaatgacattgtctacatctacctctcttgcgaggcattggcaacgcatacacccatggggatacaagcttgtctagttatgaagaaatgtggccctagttacattttcagatatctcacataaataattctggcctgcaaaaaagaaaaaacaattaagtcatctgtctcatgttttatatccttttggaaccttggggttgtaaactccctcttgtatgaggacagaatcttggcttatcttgttcatgttgtgtctcctaagcctagagcagtgctttgcccacaaaaagtgttcaatcaatatttgctgaccaaatgaatgaccatgagaataaatgaataaattgtgtgaagaactagacaattaaaatatccttgattaagatacaaaagttaaaatgctaccgttttaggtttctgtggaatcaacccttaaataaattattccctgtaagtctgacgcttagagagggtcaagagaaaatattttcttcccttattaataagatttggtaaatatataaaagtattcacttcttggaccctgtaaatatttg

SEQ ID NO: 50978 - DNA, 612 bp, Homo sapiens
gagtgtgagggtattgtgtttcttcagaaggtctaagagttgttctcagtgtggctgcagagtatgttgtacttagagacctcatcagaatggataacccatttgcctccatcacttacgaaacaacgacttttaacagctacattaaaatgccaccggtgtcatactacattcccataaatactgggaattaactgatgactttctcgtccaggtattcataggctttggcaatgcagcagtacacaaaacagatcacattcataggattcttgacgttaaactttggagccagagtacaagcaaatatataaacactaggaagaaaagtaaatactggcaagaataaatgctatgaggaagagtaaagttgaataggagtatagacagatgggattgacccattaaatttgtacagtgtacagcatatactcatttttggtcactttagctttttaggagacaaaatcatcccagaaattctcaagaggcagctttcctgtatatttcagtttctcctaaaacagacgagggctgggaatccttactgaggaatcacccaagcatttctttctgtcatgacaagagcaatttctgtttgctccatgagac

SEQ ID NO: 50979 - DNA, 1080 bp, Homo sapiens
gctaatatcacagtgggtgtacacacagagtgtgtgatatttgtcagaatatactgaatagatacttttgctaatatcacagtgggtgtacaccctgtgtgtacacccccggtgatattattcagagtatcttggatagatacttctgctaatatcaccgggggtgtacaccttgtgtgtaccctcaatgatattagccaaaatatcttggatagatactcctgctaatatcacagcgattgtacaccctgtgtgtacacctgtgatattattcagcatatctttgatattcctaatatcaccgtgagataattgataaacacccgagcaatatttctttcattcatatcacagtgagtaaacactctgtttaaatactgtgagatgacggatgaacatccaagtgatatttctttcattcatatcacagtgagtaaacactctgtgtaaatactgtgagatgattgataaacatccaagcgatacttctttcattcatatcacagtgagtaaacattctgtgtaaacaccatgagatgactgataaacatccaagcgaattcctttcattcatctcacagttcgtaaacagtccgtgttaacactgtgagatgatatgactattggagcgatatttcattagtatcacagtgtgtaaacactgtgatatgatatgaatatcagaaggatatttttatcatatcacagtatataaacactgtgatatgatgaatatccgagtgatgtttcattaatatcacagtgtgtacccactctctgtacacactatgatatgatgaatatcagagcgatatttctttaatattacagtgttgtaaacactgtgatatgatgaatattggagcgatatttcattcacactgtgtgtacacactatgatacttcactaatatcagtgtgtacacactgtgatatgatgattatcagaccgatattttgagtctgtgtacactctgtgtacatgctgtgatatgaatgaaatatcgctatgatattcatcatatcacagcgtgtacacagaggatgaatatcagagctacagttcattaattactatca

SEQ ID NO: 50980 - DNA, 760 bp, Homo sapiens
tactctgcttaatcttcacaacctcagagctaacccctgaggaatgtgaggcactccaggagtctaggccactggttcccaaagtgtggtagagaccagcaggttcagtaacacctgagaatttgttataaaggcatattcttgatcctcacctcagacctcctaaatgagaaactccggggctggggcctagaaaactgtgtttcaacatgtcctgcaagtaattcttgctaatgcttgagagagcagtggagccagactttaaatccagatattagacatcagagcccatcaaagcccatgtacttaattacttaattgtactctctccctattatactaagaagaagaccagtaataggtgatttctagttaaaaactggtcataaaagagatagcagtccagggcagtttcattctattccctttgtcttccagtgcttgaccaagcaactttaagtattaaatttaccgctagagggagtcccgacattcctcaaatgctgaaccttttaaaagcatgtaaataaacacacactcaatcctttgctggaaaaaaaaaaagtttgatttgtatgtatcatcatgaaaacaatttgtttaagctacttaacatggaacagctgcatttggagtgatattgttaggcacaaatctacttttaacaaataaatacaatataccatgattggtcacttaacatcttcatttctaaaacagaactgaagaagggaaggaggaaactccaattagcaaaata

SEQ ID NO: 50981 - DNA, 1252 bp, Homo sapiens
ccgtaacatttccactgccctctcactctgatccctctagtctaggccacatggcttgcatccgccaatagtgtatcagcaaacataacataggcagagacttgaaaggcacttgtgcagttgacttgtcctgctccactgttttggaactctgaaaccatggaaagaagcctggctgaggtgctagacaataagaaacacgtggcccctgctgacgacctgccaatgccgtgacacagaagtgaggcctcttagatcatccagccgccagctgaccagaaaggtgagtaagagcccagctgagcagaaccaaggtaaaagaaccacccagctcactcagaatcccaagctaaccaaacgattgtaaaacgtcactaagttttgtggtgatttgttacactgcaaaagtggatacagtagcacatacctcagtggcaattttacacatctttgattagcttctatcactgccacataactgtgagctctctaaaagcacagactattctgaccttaggttactgtgccaacctcaaagccaagcataatacctggaacacaccaggcatccaaccaataacatgctgagcgaatgcaaggagcaaagagagatacacattgtaacacaagcgaataggggaagttcaaaacaaaggactgaggacatctatttgtacaaaataaaaacttttaatcagcagcacacggcagcgaggaatacaagaccaaaatcacatttaatctgtctcaaagggttcaaagtctagggtacaggaggcagtacaaaatcaacgaagtgtactgtttgagcattccaacacttcgctccttcagacagtattaggaccccgtcccaaagcgttaggacaaggccctaacgctgcctgaaaaagtgaagtgacggaggatcccagagaggtttcttgaagcagataaagtctgaattgaggccgggcccggtggctcacgcctggaatcccagcactttgggaggctgaaggggggcggatcacttgaggccaagagttcaagaccagcctggccaacatggcgaaaccccgtctctactaaaaatacaaaaaatcaggccagcatagtggtgcacgcctgtaatcccagctatttgagagcctgaggcaggagaatcgcttgaacccaggaggcggaggttgcagtgagccgagattgtgccactacactccagcctgggcaacagagcgagactccatctaaaatacatatataaataaac

SEQ ID NO: 50982 - DNA, 1219 bp, Homo sapiens
gaaaagttaaagatgaggcagaaagcacagctccttccaagggcagctctcaagagcccacgttttcagattcagcagtgaagcggacgcgtctggtacgagactacaagtcgcacaggcggagagggggcccccgggcctctggtttcacgtctccctcctggtccccggcggaccggcgtcttttctcccctgctcggagtagcctagcagcgctggaggctggctgtctggtaagcgcggctgttagagaggatggaggcgccgtagccccgcggtgcttctcacagccttcgccggcagggacgcgcgggacaaccgcgcaggcggctctgcaggggtgggcgcgccatcacccctctcggtccctgcctgcttggcgctttccgagccccagccgcgctcaggctgcctcgggcattgaccgcgggggcgcgcgccccgtttccatagaaacgcccggcctgccgcggcggcgcgaggggcgggctttcaggctcccggcggctgcttgcgccccagcgcgcgcccaggcgccttggaatccccgtccttgggcccccgcaaggtccccggccgtgcgcgaggcagcatgatgaggcgcaccctggaaaaccggtaacagcccgagcccagctgcccagggccgcccacactggagggctggggtgagggaagtggaagcctctgtccatggggcctctgcgccgaattccgaccctgagtgggaggctgcacggtccccgctgtgacctggggcctaattccttgggctgcagccaccgccggcggcgaagaggagcccggggcccggccggctgccacccacccacgccaccgggtctcgggtccccacactgccgcgggcagtgcggaagcctaggaggcagccgggcgcccaggccgcgctgcgcggagcagccggagcagccacctccccagttaaggccaggcccacccggcctgggccttttcctgtgcctacacagtccggatagtgaggtcaggaccccatggagagcagtccgcgccgggagacgctgggtcgttgatgggtttacgccttcaaagctgcagaatgcccggggaatgtttgcatgttaaattaacgtgaagccttctcatctctaacgagaatgttttgccttttgtgtcaccttttccctaggaacgctcaaacgaaacaactgcaaacagctgtctcaaatgtggagaagca

SEQ ID NO: 50983 - DNA, 1609 bp, Homo sapiens
tctagttatgaatgcaaaaagtatttttgtgcctttgtgttcatttgaagacaataatctgttaaaatttctatgaaaagaagagtgggtccctaaaagatcacttaagtcagtgaaatttaaagcgcattttaaataactgctatttttatccaacgattcatcccacttaatcaccattataactaaacaatacgtaacgtgcctcttctaatcaagacttaaggggatacagagagggaaacgggagggagacagaatttaaataagtaatatctcatcagatccatttgatttttaactagcgaagaaaaagtcattttccagatatggtgagggagagaattttttttaactctgcgactacttcgtaaagcccaaggtcatgatgtagcatattcacactctaaacgtgagtttcccctgcagaaaataatctacaccaacccataattattctttacgatgatccaccttttataatgtagatgtttaaaataaaaaccaaaggaatgaccaatgagagccacagtccctaggaagaactgtaaatgaagacgaatccacatggcacaggatttctcccaacatcctcaaacgggaatcatccgaaggcatcgattctacagcccaaagcctttgtccacaactcccaggggtcagagcttccttctttcgcgccaggccaaagttgctacgtgggatccgatgttgtcgccagactttcagccaaaatcagccttcaaattaacctggaccgcccaacctccgtgcctttccgttacgccgtctcaagggcaaacattccaccctaactcgccagagggtgaactgcccccagatctaactgaaaacacttgcccttctcaagcctaacgagctgggcctgcagcgcttttctgccaccactgactacgatgacatagcaaagaaaaaaatatacctatgaaatccttcgagatcttcactctcaagatccctgggaagcgcacatacaccaccacatggaagctgacgggaaaggaagagtcggtgttttagcaagaaaagagggtgccctaacggcaggagctacgctagatactggcgcggccgccggtcccgcctttccccgttcttccggcttggtcgcccagccctccccacccccggcgccccgaggggaactgcttcgcacttggcaataaacacacaccactgctgccgagtcggacacacaaggccggaggctgagggaactcttcgtcgcagcagcctccccaaaacaggtagaccctcagtgagcccagaagaagatggcgcccactgcccctccggtccggacaaacggacgtacggtttatctgcccatgcgctctgcaggcgcaacccaccaccaagcttgcgcacgcgcgctgccgctcacccgtttcccctcgctagaggaggggaggcggagccccggggttggctgagcttctgcgcatgcccagattctgcccagcccagggacctcgactttcaacgggagaaattcagagacacattcagggctcagccggtagatgtgctgagaatcttcggtagacaactgtcgaagtacggcggacaaactttaaagatttccaga

SEQ ID NO: 50984 - DNA, 559 bp, Homo sapiens
ggataagtgctatggacgagaagtccatggtactgtgaaagtatttcacaggagaccctggcctggtcaggaagggtgggagatgttccctgaagaagtaatgaatgagctgcttggaaagtaggagttaaaaagataaaaggaaattgctgggaaggggagggagtggtccaggcagagaaatgaaaaggcttggcagcatccagggaaggaaaataaggccagtgcaggtacagagcacaggagcacacaggacaatgcagggctgcaggaagaagtcagaccatgctgagggttagggttcatgttaaggactttgatctttccatcggaaaaccagcaggcagatgacatattaggacttgcatttcaaaagagtactccagctgaggtatggagaatggagtagagagtggcaagagtatgtttgtgaagacaggttaacaggttattttggcttctagtttaatgtgacagtttaaacacaggtatttatctccactccttccagaaattctaataaaataacagggaagcaacttttaaaaagacaaaaact

SEQ ID NO: 50985 - DNA, 1080 bp, Homo sapiens
attcttctggaggactgcgttcagtcactgagtcaggggctttgtgaaatttcgctggcaacagaatgagcaaacatggtttcttccgtttcgtactttgtctcgcatacatgatttcctatgctcaaacctggcaggaaagtttttttattttttcagtctttgagctatagtaatccttcactgggttttaagtcagtggggttttttgacatcaaattgttaaactacaagtcatgtttcctttaacgtgaaaattacctagtctgaataaattctgatgtaactataactcgacaaattatgatattttcaacttacgatgggtttattgcggggagggggcagccctatcgtaagtagaggaactctatacacgtttgaaaatatcgctgggctccagggttaaccggtctctaacccattctttactggacctgccaacttcgcgcagggttggtaacctagcaaccaagcaacacgagcagtgacttccggtacccggacttgggttgtccaatcagctcagcgaagccgccgcagaggctgatggggggctggaggctgtgaggcttccagcgtcggtaccatggcgacgcgcggtggggctggggtggcaatggcggtttggtccctcttatccgcccgggccgtgaccgcgttccttctgttgttcctccctcgcttcttacaggcccagaccttctctttccctttccagcagccggagaagtgcgacaacaaccagtactttgatatctccgccctctcgtgtgttccttgtggagctaaccagaggcaagatgcccgaggtaagacggtttgcggtgggccctggcaaaagtaacactcccgccttggtcggcccctagtccccgtaaatggagtttcaccatgttgatcaggctagtctcgaacttctgacctcaggtgatccacccgcctccgcctcccaaagtgctgggattacaggcgtgagccaccgcgcctggcccgaatacatgtatattgtttagtgacgtagaaatgtaaaatttccagcagcagttaagtagtttaatagtttagttatacttgcac

SEQ ID NO: 50986 - DNA, 691 bp, Homo sapiens
gctgctagctgtatattttttatggttatttcttgatcatatgctaaacaaggggtggattattcatgggttttctgggaaaggagcagggatttcccagaactgagggttcctcccccttttagatcatatagggtaatttctggacattgccatggcatttgtaaaccatcatggcactggtgagagtgtcttttagcatgttaatacattacaattagcgtatatgagcagtgaggacagccagaggtcactttcgtcatcatcttggttttggcggtttcagctggcctctttattgcattctgttttatcagcaaggtctttgtgaggtgtatcttgtgacctcctatctcatcctgtgactaagaatgcctaacctcttaggaatgcagcccagcaggtctcagcctcattttatccaccccctattcaagatggagtcactctagttcagatgcctctggcataactacccagtgggtttttcttgcccactgcccagatagagctgatttatcaaggcaggggaactgcaacagagaacgagttttacacatgtagagcatctaaacggcaagctagagttttattactactcaaatcagtctctccaagaatttgggggctagaggtttttgaaggtagtttaggagaaggggtcgaggtagctaggcaatgggtgcttgct

SEQ ID NO: 50987 - DNA, 1409 bp, Homo sapiens
cgtatcaaacgaacgaagcaacagctactctcgaggttctttgctacgccttgtaccgcaggctggggtgagccgcagggagttgaggttcccgtgaggctgggagccgctcccgcagcctaccctgggaagcccgcacccaaccgcgaggcgcaggggaggcttggccgctgggccggccacccacaccaccgcatccccgcagaggtgccagagattctaggaagcctgcacgacaggggagcagcccgttcctcgggccccatgcacgcgaagacattggagccggcccaggcgcctcccctctcccgaccccgcagcctgctcagccaacaccgccgagctccacagaccaccgctccctagcgccgcgcagccacaccttccactcgctgggggcgggggggggggggtcacgtgaggcgggcccggggaaccaatgggcggctcgcgccgaatggaagggattgtctgacccccgtgacgtcacaaagctggcggggagcgcgctcctcttccgcccccgccccacccccggccgcagccctctccgcctcccctcccactcgtcactgcgcagccaatcggcaggcgggaagcactccggcccgaacgtgcgggcggggcagggtggcggccccgcacggtaggggagcagagtgggcaggccgggggtgagggctcgcgctccgggagctgcacggggctgcgtggaaagagcgccgagcggtggcgtcgttgtcgccccctcctcgtcgggaagaatcgtttggtctcctgccgtgcccggttcgtattccctactccctgccacgagccgccccgtccgggatcctccacccgtccaaagttgtgagggggcgccgggcgtgctcgcggatcggcggccgcgggcgtgcggagggctggacgagccctggagcgccaggtgcgcgccgggcgtccgggctgtggggcgggcgtggcggcgctgggggccgtcggggggctgggggcgggggcgggggcgccgtgcagccctagcgtcttccggcccctgcgctccagctgtcagcacgaagggcgccgcggggccggcggcagagtgagctccagggaggctgtagggctgcggcactgcctgagggtctccctgacgcaccccgggtcagggctggccccgctggcagcctgacaccggccggcccctgttcgtctggactgaaacgggcacccctggggcggggccgggccgggcagggcggggcgggcagcgggcggggctgcagtccatgggcttcgcgccccggctggatggaggggctggccctcggggcgcacccctgctcgcgcctgggccccgctgccttgggctgtggctttgcctccccggcggggtgggttggtttggttggcttccttgttctctc

SEQ ID NO: 50988 - DNA, 609 bp, Homo sapiens
tggaattgaagctactaattcagctttctgtagtcagtagataatagccacagatcagaagcacctgtggtcaggcgccagattttttttttttctctcgctctctgtttcttggcacttagcccagtgcttgagtttcatgtgtggtgcaaggtcagaaacaaccaggttcacgcacatttgtgtcttcccacagtgtaagacttttattgatgctatttcaatcacaaaagccacaagcggcatggagttcccaaagaggtgagtctccttagtatttcctgttcagtcgtgagtcagagctgtgggcacacaggctcaagccatttcacaagtcagtcaacattgcagactgtacataatagtacacttaatcaatatataaatgaatagattaaacattccacaaagtattttttaaaatcaagagaaaagaagtaggagaactaggactggaaaagaactaggactggttaacaaaccactccagggagtgctaggaagttgcaaagaatctcctggtttgggttgggtggttcgtaggactttcaaggaagaatctttcatgtggcagaggcttcagtggcagattctgagttcttatgagtg

SEQ ID NO: 50989 - DNA, 1005 bp, Homo sapiens
attacttttctaaagagcctttcagctctacttgccctgacttaaaagtatttttcattcatcttccacccacactcagaccagaaactgatagcagttagccttatctgtcacaagcctaagcaactggtggccgatcaccctatctcgtgctattacctaggccgttaggaagctaaaattaaaacctggtgtcattaacataccagaccaaatacagagaaagccacagaaagtcaagttcagatcctcttacaagtttctattttaaaaaataaaatacagcaagcttcagtgagagaccttaagatgggtcactagacatcacagtgaacatgattttgtcgtactattaatatttctcagcaaatggctttgggaagcacggtgggaactctgattcctgtaggtagccactaaatcattgccctgactttataattctgcagcaatgtcttcatattttgtgaagtctagaacccttcgcagcgggaaacttgcacacttatagccgaattgcatagagtctatctaaagttagtttaaagactcacaggttactttgccaccagaaatgttcatgtattggatttaggggtgggctcaattttcacttaactatttaattaaacagttactttgtgacctctagttagctgacgtctgttctgtgccaggcactgggcaaagtgtttggcttatgttatctctaatgtgcacaaatctgaaaggcaagtcaaatcgccaatccccatttacagttgaggaatctgaggctcagggaagtcaaatatcttgctcaagttcacatagctggcaggtgacaaagccaggatttgaatcaggcatgctgactcacaaccgttgccactgtgaaggctgttcctaatctatgcgatgtcctagtcaccacctctaccccgacaccgtggccatgcccttctctcatcacttgcccttgtggtggctttactgctaccaaccagaagaggccttcgtaggtaa

SEQ ID NO: 50990 - DNA, 2989 bp, Homo sapiens
ggattacccatgagaacattactaaggctgcccaatgggaggacaaaaatttaggataatagagtagaagagtctctgattagatagcgggtccctacttccagaattcctcccaggacaaatctctgaaggctcttggttttcatctgaataaagaaaataataaaatatagctaaaagtttttgagttttcattatgtgccggggaaagcgccaagcacttagtacgcattttccatttattcccctgaaaaaaacctaagaagtggattactttttaattcatttattcaaattctccattcagatgaaaaagctgagctttagaaagataaaattacttgcccaagttacccagatgggagccagtggagccaggattcaaatcctggcaactggattccagaacccaccctgttcattgccactttatcccatcttttcagccaccctcccacacacctctacagtctgcttcttccttcttagtagcaaagcaggtggattcttcctgtccacttctgtcttttttcctatactgagaattttaacttggagcacctgtgaaaccctagaggcccatttatctgttggcaatgttctccttttaagctggggaatggaccgtgtcatcttcaaccagagttttttatgattcaaacatcttcctcttcagcgtgtaaaatggcatttcttattgcccagtctgcagagagtctcaaagacgtagtaaaggaaatcaaatgaagagtttccttctcttgctgccagaagagatagagttggcattttcccaactgctaatgtttctaaactggctttatatgttcccagggacaacaatcaagcccagtccaataggtcagcaaactaggtgagtgtctacctgcatgctggaaacagggcctaacatgggggtgggcactgaggtacccactgctcccgaagatctctttcctgtgccagccaaatacatgcctgtcattctccctcaaacactggtgaatgaattgaagtgcaaacaaatccttatgccacctcatatgtgcatagcactttaataaccctgcagagattcgaatgccctttagagattacgaatcatttttacttatctcagtcttaaaaaccctccaaggcaggtatcagtattcttactttatataggaggatgttaaagctcactcatagttagcaaagacaggactagcatctaaggctttcacccaagcccaatgttttctggatgtagaatttagcactcatctcttacacaattctttcacctggcagaagtctgaagctgggacaagtaaattttggttggtgccctaagaagagccacatctggattgtggaataaggacaagaaggaagggccaagcaagaagaccaaagagcctgtctctgcagagctgggaagcggggcagctgcctgatcctgatgtggagccaagagaccgcactacacgcttgtgggaaagaccttgagctgggatctggagccccaggtttcaggccaactgggctactgagtcgcctagagcacatcacgcttgtcagggcatcattttctctctgtatgaaaaggatttgggggatctgacatctaagatactctcaggctctaacaagcttgagtcatctttgggggtcagtaggtctgcgtgtgcttccatgtgacaatgagagctaaataaacgtcagctccttccagcctcatcaacatcatcatctcggctgtgactcagatcatccacacatgatgagtaaacagtgccctttgcactgtgctgcatgaagccgagcgtgggggcggtggtcacagtcgaggctgcctgcctgcctccctgggttgcagatttatggcatggcagtccttgtcgaaaagacatctggagggcctggctctacctatttttctcctacccagctcagaggtacttttgcccagtcactcctcaaataatccaagctcctcacactgctgtttccaagttttgaaacacattatggcaggccaccagttccattttattagcaaatagatgagtcacagggccatttcctttggatttttaagtaagatttccacttctacctcactgtcttgtctggcctgatgtttacaaagagagaggttgctactttcaaatacatgtgatttttagtcaaataaatcctaactgcttgagctgcaccacctccaacactgttccttgcccatttcctgatgtcatgcatttgcccttcctctgtgtctgtgggtatgccagagaagtaggagttcccccattagatacttattttagaatatctgccatctggatgggatgaagacaatgtggcgtattgccacaatggaatactattcagtcatcaaagagaacaaaatcacgtatttagaagcaagatgggtagaactagtagccattgtttgaagtgaagcaactcagaaacagagacaaatactgcacagtctcacttataaatgggagctaaataatgtgtacacatggacgtagagagtggaattatagaccatggagacctggaaggatggggaagtgggaggggggtgagggatgagaaattacttagtggatacaatgtacttgatttgggtgagggataccctaaaaaccctgacttcatagcactctgcaatatattcatgtcacaaaattacacttgtacttcataaacttatacaaataaaaattaatcaataaaatagctgccatctgcactgcaattattccctacctttaatcaagactggcttaaatgtgtatgtcggctgagtgcagtggctcatgcctgtaatcccagcactttgggaggccgaggcaggcggatcacaaggtcaggacatcgagaccatcctggctaacacggtgaaaccccgtctctactaaaaatacaaaaaaaaagaaaattagcagggcgtggtggtgggcgcctgtagtcccagctactcgggaggctg

SEQ ID NO: 50991 - DNA, 4932 bp, Homo sapiens
tttttcaattcttccctcttaaaaacaaaaaacaactcccagtccatctcttccttatgtcaacgcccaaagcactgtatcgttactgcttaaaatattagttaatgtgaccctgctctgcaacatagcaactaacacttagctcattactagggggcatggtatacctcatccatcgccttgtatcccagagcttaggccagagccaggtgtgtggctgatgcccaatgtgctgtcatacttagtatttggaagctaaatcctggggctgcagggggctatgaaaagacacaggatttgggttcaatcacaactagatttgaatcctggtcataccatgtactagttttttcaccctgggaaagtcacttgactttgtaagcctccatttcttcacctgtcaaataggtatattaatgccagattgattcaagtattatcaaaaatatgtgtgggaagtatttaacacagtgcctggcacatagcaagttccccagaaatggtaaaatgaactgaactaagatgataaaatcccaaattctaaatccaccttccttattgggtgattctggataaggcttttgatctccctgagacttagtttactcatgagtacaagaactttgtgaagaccaaaataaacagcagcaaatataaggcacctaacaaagtgcctctcccgttgcaaacattcactctaaatgctagccccttcctcccgtttctctttcctagcaagtcacctggcagcctttacaaagaaagagggaatcaattgtacaacactggccctatttctccctttactcttctgagattccaggagtgaggagagaaatcaatgttacaacaatgagtcattatttatagcccagttcctgagctgcctcatgaggcagtgaactccttgacactgagacaatcaagaagaataaaacctccagatgagatgggctgtgggtagtgaggaataacattaatatgcatcaatgcaggggagaactgagtcatcgctaagacacctccctactctgtgattcagttgtgagtcgcgacagaacacagaccatgtgacttggggaaacactgagcagtgcttcctttatttctgtagctgcaaatagggacatataactaccctggtcgcatacgctcagactgaagctgtggctgaaagacactttatggatggcattggctatcaggatcctcatattacttagcagaacatagggctgtgctttacccctagctgaagaatacatgcattttgagataatgtcacctcaaaacagttttggaaataggccaggctccaatcaataaatagatgaaattgtacagggaaaattgtcttgaaaagctgtcagactctatagaaagtttcattgttatacttcacattttaaaaaattattatgctatttcaaatacagattttgaactatttaacacccacaaaactttctaatattggtggaagcaaactgatcaagccatcctaacagcttttccaactggcttgttttaggtataaccatggaaaaaggctgtgtctatactgagttccgggaagaatgttcaagtcagagtcagcagaagtcaagtggggcgctgaccctctggctctgccctctctaatcagccttccccaacccatttagaattggaatctgaagaattccctttctggcccaggatcaacagattttggtcctgtctacaagcattttcattttcttgcccgaaagcctgtgcttgggcttttctagagactcagctcccccatcaattgtccaaaatgcctaacttcagctcccaactctgtgggtaaataagtcacccaccctcactctttcttcctgggccacccctggtggaaagaagcccactggggctgggacacctacctcccagcacctcgcagtcgctgtccatgctgtcatgcacacctgcaaagatgttggccagagtggacttgcccaccccctgctcccctatgagcaccactcggtagtaggtgttccctgactcagaggagatgactgagtctgtggagtcagaggaccagcttcggcggcagtggtcctcaggggtagcagaatggcggttgcggtggctgtactggtggggctctttctggaccatcagatgcctgccatcagctgggatgctccagcgctgctgctgtggctgcatgcccacagtgccctggcgcatggtgacattattcagagtcatcgttgagtcctggggagcaaagcagccaagatggcagcattagtaagcatgagtgagagctccgctcaaatacatggtcagtcatcagtaatattttattagatgagatgagaagcaagtatccctaacataaagaccaccaattaaacagtcccccaaaccccaacaagacaggctttcaactggacacacacatgctgcccacactgtcagtaaccagctcctcaggcagactatcatttgcatgggaaaacaaatacggttaacatcacccactgcccatgggcttcccccttcctcaaagcagacttggatgaaagaagagctgcactcagagctggcacaaaggcagctggaaagaaccagcagactccaaagatggcttgaaaagcaacaagttaatgttgctggggaccagctggtcaggttagctgctcttgtctaaacttggctcttaattgcaccagtgtccagcaggttttgtgcctcagtgggaaacacgtggcaatgacatcaccctcccctcccctgcccactgcaaccctggctggactggacaggcacttattggaacttccatgtttagtaaagttgccttgatgctctccagctgcctggagagcatccacctgccattattgggggtaggggggaaattttctgtttaaagtttatgcctcagctgtgccctcttacccacagataccacttttaaaacatcccggctccaaacctagacaccctggcagagaaatgacctgctcatgttcagacctatgaaatttgcagagaaagtgcctcattcttaaaaaaccacatccattctcaagagttctttaattcaactcagattccttttttgagtcagggtcttgctctgtcacccaggctggagtgcagtggcacgatcatagctcactgtagctagcctccaactgccaggctcaagagatcctccacttcagcctcccaagtagctgggactacagacctgcactaccacgtccactagtttttttatttttatttttattttttggtagagacagtggcctcactatgttgcccaggctggtctcgaactcctggggtcaagtgatcctcctgcctcggcttccgaaagtgctgagatcacaggcctgagccaccattctcagatccccttcttgaagcaaatcagaaggctgaagactcccctaaatgatattcaacaacttctctacaactttccctttgcagactgcctcccctagccgggaggtctgtttttccggctactggtgataaagtataagtacttacgttgcaatcagcaagatgcacaaacactcctctcccaccctcacccccacactccgtaccccaacatctcgccactaaccaggacgaccagccggttttttagtctcaaaagcagcacctcagttggcagacttacattcaaacaacaaatacataaagcatcattaagggctgccctctctgaccactcgatctgtagagggaggtgacccttctaccgaattgaactaaggaacctgctgatgagaagcgacatcctttgcacttgaagctctgacccctaccagaaaatcccagtgctgagcgcacgttccaggggttcttttctcaacttcgaaagttctgcgggctgggaaactcccactctctcccttctccgtctcgggccgtcccccttacttggctcggccggatcggcgtcggggcgtcagcgtatcgcgtgggtccgcgctgggatacccgggccaacgagcggggagtgctgcgctgtgcccgccgtccttgcccgccgcctgcagccgccgcggccgggcggtttataaccagcccagccgacccgccgcggggcttttccgtgacgtcagcgcccccgccgggagggggcggctctgcagcaaactcggagttgcagccacttggctaaatcagttactcgcagtcatgtgaccccttctctctccatttaaaaaataatgacagttcaatcctgggcctcctttattttgttttattttctttttaccagatgaacacaggaaaatggaaaaatacactaagtgacacttaatcgtccttcccagcaaagcacttgcgagctgtcgggataaaggatggaagggagaggcaggtttgagttgagaactcagttttgccaagaaaacagagatcaacctggaatgcgcagagactttagcctccaggatgagactgcagccaccttgaatagccaaggcttgttttaaccacatcttctgcaacgaagacagccttgtcaccttcttctggatagggggaagcagatggagccccacaaggctttgtttcccttctctggcaaggacccagagagaaggggccagaaagaggtgaggaaagaggacaagaccttgaaaagggcagtttggaaaaacaatttaattgaggatccaagcagattgtgctaaatattgctggccctcctgctctgggccagaatgctgaggctcctcaatcagggaatttaatcagcatcccaatcagcagcatctctgtaccaggctccctggcaaggctacgccttgggcatgagccaatacagcctggccatggggaggagcactgagaccaacacccctgtaagagactcctgtgaacaaagggcacaggataataactactactaccatttat

SEQ ID NO: 50992 - DNA, 734 bp, Homo sapiens
atgaaataacaccacatcttgattatactgactaaaattaaaaaaaaaaaaaaactgaccacagtaagtgctaataaagatatagagcaactgaaaatatcatatcctgctggaaggaatgtcaaacagtacaactagtttggaaaatggtttcgcagactctttaaaagttaaacatacacctaccataaccagccattacactgctaggtattcaccaaaataaaagaagaagaagaagaaagaaaaagaagacatatgtctggaaaaaaaaaaacttgtacatctccaagccaggtaaatcaacctgccaaatgcctgaaaatttatcactactagaattcagataaattgtatcttcattactggcattcatggatttagaaagtgagtcttggctatcttcaaccagtaaattatactcagaaccaccaaagttgttttctgagaaaacaaatgattcatacccagcttgagtcagctctgtctggcatgacccaatgaactctgatcagttcctgaaaggattcagtctgctagagccctcagcaggaaccaagaagacaaaggacttaagtgcagctcctccagttttctgaccttccttccctaatgagagtgtatggataacacgtcatttttcagatacttttttgggggaaatgtgcttctaaatgtcccagtagatgtagtggatagttttttacccttctcttttcatatgttattgtgga

SEQ ID NO: 50993 - DNA, 569 bp, Homo sapiens
tagagaatcttggtgctcttggggaacctgacataggacaatagagccttgccaccacttcaaaaacaaaccctccaaagtacaattatttttcctttcaaaattcactctccttcctaatttaccagtttctgtcaataaaaccacagctccaattgctaccctggctagaaatctctagcttcttctcacttcccttcgcctactaggtcctgttgccaagtcctagtactattatataatataatggctatttcacaatctctgtcactataagcacaatatttgcctttccattacctgttaagggcaaagtacttaaaacccagtacctagaaacctcagactatcttatcttcctagtaactctaatttcttttccattgcaatacatcttgcaacacaaaatctgagaatattactctgatcatatcagatctgctactccaaaatattcaatacctttccatattctacaaataaaatccaaattccttagcacaaccattctgggccctttatttcctcttgtctgatacccaaatatacctcctccatatggtgggaaa

SEQ ID NO: 50994 - DNA, 2165 bp, Homo sapiens
aaaaatgtgaagttcgtttttttttttaacaatttctccgtagacttcattcaagttcatttttggtctgctttcaggaatctttagttaaccagctatgtttaatctacatattgcagggccaattgtacattaaggggcgctcaagtagttttgtacagaaatattactccacaacattccacctccaacctcaaaggagatgtctgctgatgagtttaactataattctctcaactctcccctcttcgcaagtattctccgtgaatgcatctcattcctaatgtgtgaaatctctccgagagacaagtattaaagtttcaggccaaatcggagagcaccgtaatcctaaaccaagtaagtgtcacaactggggaacataattcccgacagaaaagaggccaaagagaaaggatttagaaacatcgtgattcggaaaccacgaagccaacgtaaactgctcagactccggcactactgtcaaacactactggcaaaccaagacccctcccaaacgccatctgaggtaaacctgagaaccctgatccttctcaaggcccaaacctgacaggaaaaataaaaaataaagccatgcaagcagaaaagccaactcgaccaaagacacggagggcccaagttaaagcaaggaaatgaaggggctgctgcagccctccctcagacgcgatgctcacacagctcgggggagggtgtctgtgtgtaagcgagaaattaaagaagcaatctgcagaaggaaaagtggagaacgcctaacggtttttttgtaaagatcccaagtcaagaagcagcgtcagaatcaagtcgccaagccttacctcagcgctcgggtgtttaaaagtatctaaaaataacagctccatcgccgagtccaccgccatgtttgccgcgggcggggaacaggggggaggacttccggggcagcgctccagcctccgcgacagcgactcaggagagggagaaacagagggacttccggtgaccagagcactagcgccgcaaacctcggcctatcccaacgcatcttgttgcccggagttgccggccccgccttttccagcgcggcggagggcgccccctagaacgcagagggggggcagagggaagtgagatggggactacggggtctccagtggttcaaaccctgtcgttcctccgcgttacagagctacagcggtctccgggtggcgaagtgcggagacggggttttggagacggtggatggaggagggggagggaaagctgccaactttggataccaaccccgtacacccaccgaaggggatgtcccactttttccagcgctgggagcaaaaagataacagtgagcgaggttgaaaagtaagacattgatttaaatagaagaaaaactgttgtttcaaccaacgaagagattctttgttttcttatctgtaaaatgtgaaaaatcgtacctaacctacagggtgattgtgaggagtaattgaaataaaattcgaggaattgtgtaacgtgaagtaccatgaacaataaaacaggaggcagaatgaaaagtaagcctctctgtcgggtgttgatgagctttggagcaacgagataaactcagcgggtttggtagtctaaatggcacaaacccttagcagagcaactaggaaatagcttgtaaaattacacgtgcctaccactcttctaggaaaattctcgcccacgtatctacaaatacaagaatattcatagcaaactttataagttgcaaaagagcaggaaacataagtgccattgacagaagtaataagtaaatagtggcgtatttatataatagtatatagcaggtacgaagaatgaaccagtgctatgtttactagcatgaaaaacccaaaaaacagggttggtgggcgctttggctcacgcctgtaatccagcacttagggaggatgaagcgggaggatcgcttgagcccaggagttggagaactgcctgggcaatatagcgagaccccgttattcacaaaaagaaaaaaaaaagacacaaaccaaaacaaaacaagtttaactcctctcatcgcaagccgggtgcggtggcgtgttcctgtggtcccaacttctcgggaagctgagacaggagaatctcttaagcccaggagttggaggccagtggggacacccatctct

SEQ ID NO: 50995 - DNA, 1897 bp, Homo sapiens
attctcgtgcctgtttctcccgatctaaaatgggtatatttcatttactaaatttacttctgagtactgttggggaaaagatcccggtgtttgttgaagaatgctagatataatgaaagttaaacacagtttaacaaattaaaattattccctattgctctgtaatatctaattgcacactgctctaccccagaccattgtattatctccccgcccccccccccagaatatcatgaaatgcaacatatttgctaaaccagttttggtgatttaaaacaagttccaagcacaagcttctttcttgtaatggtcaagtggcctacgaaaccaaagcgccaactgagaacgttttgctgctgcactctgaaatcccagcgagaacgcaggcagcgatggcagttctggagcaccgggttccacttctgcctctgaccggctttgtgacttccaccacattagatctgagtttcctccatgtaaaatggggcgggaatggaggctggacctgggaggtgtcgctgatgatcgtctctgactcgctaagtcgcggagtcacaaaagtggcggaaagcatgccctcactttttgggaagagtaggacgaggggcggggctgcagcgagacccaccagtctcgctttccagggcaggcggcggccaggagctacagctgtgggctgcactcccggcgtggagtctccttcctgcccgcgcaggccccggcgccccagcgaaacgctccggccgctcccctctcccaacactctggttcccgggccgcctgcggggacgcggttggcggcgacaccggaggggggtgggtcaggaagtgggggcgcggcggccaggagcgggcccccggaggccgaggggttcggcgacgcggagggagggagagtctgggccgcgcgggagccgcagggcgccctagccttcgcagaaacgatggcggaggaagaaggtgattgccgcggggtccagcgcgccaacggctgccagtggtctcgggaaggaggggcgggggcgctggaggtctgggttggagctgctggtggccgcggtcgcggtggcggccgcgcgggcagggcgggaaggagcgcggcgcccaggagaggactgcggagaaattcaggagagcggagcaaatggcccgaagttttgtcggccgaattgggaagcaaaggtggagctgaaagttgggaatccgtagcaagagagaaagctgtgccgggagtggttgggaaagagggagggtcctgatcagattcttggtgaagtgggaggcgcagtttggtttcgaagatcaggtttaggtactcagtgcatatttggaatgcgatttttaaagggctgtggatattgacaaacccagaggcacagggggcgagggaacattcaccacggggataaagaggcagggatttgggataaacgtggcaagattaattgggaatgggcgaacacgcagaaactgaagaaagccaagttcacttaggttcaggggaaaatggtaaagagcagagccatctaattattatagttttgggagatgatgaggccaggaggcctttgagggtcaaagtgggtgagctggagaaaggtttccatgccgccttcaggatcaatgctaagataagtaattcattcagcagtattttatttatagaaaatgataagtatgagacaaaaatgggaagttagatgaaacttatcggttagtgataaacaatacaaggaatactcatggcatagtaacttcatgataacccctactagtttcaggaagtgagaagcaattagatttttgcattctggtggaaaacacaactttttaccttatgagtggagctgtggatgtgatagtaaatcgatctaatttagactcaagcccccctgcc

SEQ ID NO: 50996 - DNA, 1148 bp, Homo sapiens
tctcattttctcgctggagaactgtcagggaacacggaaaacccacccgcgacccggcttcatgcggcgccgtctcctatggcaaccgggaggaggcgtggttcgaaggttagtcacgcccctttccttccaacccgaacaacgattggtccgaaggcgcggcggtggcgcggggaggcggatccaggaccgcagctccggctggcccgcgccgccattttggattgtgtgagtttccgggacgttcggagggtggcctctctcccaccgggttccgcataccccaggcaccggcccgcatccaagtgtcaggttggagccgggaagcggccctggtggtagcggcggcgggggcaggatgagcgcggaggcggcggaccgggaggcggccacctccagccggccctgcaccccgccgcagacctgctggtttgagtttctgctggaggagtcactgttggagaaacatctgcgcaagccctgcccgggtgagcgcggcgcctgcacctggggagcgggacccggccaccggcgctgtccgcccagcttccctccgctccccgccttctcggtcaccgaagctgcggcctgggaggcgcgcacaggagcccagctccggccgggctcctcgcttcccttaaacatgcccgggtggagggtcaaagaaaagctcgaaacaaaggctctcctacccccggaggggagggcttggtgctgtcatcctaaaccctttggtcctttttacgatttacctttttactgttggggttttagaggctgcgaggcgggtcttgtggttgcttgggtcggggaggctgaccagacgcctccttcaaccccaagctgaataaattcagggagctggggagaaaccagctgttgggtgttgatcgtgacgctagttattatcttaggttttatttaaacatttttttcttcagtgagggaattttattgactcttattccaaagttgggctgtaagttaaaagaaaatctttgaaagtaggaactgctgcacatttgcaagatggctttgtatagtgatgataatgattaatagcccagttaaatgggtgtgattgatgggggaggaggaaaactccaggcattctcaaaaaaggtattggcacaaaaaggtaagttcct

SEQ ID NO: 50997 - DNA, 946 bp, Homo sapiens
ctcccgattttcctccctgaggctcccgcctgtggtaagtgatcggcccaactgggctttctttcctcccacatcccccctacgcgcagcaactcctcaccgccagaccagctaccgctcggctcagctggcgccggcgccaacccaatatataggccgggccggtcccgccccgcacgcatgcgcctcagactgacacctccggacagcgcgctcccctctcccgcccgtccgcccgcgtgcccgcgcgccgcgccctgctctcagtgcgcgcccgccacccggagcggccgtggggtccactctaccgggccttctgcccgcgtccaccgcgctccacggcgcggccggcggcggtagggaaactctcaggggctccttctccgcggctgttctccccgccgcctggctcgcgcatctcccgccagtttgcttttgcttcctcccactgcaactcctggatttcgggggtgtcagcctgcggctcagcccgggcgcataacagggggacacgactcgggcgaccatagggtggctgggaagtgaccgtccaggggcgcgccctagctgtcccgccaaggcctcagggaacccaggtctttcctgagcgacgcggggacccgagggcccgcccctcggggaggagcaaagcgttggctgaagagctggccaatgggaggcacgggcggcagcacaacgtggagtggctgcagaatgtaaacaccactcagccacgcgcctggccaagtgcggctctgctctccccagtcccggtccgcgaccacccggagcccgctccgccggccttgcgcggcgcgcccagggaaggcatttccagcccgcccacccaggtatgtatcaaccctgctttccggctccctgctccccctaccgggtttccctccccatgggtcggtcgctcccccaacccgccgctctgcccctg

SEQ ID NO: 50998 - DNA, 834 bp, Homo sapiens
ctgccgcgccccgccccgccgccgccgccagcgcgccctgcggagcccgcgcgagccggcagcgcgggagggcgccgttcgcgcccgagcgctgttgggaggaggggggcccgacgctcttcctttatccttccccgggtgtttaaacttaggggtcccttcgctgcctctatgaatgcccccacaactggcgcaccccaaaactgcacatcgtcaagtcagacttgcggcgggtattccgcaaacaggttttgcggcgggagcagcgaggcggggaacagctccgggaacaaagatcccccgggtggaggagcagtgcgaaggcgtctcggaacccgcggtagctcgggcgggccgcgtctgcccaggccctgagcgagccggacggcgagcgggccgcgccggggagacggagcctcgcgggcgggagcccttcccgagatgcaccgggaggcggcgcccggcgacccccgctcccgcccggccttttgtgctgcgccgctcgagcgcgcttgaggcccgggaaatagccgccgccggatgggcgctttggggcgggcgaagtcctttttcacactttttcgattcttcgtctcgtgacgccggcaaaataattctctccctaatttacctgtaggagctttgcccaaggtgacagcatcaggagaagcccatgccttgtcagtcccaagaaactttctgccatttctaacgcttaggatggctctcggcggggcagaagttgcctcccttttgcagtcactcaaaacgcagttagcggtatagctagcttaaaggtctaacagcatgatgtcaagaaaaggggtcaggggt

SEQ ID NO: 50999 - DNA, 1797 bp, Homo sapiens
ctatgtctcaagaaaaaaaaatttttttcttcttctttgtggcaggattttttggatgagttttctttctgcagggaggaagttttgccactccttttcaggtttttttttttttttctgggagaaccttttgtggattttaaaaatcatttattttttgacgggtcggatttttctgaggcaacagttagcaagtgagtcctgtgatgtgagaggggaggcagctttccttgattctcagctcgagggctccctcctctgttgtagtgagaggcctactgtttactgaatggcatctctgtgtagccagacctcctctgactttaggatcctaacctcacttgggtgggtttcaacaagcccagagcttccctggtccttccccagccactgattcggaggcatcctgccccttcctaccaaggtactcctctgtctcttggaagctgcacttcccaaagctacctgggtgccctctaggcactctggtgatttccttcttcctctcctagtgttcttgccctcttccttcttggtcctgctcatagtggttctcatccagggtgagtcttctcctcttggggttgaatttccctggggatggctgggatccaccaccagctggactgctgtgcagtttctggtgtttcctatggcacctgcccacacgttgtagattactgtgctggtttgggggtgacgccacacacaatgtgaaatttgtaaactttgtcacttcctcatttcaccgaagatacagtttgtaggtgtttcacactttcattcttgttgccctgtagattttttaaaaaattgtttatattttttcatgtcagataggtaatgtaccagcatcataacaaggttcaagggcggcacatctcacacgtgcacgtgaacacctagtcatcatgtttatgaactccaaaggatcgccctacagattctgagcaaagctgtcaccgtgctcccatcaggctgctatagagtccttagcaggtattcaaggccctccacagtctgccctgccctctttggttcttctctgtgctcttaggtatgaccactgctccagctgaactaatctattcaccatcccaggaactcatcccacacgtccctttccctgtgtccctgctgttcccataactgcactgtcacttcagggcttccatgtggtagctgttgtttgtggtgaccccatatgtatttctcccgtctccctttctgctggtataagaacctaacccaccactcaccagcagggctaggtgtgtaaacccagtttgttgattgtggtgccctttcccttggcaacagggattgtttcatgataggacaaatgttccaagcagggccaaagtccttccctccacgtgagctagccaagaagcctgcctcttgcctctagggtcactgtgtcaaagaatgttcacctgggggacctcccatctgcagcactaaaggacatgctgacacagagcagagggagtgtcctggtttaagtcgtggatccaccttggtggttcctagtaatgaaagccagtccatcacattttagcttaagattattttgagtcagttttatcatgtgcaactgagaggatcatgacaaatacacttgaccttgttctgccattgcccctgtgctttatctatttgtatacattacactatagggtagttgtaattgcctgtttatttgtctgtgtctcccactagaagttcttaattgcaccgtcaacattatgtatccagcacctagcattgtgcctggccaatgttggacagtaaatg

SEQ ID NO: 51000 - DNA, 5976 bp, Homo sapiens
aaaaaaaaaaaaaaaaagacaggccctggagtttgaaatcttggctctgctacttgcaacctatgtgaattcaggatatttactaacatcttggtgtctctgttttctcatccttaacatgggaatgatagttataatacctacttcacagtgccagtgtaaggattaagtgtatactacttagaatagcagacctcggttcattcaaagccagttgtgagactgtcaacaagtcatttagcatcgctgcatttgagtttctttatccataaaatgtctacttaataattagagctacaatttacagaatgcttattgtatgtaacggggccttgaagtacttatttgtcccattttactgatgaggaaaccgaggctgaggaattaactaacttgttcaaaagtgacagagttggttggggtggagtcagcattagggcaaaaatccatctgattccaattccttgttttccctatacatgctcttttaggctcccagtctcaactatgggtctacgaacttcagaaaacagcccttttcagttagtttcagctgccagtaggcggctccaaaaaatattaaaaaaaaaaaaaaaacccgcaagtttgatgatctaacttctaaatctgtgtacagttgtggctccttcacagtttcaggaaatcaggtggctaaacgtaccgtcattgaaaagcagcttcagaattatccttctttttatcccaccctcttccactactttaaaaacgtgcagattctagtaatttaaaatgggttttgaactggagaaaaaccaagccaagaaagttatctctgcttgttccacttatatgaagactagattcaagtaatttaaaatggattttgaactgcagaaaaaaccaagccaaaaaagttgtctttgcttgttccacttatgtgaagactgttcaactagtgtgcaagggaggttattcccccagggatccacccctgtctgcccctaaggctgaaagacagtggacaaagacaagagtaagtggtaattcatagcctgataatcttgaattttgaaagcagacatcagaggaagcaatggcaggaaagaacaaaagataggatgagaaaacaagaccttggtcacagaaattagtaaggtcctggttccaggcaggggccttttaaaattatgctgccagttcagaattacactgattgcgacttaaaagcttcccagtgcttttcacatctgcaaatgaaaatgtatttcaattaccaggctggtgatttcagtatcgtgggggaactcattatgacttctgttcagtgaccccaagggtcacattgttcccccttttcccaaaactattgtgcattgagaaaaggcttttttagcaatagatgcccaagtccttgggagtcacagttgtaaagaggctcttccttaatccactctgtattggaattaacctactgagcagatataatcagaaaatacaagcaaaacagactctccaggtaaaattcagctgccactttgaaatacaaacaccatttccttttattaattggctgtgtggccttgagcaacttaatctctctgtgcctcgggtttcctatgtgtaagatagccgggcctatttcatataaggttattatgagaatcaactggggcgataaagcaaagcccccagcatagtatatggcacatactcagcgctcagtaagcgtgagcgatccaaaggatctaaatgttaagggccaaggagagcgctctttccacaggtgcaaagtcaggtagcgaagactgagttcaagccaggtcaagcaagggacaggccgcggacaggcgggggccggtggccgggtcacggagcaggttccccatagccgcagggcctccggaactcggagggcaggcgcaggggacgggatcgcagggcggggacagagcgccgggccacaagcccaagcgccgctgtcttcggagatgcgtcccgggggtggccgcgggagccccgacgccgagtcccgaaggggcggccccatccaacggccgagagcaggcggaggaggaggagtggaggggagtgaggaggggtgagaggaggaggtcccgccgcggccaagaaaacaagccacgctcgggggaggaggcagagaccaaactcccaaccgccgcccagcgccggggccaggccgggcccttgtccgcgccgccgccgcctctgtcagcctctgtccgcgccctgggccccgggggccgccgaggaccgacccactgggtgggcggccgggcccggcggcggcgaggggaggcagcgagggggctcggtgaacgcgcaaccggcgccccgaaggcagggcgcgcggccggccccgccgggctcaggagcgggcagcgctgcggccccaaccggcagcgaggcggccctggacggacgcccgcccgcccccccccggcacttacgtgggcccgggccgtgcggggctgcgcggggaagggagcggccgccggctcggcggggaaggacgcgggcggggcgggactgctgaggtagctgcggtggggccgggctgcgctgcacctcgttcaggtacccagacggcaggcgcggggccggctccagccctcgggtcgctgcgcccaggccggccagtccaagtccttttgttgttgtgcagcgctcgcaacagctgatcggccgctccgctcgccgtcgggccccgctgccccgccccgggccgcgccaggccgggccccaccaatcggcggtgcgggggccccggggccgccctgcgagaggttgtcaccaacgcacgtgacctggcgcccggccggcggcgcgctcagctccgaaacaagcccgggcaacaaaaaccgggagctgagcgtgaaggcctgggcgagcggaagggtgggagagaggggctaggccggggagggaagcgctggggccggggccggctttccaggagccggcgggagcggggtgcgtaagaggcgggcgaggaagaaccggcgggcaacgggaagggcagaggtggatctctccctcagcgacccctctcgccgagtgaagggtcgagggtttggggcacaaagggcgcagaacgttttttcctgtgagaggaacattaagactcctgggagggctggggctaacgcctccgagagccccacctggtcagcctagggttagacgtgtagccagggtgctgggagggggccgctgctgggccccagatagaggggtagaggccgctcaatcacggagccaggccccacctgctgtagaaaccgccaccgagagccggccgggcttgctgcacgctctggattccgcctgcctataggcgaggcacaagggactgcgagaccaggcctgaaggcagagaggtcagcaggctcgggggcctctgctccagcggacaacaagcgcaccgggcgggaacggccgcctccccaggcgctgcagcctagctctcatgtgacccacggaacttagcccctctgttctgtttgcatacctgcaaattgtgggcattcacgccgggactgccaactcaccaggttatttatagtgacaagagagtgagacagtgggcttgaaagtgttttccagaccaaggctctgtcccacatataggtggattaactgtctggcaaaggcaggtgagtaacgttgatgcctatcagctctcatgtggatactgtttggactgggatgtagttctttgacctggggtgagctgtatagcaaccctggagggatgcctatcacacattacagtatctgaaagacactcacattctgaccctcacaatgtagtcagtccatttccaacaatgctggttttaaaggatgtaaattgcagtgcagggagttgtcagacaccaaggagtaatgatcaaaatatgatggtcattggaccttatcttgggagaaagagctaaaactgtgttctagatagtctcacagacttgaacatgctttggattttaggtttttgcaaatcaggcttgttctaatattttctcccacatgctatggtaggagccccatgatctcttgtttctccctaggaatccattgaagaggccatctccacattcagaaccaaggtatgatgacaattacaaggggctaatttttaaaaagaaaaaggcctacctttttccagtttgataaggtttatcatggttaaagcaacatgtgaaatcatcatcttgttatgatagaaaaattcaatatgaagtagatcatttttccaaagatgaccacaacagtatctccatcatgaagtgggtgtatttttcttccctttgaatctgggctgaccctgtgattgctctgaccaatagaatgtggcagaaagaatgttctaggacttccaagcctcgtcattaagcaaaagcattaagcaaaccccacagcttctgctttgtactctggaaaatgccagccacccatgaggagagaccaccctgctagccacagggagaggctatgtgaaaagaaagagatgcctggccagctctagctcttcagctcatcccagctgagctaccagacacatgagtggaaaagcccttaggaagttccagctccagcagacaccatactgaacagaggagagataagccatccccacggagcactgccaaaatgacggcattgtgaacaaataaatgatcattgttttaaggcactaaatgttggggtagtttttaaagcagcgataaccaaaacacaaagctaacagaaatgcccatcacagatcagtgactctaaactctaccaaatagtgtttgtgatgaaaacatcttgtctcaggagtcacttgctttctgtttactctcttgctgatttataatcttcccacctggtgcttgtttattcccagtggtgcaccaaggagggcgtgcctcagggcagcataggtgaagtctgtccctaggagggaggagtactttaccacgacattgtttggaactgttggagcataataataaaaagcaaactgacttttagtcaattttattttaaaattctttgcagacacacaaatttactgtgtactgcctgtatctggggtggatcactcccactgcctcccttcctggtatgccactggtttacataaatgcatgcagtgaaactcaggagtaatgtcatctccatagcgtagagctgtctgaacacaaccaaactgtcaaattacacaaatgcaagcaagcttttcatctgttcactgacaaagacccagccaggttccctgcctgggcagatccagtgaatccaaccatcctttaattcacagaataattcttagcgtgttgctatagtacccacttccaggctgaccccctgctgtgggggtgaccctttccccatctgtcagagttctcctgtctgttttccatggagctcaatacgctcccttatctaccctaacaaaagggattcaacctcaagttttgtttggaagactcacagtgcaggaccacattcacaccaacaaacagatacaatgcaactaatgcctctgcctcctgcttatgaaagcaggctgtggccataaccctgccagttgcatcgaggctgctaaagaatgttgtttcctaccaacccataggatggctacttggggcagcctcagaacacaaagcaacaagttgttctgtctgtactgaggagaatggcaaagtgaagtccacttaggtcgttttctatctacccatcaacagttaggatctgctgggcttctaccatggacacagcatgttgccaagtgtctgggaaagacaagaatttttttaaattgcattttagataaacaatcacttagcattccagtgacatctattgtcttaagggaagaaaggatctgactgggtctccagaaagcctggaacaaagaagcaagagattctgtgatttctgctttctgaaataaaaacagaaaacaggcgtttaactgggctgccagtt

SEQ ID NO: 51001 - DNA, 3659 bp, Homo sapiens
acactaagcaattattttcttagaaattttgttgtaaaggaaagcaaaagatcaaagtggaactagatgtgaatgggaagacagggaggttttgtctttactttgggcttttactatgggaggaattacaactactggtattgctggtaagaatgatatggcagagaagctgaaaatggctgcgggaaagagggggtgattgcggtagcaaagcctgagtacctgagaagggatgggatcaagaagtatccaatgacttactcaggtcacataacctgtgagtgatggggctggcacttgacctcaggaatcctcactctgagactctccagtccaaccaagctgcatttcaattcctgtctttgagagcagcagtaaccataacaatctcccaggatgtaaaggaggaaacacattcacatatcaaattacagctgtcctggctacctacatactaggtactcaaggcttgaagaggaggaaggaggtcaatgggttcttggaaggggaagaggacaaacagataagactccatttgcctaattgacaactaaaacaccctcagaaagtccagttccaaaggtggttgaatattttgaatccctgacttagcattggccaatttttttgttgttgctttttgttttttttgttttttttttagagacagtcttgctttgtttcctaggctggagtgcagtggcacattcatggctcactgcagcctctacctcctgggctcaagtgatcctcccacctcagcctcctgagtagttgggactacaggtgcataccaccatgccaggctgttatttttattttttttactttttgtagggatgagatcccactatgttgctcaggctggtctcgaattcctgggctcaagtgatcctctcgccttgccctcccaaagtgctgggattataggcatgagccaccatgcctggcctggcctatttgtatgaactgaccttggctttgggtcccccccagtttcggatgtttacatttcatcagcttttcatgtgcagattatattctctgtccccagcaccaaggatcacgtggttttgtgattttacttctacaaactctcttatcacagcacttgcatgtccgagtccagatgttaaacagatcgatcaatgagtaaaccttggcttcacattttgtgcagacaaacttaaccaagacatatacaaacaaagtctcttagctactgcatagcctctgtgtcaccagatctttgccttaaaaacacttccttcttttttttggtagcagctttatagagataaaattgacatactgtatacttcatccattgaagacgcgcaactcattggtttttggtgctttcacatagctgccaacatttccttcttgacattgtggttttcacctgaatagacaggtcaaactcccaacctcagtacgactctgctattttcatcatggcaatttccaaacccgtaaaggttatctgaaggcaaatgtagatatgactgggacttccctggtgcctcgttagcagctgatgacttgtctaagttcatccggtggaaactgctccatgtctgttatatgggtggctgttgtggaactaatgaacaaggaattgagtgagcagttttaatacaataaaggatggatgccttgcttggtgcacagacaatgacatctcagtaattttattccaattggcagaacgctaaatccctttcatttgtttcacatcttcttaccaacctttctgctaaatgctccatttcagtatcctccaaagtgtttgttttgagaccatgtatgtttatgtcctctttcctctcatggaaaccacctgtagcagcaaccagtggagctgctgcaaacatttgtttttgataacagtgtattctgaacgtctgtggtttcaatttctatttttgtccctgactgttgtaacttttcgaacaaacccttcataccttttacgggtagctttgcttttcccaggcatttgcactctgcccaacacgtcagctacataaactgtgacaaggctattgcaagattgctctataattattacccaagaaaacatcttgtgagagaccaaaactctaaaaggccagcacatagacatttttcaccttttattaattatatgcaataatctctgaacacagaaacagtgtcaagagactatcattcttttggaattttgacgaacaatacagagaagcaaaataaaccactcggtcccaattagaaaattttttctcttattcatcagtgttctccactgacacgtaaaattcaccactacactctctcacatttcatttttgtccttgaactccaggcttacctcatataaaacttctcctccttccttagtaccatccaacctttcattcattcaataagaacttttaccattttaaatcagtacagttgtctaatgacttacagtttcaacatgttttcatctgcattgtttaaactggtcctcacaacaattcagagaatgaagtcacagcaaccattattgttgttttttttcttttgagacggagtctcgctctgtcgcccaggctggagtgcagtgccaccatctcagctcactgcaacctccgcctcccgggctccagcgattttcctgcctcagcctcccaggtagctaggactacaggcgcgtaccactacacctggctaatttttttgtagtttttagtagagacagggtttcaccatattggccaggctggtctccaacttctgaccttgtgatccacccgcctcagcctcccaaagtgctgatattacaggcatgagccactgtacccagcctagagcaaccattattactgccattttatagacagaaaactaaggtctcttggctagccataacaaaacttgtaccaagaaattgatttgaattctagtccaggattttttcctaccataatactggccttcatattttgctatgattctccagtgtcagctgcatcaaaatcccctggagggcttgttgtatcacagattgccagggcccgtctccagcatttctgattcagtaggtctggagtgaggcccaagaattttctcattcacacccacacttctccactttgtcctttgccttcccccttcttagcttcccttccagctaggggtggccatgtgacatagttccggccaatgagatgtcagcagaagtcttctaggacaactgtgctttcctgatgaaaagggacagagttggcccttcaccctttctacttcttcctgcccagaacaggtacacaatgctcagaggcacagcagccaccttatgttccgcacattaaaatggacaggatagaaagacaggaggagactgggtctctgacggtcctaggtttcttacctccagactgctttttattttttgagacagagtcttgctctatagccaaggctggaatgcagtggcaagatcttggctcactgtaacctctgccttctggattcaagcaattctcgtgcctcagcctcccaagtagctaggattacaggcatgtgccaccatgcctgactaacttttgtatttttagtagacatggggttttgccatgttggccaggctagtctcaaactcctggcctcaagtaattcgactgccttga

SEQ ID NO: 51002 - DNA, 1283 bp, Homo sapiens
gtctggaactcctgacctccactgatccacctgcctcggcctcccaaagtgctgggattacagacaggcgtgagccactacacctggcccaaactccttttcgtgtgagaaaaaaaaatcactaactattaaatcactgcagtcaggctctctattacctgcagccaaaggcatgtcttattgatacagagaaaaagaaggttagaaaaagaagagtacatggcagtgtggagactgcatgaaaaatggcatttaacaagcatttttgaggcttactctgtagctgacattgtgctaagtgaatgaagcagtggtcctgcccccaaggtgctcatagtcagggtggaaagaccaccatataaacatataaagaatgcactgtgaggggacagatgtataaacaaaatgctatggaaacccagaaaaggaaccctacctaaggaggtcagggaatgatcccaggagataacatatgaaaaaggacttgaaggatgaatacagttatgtcaggaagcaaagagaaaaaagctttctgtgcttgagtcccttctttcttctacccttgagggccagaggctggctcagctggagacgggttggaacaagggccgtagccagacatctaactaggtaatagaggattccaaaacccaagctgcctgcagagccaacttcaggaaactcaaaagtccaaagaaccaggtgggaaattgtgaaggttggcaaatacccatgacagcaggtctagggagccagacatctggggctgaaaggcaagagccagagagcagagggcatttagggagaacagggcagtagctggggaagacaggtggaggcctgcttctcaagcagttaagaagctcagtgcacaagctcagcaggtcaataaatagcccatttcattatcttatcattcaacttcattttcacattcagccctcatcctgttagggctgtgggaaagtcatcttagtccttcctggggattccccctgcacccaaggctgtgctaaaattctgtggccttagttagcctgaagggcccttcagtccctggtgctgctgtttctgtgacataggaaccctggcggtaggaccctgtattagtctttttaaattgctatgaagaaatacctgggcagggcacagtggctcatgcctgtaatcgcagcactttgggaggctgaggtgggaggaccccttgagcctaggagtttgagaccgacctgggcaacatagggagaccccatctctacaaaaaaatttaaaaattagctggg

SEQ ID NO: 51003 - DNA, 2678 bp, Homo sapiens
gaaagctgagaccaaactagcttaaactttgataaagtagccaaaacaatttacaggtagggcagatgtgtttgttggggctctggctttgcaacttcactgttttcttggatatgcccctctgtgttggccttgcattcaggctgacctcacaaatggccatggagtggctgaagcagttccaggactcacatttgcacacatcatccacagcaagactgaccatcttcctagaaaaagtcctgaaattcatttattcattccaaaatatttctgagtacctactgtgtgccaggtttttttctaggtgccagagataatgacagagatcctttagtcatctgttgcattatcctgaaactcagaggcttaaaacagcaagtatttattattttacagtttctgtgagtcaggaaactgagcagggcttagttgggtgcctctggcttcggttctctcataaggctgctatcaaaatgtcagccaccgcaccacgggcgcggtggctcacgtctgtaatcccagcactttgggaggccgaggtgggtggatcacttgaggtcagaagctcgagaccagcctgtccaacatgcaaaaccccatctctactaaaaatataaaaaattagccaggcgtggtggcatgtgcctgtaatcccagctacttggaaggctgaggcaggagaatcgttcgaacctgcgagacagaggttgcagtgagccaagactgcgccattgtacactagcctttgcgacagagcgagactctgtctcaaaaaaaaaaaaaaaaagtcagctggggctacagtcatcttaaggccaaccaggggaggattcagcctttaaccccagctcactcacatggtagttggcaggccccaggtcgctgctggctactggccagagatgtcagctcattgcaacgtggacatctctactgggctgggagttgcgggtggaaaggaacagagagaagtcagtcttcttgtaaaacattctcagaagtgacatcccattacttttaccatattttatttattttgaattactgccaataagtccaggccacgctgaaggggaggggattacataagggcatgaataccaggaagttcagatcatggggaaccactttgagactgcttaccacaatattctagtcagtggagacaggcaataaacaaacgtgtatcatatgtcaggggtgataagtgctaggaagaaaatcaacgcagagtaagggaaggcctttattatgaaatgtcatttaggtaaaacctggcacacggggcagcaagccatgtgggcatctgtggaagagcattccagccagagggaagaacaggtgcaagctccctgaggcaggagcatgcttggtgtctttcacaaatcacacaaccaaggtgcctggagctgagtgagcaagggaggagaccaagtcagagaggtggggtgggatcacgaagagacttagagaagatggtagagactttcctggaaggttctgcacaggggtgtgatatcatgatctgctttacttttaaaaatctacgatgtgggcagcagatggtaccaagggcgagagtaaaagcaggtaaaccagttgggattctactgcagtggcccaggggagagagagcaaaatcatggagtcatgttgatgcaggtggggaggagtgactgggttctagatatatttgataagatttgccgaaagattgacttagggtgggacagaaggaggagtcaaagatgactgcaagcctttcagcataagaatctctaaggtcaggatgccatttgctcaggtggggaggatgaacctgagagagcaaatcaagattttgaccatgttaagtttggaacacctgttagatagccaaatgaagatgttgcagaagaagttggagtctggagttccgatgagaggtggaggctggcaatagaaattggagaggcatcaggatcaaattgccatttaaaaacagagaactagatgagatgaatcacctagggagtaagtattaatggagaatgagctctggagcacctggaacctttggaaataagaggatgaggagaatctggcaaaggaaactgagaaagagaaaccaatgacaaagggtagatgattctagggagaaaaccaatagggtccacctaggagagcaagaagagaggtgctgttgccctttcacatgcctccaagggtcaagtggtgccactggatttgaaaagtagcagaaggtcattgattactttagagagagcagcttgcaaagtcataaggtcagcagctggacaatattggatttggaagggaaattagctgggcctggtggtgcgtgtctgtaatcccagttactcaagaggctgaggcaggaggatcaggtgagcctgggagttcaaggctgcggtgaactgtgatcataccactgcactccagcctggttcacagagcaaaaccctgtctctaaataagataattttaaagttggaaacaaagcacaagggaaaacactaagttatgcaaaattagaatatattgatatcaataaccaaacattataataaaacccagaacacagaaagaggtaaattgttttcagtaaatataatgaggcttaggatctttacaatggaaaaaaactcatgcaaattgataagaaaaatgctaag

SEQ ID NO: 51004 - DNA, 658 bp, Homo sapiens
gaactgcacagcattttcttaaggcctgtgggttctggagcctatgcttcagcaactgaagctgaactgtgtggttgttgctaacattggtgtatccaccactaagcctcagaaataaaactttactgatatctttgaatcccatgtgtgtccttccctgaatgcattgctttgtcacccagaggtaacagctatccagcattcagtgcttatcatccccatgtctttctttattggttttctaaatttggaatatccctggagacaactttggcaactgaagctaaactgtgatggttgttgacctctgatgtgctactttttaatcaagaacttattttccctctttctctctcagctcccacaggcccattctggtgactcatgacttgtatacacagaacaacagagaaaagaaaaatagaattagataaacaagcaggggcaacagtgagggctatgtcttacaaagaaccatttttaattgaattcattttctctcttgaaattcttttttttttccctcaaaagtgggaaaaaattctcaaataacaacagcaaaccaagaaagcagcttagtctgcactgcatttgcatttcttagtttcattccctattcaaaaatgtcttaggcaaatgtgtgggaatgaacatgcac

SEQ ID NO: 51005 - DNA, 2702 bp, Homo sapiens
taagagcaaaaaagaaaaggattgtgttcctgagagaatttgtgattgttcactaagacaaagtcagtcatcaactaagtcaagtagtgactatgcctcagagaacaactggcagctattcagttttaattcccacacttgaatatgagaaatagttcctttcagactctttaaaaaaaaatcctactagtgttaaagtttagcagtttcaaatgagaggtctctagtggtgctggttgggctctctgggaagcagatgctgagaaacggtaggtgtgggaaaggttttgtggggagtaaaggccgtcaagacaaaggggaaggaagcaggcttgggcagaaggagccagcagacccaatcagacttgatgaagactctggcaaagccaggggagccgtgagcacagatagtacattaaaggagtcttctgtgcggcggaaatgtctatgcccttgtctaccgcctgcctccatcactgctgcgggccgccctggaaagagtgggatcttggctgcaaagctgatgctagtccttagggagctgtaaacgggaggctgtcaccagccacgctgcttccagctgggctccatgtgtcgtgggagcatcagagaagcaccagggccttcagtgacacgtgctagccacacttttactacatttctggaggagacgccacctttcattctcaaaaaacttcaaatcttatccatttccctgcccctcatcttgtccctttcccaaagagacaagtctaggttcctctcactttgttacgcagagcagttcagcacaatcaaaataattcttctttcctagtggacagagtcatcttcaaagagtattttccctggatatgaacatgtcactcccttaatctgataaaatggttgtgggaaattcttgctttaagtggcactttccacttcttattccagagggaaataactgggcatggtaagaacggagagtgacatttgggagctgaatatgagaatgttactgccctagatgcagctggtgccctcctggtgtacactcttttgacctttcaccttctaagctcacttttggggcttaaagttttacatagatcagatttgggtttagggtgggaatggtatagaagctaaagagttactttattcaatattcatgccttaactcctaaaacagaatttcagggattcagacaccaccccttgcctctagttgacatttgataagtgttgattgggatgtttaattaataattaattatgtacaaagaagaaattttactctacaaactcaaaagtctagtaagtatcttatacttctgagtatttgtttaaaaccaaatgggcatgcctatctctttcctgtactgaaattctggagccttatggatatgcatcattatgaagactgtcttttccataggataggttcctaaatgtggaattttcaggtcaaagggtaagtgtattttgaatttcaacatagagttccacatactgactcatcctcaaaagtatgagtttctgattaactgcacatcactggcctgaaaatcatcaatcttttcaactgcagatgggtaaaaattcaattttgtttttattttaatttgcatttccctgtctactggcaagattgagcactgttttatatgcttatatagcatctgtacttcctttgatacactggatcttttgtcttcttactgctttgtaaaacccttatgtaagtaagggctcttaactcttttctgcgtgtttatgctcatttaatttaccatttgtcttttgactatctataggctagtaaagacacagtcccctgcccctcagctcatattccagtgaaagcatcagaggaaagacagataacctgataaagctacacacagctaatacatctcaataaatgtcagatggggcatttctaatatttgaaggctaaatttgttttctcattaaaagtacctttaggctggttacagtggctcatgcctgtaatcccagcactttgggaggcctaggcaggtggctctcttgaggacagaagtttgagaccagcctgggcaacagcaagactctgtctctaaaataaataaataaataaataaataaacaaataaaaattagccaggtatggtggcacatgcctgtggtcccagctacttgggaggtgggaagatcgcttgagcatgagaggtagaggctgcaataagttatgatcgcgccactgcattccagcctgggtgacagagtaagactctgtctcaaaaaaaacagcaaaaaccccttttaatgggtaataaaaactatgtaactccatagatggttactggcatactttcattattaagtcagggaaaagatcagtacttttagttttgccagagtttgacctctttcaacctcattcaacttctatcccgtcccttatcaacctactactcccaaattccattcttcctcagaatgtttctttctactcttctattttcaaaggaatggtacttgtaagtttgtgatagagatatggtttctttttcttcttctccttttttttttctagagacatggtcttgctctccaacccaaactatagtgcagtggcacaatcatagctcactgcagcctcaaactcctgggctcaatcccccccatttcagcctcttgagtagctaggaagtacaggtgtacaccaccacacc

SEQ ID NO: 51006 - DNA, 923 bp, Homo sapiens
ttgtattttcttcatattctgcccttcttaaacttgctgagtctgatttgctctttcagtcactaagactgcaagcctgtatggtgccttgttataaatgagaaggtccccatctgggctgaggcagccctgcaggcacatgcctctctgtgtgaagagaaaggctacccttcctctgagcagagacaatgccacaccagcccacaccagcccctcttgctcccttagccaggcatgtttgtgcagtgcacacactgcataacctggtgtcttatttccggtgccaaaaaacttggccttcagaacgatacactaacacctcccaatgccaggcacttggccaggcactggagataaaaagaggagtaagaaaacatctacctttggcagtctgggaagagggccatataagcagatcaccacagtaagacctggcaaagtgatcaaacatgaacacaaattgttataggatcaaaactgggggaacaactctttttttcttggatggggttatggtcaaggaaaattcaggaaggaagaggtgtttaattaggtgtttgggggatgagtagaggttcatgaaagggaaaaagggcattagaacttttgtggtgacaaggacaaacttagagctctcctcctataaccccaaatctcaggaaagccttgggttgcggcttactttgatttaggtcttgaatcacaccatttttgttgggtttgtctttctacatgtctttttgcctttgaagtgatccagacaagcttagcagtggggtttgtaaaaacagtgtaataaacattgcccatttgccaggactgtcctctgtgtagctctcttgggagtctgtagaggccgtaggtggctggttaaaggctggggatttgggattatcaccaaatggcctccttgaagatacagc

SEQ ID NO: 51007 - DNA, 2267 bp, Homo sapiens
aaaaaagttataaatcaagttagtaaactgttaaaagctctgtcttcctgccttgataaatacatcttcctaaggacctgaaaggtcaggtttacattgaaaattttgactccttggagttccatgctggaccttggaggcccagacaagcaggctctggcctatggccgtcttcacttcctttccctgtccaaataagattgtggaataacacagatattttgaatgtttggatcttacccgactacttactatttatgtgaactgaggcacttcagcttctacaattttcaagtgacagccattggggtaaagcaggaaacaaaataatggcactgcccgtatggaacccagaggatactgggagaaaaaagtcagcaagcaggttagctataggtagtggttgataatggcctactgtgtggcttctctgagagatgtgtgtgcttttctgctggaggtgttaggtggccagtggttcccaaacagggcgacatttccagaggcctttggtggtgtgtgggcgtttggtggtcaccaagactgggcattcacctattgcaaacttccagcaacgtgcgggacagcgctattgcgcccaaagtgccaaggcagcccctgttgagaaacagtgcaaggtgttctgttctcatggtggatttggggtataggggcggcggggcgtgattttggcagctacttccttcaccagcagcacccatcacttcttgtaggtgctctgaggtcgcctgtggatgcacgtgggggaaggggaagagcccaggaggggtcggacggacttgggcgggtctttcctggaacgaaggccaaagagtcgcggcggcggcccagatgcagaggaccacagcgacacctggctcttctttgagcggcgtccagaggctgccttcccgcgactcaaaggagcataggggaacctgcaggggcgtggccggggcgtagctgcgcgccgacggcggggggtcgaagggcacgcagtgccggcgtcatggcggcctccgcgcacggctctgtctgggggccgttgcggcttggcatccccggcctgtgctgccgccggccgcctctgggtctgtacgcgcgcatgcggcggctgcccgggccggaggtgtctgggcggagcgtggctgcggccagcggaccgggcgcctggggcactgaccactactgcctggagctgctgcggtgagcgagcacgaccttccctggcgcggcgggaagcggggtcccggggtgggagcggctgcgcctcgcgtctggcctgacgtttgagcgagcggaccggcgccttcctcgtgcccctctgggtgtgcgttctagtgggcgtcgggtgcgggtgtgcggaggcagcgggcccacaggaacattcacatgggtcacaaaattatggcaaaattccttcgactgcccacgcttgtcgccttatctgaaccttaattttagccgaattcagcgtttttgcatgaataacctttgttattcacagaacgtctattagttttaaccacaacggtagccaactttgagttctttctgtgtgcctggcattatgcaaagcagattacgagtaattagtcttcattacaagttgcgacggacaaatgtagacctatcatttaaggttgtgagttataaagcatttagaacaattcctggcatatagtaagggcacagtgagtggaagtcattattatctcatttaacagacaaggaaactgggttttatagtgattagagaatttgccacaggttcacaagaatagcctcataaagtcagagccctgaagtgttttgtttgtcgggcgtagtgctgggaaggcctggcacttgggtgtcgctccttaatcatttgtggaggtgggttggatcaatcaggtcacctggttcatgcggcagggacccctgggaatccaggcctgactgctgagaccagtggcttagcccctctgcccttctgctatgtctcatttgaaagactggggtaaggtcttgaagtacttggtctcaaggacttaccaaaagtacttgaatgactaaactaccttgaagttgatcatgcaagtaaaaccgttttttttttaattccattttagagaaaagcagcataacacaacaaaatgcatgcatttcagtgttttgtttataatcccttttaaaaattgtgggccggccgcggtggctacacgcctgtaatctccgcactttaggaggctgagaccggtgggttgtttgagcccaggtgtctg

SEQ ID NO: 51008 - DNA, 3773 bp, Homo sapiens
gctttgagggaatttgtaatacactctttcttaagaggtcatttgaaaaatgaatatgtttattttcttcttacacaactaactcccatgtgttcattgcaaaaatcatgggggaaaaaataaacacaaaagtgtaaagggaaaatattttaaaagtcacccataatttcaccaggtaagagatagccactgtgatattatcatttattcgtgtgtgtgtgtgtgtgtgtgtgcgcgcgtgcgtgtgcatgatttctggctcataactcccatagcccttgttacagtcttttgttataatgttggagtgctttaggcctcagaagcaggcctcggaaaacaatctctctgaccttctgctctcccttcacctgctcctttttttttctcaaggcaagactctaatcttccctcacctttctgattgtgggtgataagactcccatttcagaaggggtgctgcctcatacgctgggggaaggaatgctcctcagagaagccaagaagaatctaaacggacgggccttgctgggtttcctcagtctacgagcttagatcataccctttttgttcattcatatttctgcacagttgtcaattatgcctatccaatgaagtctccataaaaggccaagagaacagggtttggaatgtccagatagctgaacatgtggaggttcctggagggtggagctcccagggagggcatgaaagcttcatgccccttcccccatatgtcaccatgcagctcttcatctgtatcctttataattagccagtaaacaagtgtttccctgagttctgtgagcctaggtattagcaaattaattgaacccaaggaaggagtcatggacaccccaatttatagatgtttggtcagaagcacaggtaaaacaaccttgggcatgcaattggtatgggaaatagggagcagtcttggggcctgagccttcaacttggatctgacgctatctctaggtaaatagtgctggaattaaatgggaagtcccctggctggtgtccgctgcagaactgctggcttgctggtggggaaaaatttccacatatttctactgacaaccactattaacgttttggtctatgtcctcctctatttttttcccccttggcatacatataagtacattctacatattgttttttagtctacattttaatttagtaatataatgtagaaaagaagagattagaaaaatattcttaatttttctgtagaagatgttttatttagtgggagtatgttcttttctcttattttgcagttataatccaaatgtacttaaggcctcccagccttatgaggtctacctttcctttaataaccaaataaagttgcttaagccaccatcccatggaatattctctgaaaagccagcataacctttgctagtattgataaggatttttagggtgggatagaacatgggatttatatacttctgtcacttctaggtatagtttcatttgcctttattatgggtgaatttgagcaccttttatatatttaaaatccatttgtttatcctttgatttagttctttatatttgtccccttgaagtttataaaaccttttctcccacgatttcttttagtactttcatgttttcatttcttgcatttagatccacatggaatgaatttgaagcaaggtgtgaagtatgcatccacagatggttgtccacttaagccaataccatcagatttgaaaagccattctgagcatatatctgtactcaatttctatatatatctgagcctgaagggtatttattttattttgagaaatggggtctctgttacccaggctgtagtgcagtggagtgatcatggctcactataaccttgaactcctgagctcaaatgatcctcccacctcagcctcccaagtagctgggtctataggcatgtgccatcatgcctggcttgcttgcttgctttttttttttttttttttttttgagagacagggtctcactatgttgcctgggctgggctcaggtaatctccctgtcttggcctctcaaagtgctggcattatgggtgtgagccactgtgcccagcatgaagggtattttaaataaaggaaatcacttttaaaaaaaaagttctcctaaaacccttttattaaaaataaaaactctgaagtgggtagtcactcttcacttgatcattttcataaatctaggttttttaaatcattgtctaaagtggggtagagtctaggaaaatcaaatttcagtcaatcccttcagttctctctttcactgtgtttaatgagaatgagaaaaataaggcattttctctttttggtttccttttttgttttcctccttctccctcttctaacagtgaaaaggcagcagaaacaaggaagacgataaattcaaggctttgataaaccacactgcaagttagcacgcttctgagcaaaaatgacacattccatagctctgaatcatcttgactatccattttgtttttattctcttggttttggacaggtccaaactaaaacatttttagtttgttgtcccatccagtttcccgatgggttacctcagatgtgaaccataataaccaggagaagtggcatgctgggcccagggcccaactgaggaatgtgaggccaactaataacttagctccttctaaactaatatccattcaaagaaattttcaagtctcatttaatgtggatggagctggtgccagggaggactatttattgagatcttaattcacaaatgtctcaaagcagtttaaaatgttcttgatgttacgtaatgagttagaaacctgtccaaccacataccagatgcatgggctggggctgggacaagttacttgaccaatctggacttccattattcatgactccaggagctccttcactcatgaactgtgtacctagacagagacacagctcagggcaggcatttttattacctttgtgtcccaaggagagggcctccttttttgagaggcatagcatatgggacaagaatgtggttctgcagctgggcagcttgggtttatatgctggctcctctactgcctactgattgaccactagcaagttattatatttaacctctccgtgccttcattttcctgcccggggcactgtcttcctaaatctgtcttggtgaaaccagttttagctggctgttctaatagccacctagcagggctagggggagcaaagtccagcttcagcacttggcctctgtccacacggaggggaggggctcctggttactgctgggcagggtggcagttctggattcccactagacctcgttactgttccttatggcctccactgacaccatagggaggtggcttcattgtcactgggctatggtgaaagtcctgactctccacttggcctcctctgacaccaccccagcagggaggtggagggactgccttgttacagctgtgagtgggtggaagttcaggctcccagtgtggtctccgctgacaccatgggggtgggagccttttgtcagatggggatgaaagaaccagctccctgtggcttttgcgataccacaccagtggaggcgaggccccttgtgatagcctggactcccacacccttgggtggtgtgggtgggagtggaccataggtttttctgtgctatttagctggagtaagttgttactaagagttttctgttttgttaggctgcccctgtcctagtcctttgtctagagaaacaggcttttgttggggattttttatttg

SEQ ID NO: 51009 - DNA, 523 bp, Homo sapiens
atggggttccactccaatttcttttctgcagctgccttttttttcagccccaaagaccaaattcaatagtgtctttcctaattctcatccttttaggtttttctgcagtatttcctaatgttgtctaccacttcccaatcttcctactcttgactctgctttcttagtttgccctccatccctctgattgctttctgtcatctttcttcagccatcttcaagctggtggaattcctcaagagtcctcctttctcttcattgtgcacagtctcattgtcagttcatctaagctcacttagatgactcaacactcacttattcactcactgttcatttattgagcaccaggcactgttctgtatccatgaacaaggtaaacaaggtggctgttctcatggagcttatatctaatgggagacacagaggtaaacaaacaacaacagttatggagcacatagcatatcagcaatattaatcacacttgtaaacttttgtatgcataatcccaattatctgttagatt

SEQ ID NO: 51010 - DNA, 916 bp, Homo sapiens
ctgtagtcccagctactcgggaggctgaggcaggagaatggcgtgaacctgggaggtggagtttgcagtgagccgagatctcaccactgcactccagcctgggcgatagagcgagactccgtctccaaaagaaaaaaaaaaaaaaaaaaaagcataaggcagacactaccagcactgcaccctcattagccagccagctttgcagactcaccacccccacaggctgtcctggaggttcctacgcctgcagtgggagctaagaggtcagctgttgccccagagccgaccccagtaacctttgcagcttccctgagggcttcagggacctgcaccctgtttagtgggcacagagaaaatggctcatgtcctggaaatacccagcctggctccattgggctgtaagtagttcctggcaaaattcctcattaggtaacaatttggatggtggtggagatgtgtccctcctactttacccaagaggtggtagcggtgtggcctgtgggaattttgagggcagcgggcaaaagtcattccagtcccagggctcagctccagcagcgcccaggggcatctcagaagcagctacatcatcatctgtaccaccccacgccctgtgcttgtttagggctgagatcctattgggaggcatttggggaggaggtgagctgcgctggcagaaggttcagggccggtcactggggattttcctgccactcacatccccttctttcaagtcttctttaactctgcacagatgggagtaacagaagatgctggtttccacctcatcattttttaccttctcacccccagaaattaatcttcgcataaacctcaggaccagcacaatgcctgtctcaataaaatgttagtttcctttccttctgtatctcctgccttccccttcctggccacc

SEQ ID NO: 51011 - DNA, 1071 bp, Homo sapiens
ggaagtgtttgacctgtggctgagatttccacctctctgcacttcccttcctgaacaccaaccaaaagtggccctgggtttctaaccacctgaagatgactttccatctcctccaatgtcctatgtctaaaactgtacagccttatgcactacctcctaacttccccatttctatgaatagcagagcatttcctctgcctctgtcacagactagaagccatctagccattttgacttccccctcctcttttctctgtccctccacttagtcaccaagttctgtggattccttgttcactgtttctcagactcatctcttcctctccactctcactgctgttgtctaatcccagatgtggattttctctgttacatttacttcctcactggtttcctgtccttagattcctccttccagcgatcccacctgccactgcccattggagagcccttagatcaagggcctcatgttatgattaggctttgcaaactccaaattccttcttttacaacctcaaaaatttcattcaaagaaagcaggaatgattatcaggcagccagcaaccccacccctcaaatagagtctaacgtgaaaaacattatttctcaattggtaagcaaacacatccctcactgattgttggtaggtcaacaacggcccagacttggacagctgacaagcagaacccagggtcacaaggatcccattcatgtgggtcaacagacaaatgaaagagctcaaatgacagaacagtccagagattcctgctgatttttctagcgtgctctaaaatggagcaatacaccaggtttctaaaccatggacacaagacgtgacaaatgactttcagatatgtgaattcattcattcagatgaaatttacaaaagcatacaataatgtcatttttagttatacacttaaaatcatctttattaagaaaaaaatacattaaataaaattaggaccatacaggaaaattcagtctgtcaggtcaccagggccaaatacacagtctcaaaatgcttggaatgaaaacaatatttctctgatgcccccaaacagacattta

SEQ ID NO: 51012 - DNA, 3986 bp, Homo sapiens
attgcttgatcccaggatgttgaggctgcagtgagctgtgattgccccactgtgctccagcctgggtgacagagcaagaccctgtctcaaaaaacaaaacaaaacaaaagctggcgtctctttcagagtatattctttcttctgggcaaccaccagagactaccaattctctcaggcttccagctggaaaaaaaaaaaagaaaagaaaaaaaatggccactctcatctgtgccttcctccatattctctgcctgcacccacttctgtcatctggccaaaactgctgatagttcatgtaaggggttgagcgtaaagagttcttataccaggcatggtataatcccagctactaaagaggctgaggcaggggagtcccttgagcccaggagtttaagatcagcctgggcaacatagcaagagcctatctcaaaattaaaaaaaaagaaaaagaaagaaaaagaataaacaaaggattcctagtgtttcgcctgcccctagcagagaggagagctcccctagcagtagcttctggagactagattcttcttggatgttctactttttctttctactcactcccagttatggagcttcagccttcatcttaccggggcttggtgggggcacaaagccatcttgaagttcagctcttctcattcctaactaccccactactgttgtctcatcactaaatcgtttcctataatacggcatctgcaagtgcctataaaataatccttcattaatggaagtttagcttctaaatgttttctctgatgccttttcattgccccaggctttgggagaacatgcgcaggtgtgtctaggctctttagtgctggtctgggctacagataatgatgcttaaatcatacgtgaggcttggagtgagttgaacaaggattagcctatctcatctagaaattgatttaaaccaagtggggactcaatccagggctctccctacctttctcccctcttaatcatttcctgccttagttcatgctgtgtaaggaataaatgagcaatcacaaacattcctgaaatgaggatacccgtaagaattaggttttaaaagtgatttcctcctcaggatgtggtctgcatgcaaaaaaaaaaaaaaattaaataaatagaacaacagtacatagaagacaaagtgaacaatttaacttgaaagcaggttctgctccacaaaaactgtggtggaggtatggctggatttttttcttcttaaagaagaggaaaaagttattgataatgaaaaggaaatgatctgaaatgtttggtctagagggctactccatgtcagaggcaaagttgcctctgcttcctgaatatattatgcctttgaatatactgtgttactgatttactgtaagtcttagtttcactttctatgtttgtttatgttaaaccaatttatcctgtatgcgagagctagcttagttttggattggacgtctttagaagctatattagttcagaaggggttgggaagtattggctaaatgacgcagcttccagtatgatttatacccagaaacctttgcatgaagattctgactcaaaatatccattgtgtccataaactaatacattgttttctatttttgtagacatttcctgtttaactttcacatactctgtaaagtaggtgtgcctattactttgtttgttctttcagttggacaaaccaaagctcagcaaaaccaagttattttgctctcttccctcccgacccccctcgccccaaggttaccgtaaaaagcgggaatagaatcagtgttggctgcctcctagcttaatgttccatttcttgggttaagccaatctcagagcacttttaatttacctatttgtttaagcaatctcaaggtaaatatgcttgagtcaaattaaaaccaagtgtttaatgtgcttattttcagaatgattttacttatagtaattgcctgcaatacattgtgttcttaacagggcaaagaaggctttatttaaacacccctatctggtgacttagtccattttcttttcatctgatgataacatctggcagcaccctcagttcccaagtgagtcacataatgcacaatgttgcccttgtctggttttctcttagctgggaccatctaatgggatttaggctaaggaatttctgcaagcataatagtagaatcttagatttggaagggactttattggttacttggttgcaattcccacccaatgcaatcacctcttccacaacatacctgagagtggcgggcactccttgtctcccaacttccagagacagggcgctcacagctgggcaggacagttcattccattattgaacactgaattgctggaaggctcttcctcatgctgtcatgatgaactgtctctgtaacttccaccccttggccctaatttggtcatcatatgacaaattatattacagtcatataattcaagtgcaccctaacgttgaaattctgctttcacgtgatggacacatgcatagttttcatatcatcccctcagaagatgactcttcctaggtaaacatttcttgttatcttaattgttcattccccttttgtggcttctgtaatcaggattcttcaatttaacagaggcagaaaacccaactcaaaatgactcgagtaaagaaaaaaaattggcttctgtaactgaaaagtgcagaggaagaggcagcttctgacccagctggatccaggctcagccagtgccatcagggcctggtgtcacctgccatctgtgtcattcacagttccatcaagagagagcagccacgtgatcatttgaacattaggaaaagtgtaatctaaaaaagtatttttttttttttatttttgagatggagtctcactcttgttgcccaggctggactgcaatggcatgatctcggctcactgcaacctccacctcccgggttcaagtgattctcctgcttcagcttcccaagtagttgggattacagtgcccgccaccaaaccagctacttttgtatttgtactagagttgggggtttcaccatgttggccaggctggtcttgaactcctgacctcaggtgatccacatgccttggtcccccaaagtgctgaaattacaggcaggagccaccacacccagccaatctaaagaattattaactattaacagggggctgggataacagtggattggctagtaagaaataaagagaatttgaaagaatgcaggaatagcagatttaaggagtactacttctcctagggctgagatagagcacctaaggaagaatctgctactgctggccccccactcctgaccccctgggttgagacccagaacttgtcaaagagcacatggctgtgtctcattgattgacagaggagttgctgttatgcagtgtcagtggaacttgctagaaatctattccctggaacttgctggaaattcatctctaggatgctcaggaaagcaattcatgggaaagtatttcccatgggtacctgagggaggtgccctggtaagctgctggtactgaaggagccaggtgctagaggagctgtcagtgttgcaagagctggacactggagaagcagccatgctcccagtgaacacactggaaccaggaagcaaactgtatgtcttctgcagtgtctcttcagcgccctctactgaaaaagtttaataacatgacaaatagtaaaaaaatactttggggcccagctagatttttgctcaacaaacgatgaagggtaaatatggagctgagaggcaataaactgacagccgcacaccaactttgctttcctttttttctctacaggctctacagtctcatgtaccttatgacgacaagatggtgggtggcaactccaggcttttagcccttcattttggtgaccccgatgcaaagagagcacttttgtcccccagcattatgccagattaagtttgactctgttttgccaagcttgtgtcacatgtt

SEQ ID NO: 51013 - DNA, 1774 bp, Homo sapiens
attctgctggtttcactcctctgcttaaaacctcccattgattcctactgttcttagaaagaaacccatgcttccaactatggcggacagaataatggcccctcaaagatgtccacctcctaatccttggaacctaattatgctattttacatggccaaaggggctttgcatatgtgcttaagttaaagactaagagtgcaaaggcctctgcttttgtatgtaattgtaatgggttgaatagtggccctcagaaagatatgttcaaatctgaacccccagaacctgtggatttgaccttatttaaaaaaccgttctttgcagatacaatgacatgaaaggtctcaagatgagatcatcatgggtttagggtgggccctaatctagtgacaggtgtccttataagagaaaggcagaggagatttaagatgcagagacacacgggggagactggagctccactgacacaagccagtgaactcctacagtcaccagaagctagaaaggcaaggaaggattctctcctggagacttcagagagagcttgaacgttctggcctctaaaactatgagagagtggatttctattgtctttaggccattcagtttgtgacaatctgttctggcagccacaggaaaccaacacaacaatcttccctacactcctctgttacaccataaaccattaagatcctgtttgcctaccacgttgcagacaaaagacaccttgccatcctgctccctcctgtccctccatgctcctgccgattcctctctctcctccccagtgctttgatgacccattagtatatatttctctgtgtgactttgcttttagcacacacagtacaaacattaagattaaaaacaaacagcactaagattaaaaatgtttagcaaccaggatgccccatgggctgacaaatctgaatggacgccagttgccacgatggagcaaagtccagatggcccactgccaggccaggcattgcccccttaggtgctggatcctggccagcagatattggcaagactcctggtgttaattctcactgtataccagggcctgtgctgagtagacgatctctttgagaccaccacagtcctacgggtgaggaaactgagactgactgaagttcagtgatgtgccggaggtcacacaggttgtaagcaagtggcagaggaagggctggaaacctggtggcctgactttagtctgattttttgtggggagtgtgaggaaaatcctggagagaatcatttctctatggagtagggaatacttaaaaaagatgtgtcatcagtctaggggccttcgaaaattaaattatttacttcagacaaatggtgccagaggggatagtagctgactcatcattcagtccccactggagctgcaggtataagcgctgggagggaggtctcatggaggaatgatcaactctgcgccatccccatcccagggagaggagagctcagagcttatgatacagtgaggtgcagagtacgcagagtctgagggaccttccaggggtcaggaattgtatccaggttccgggaggtgagaacttggcgggatttcttaagccctgaggctttcctgcattgactcttcttgccttcaagccctgcttgccttcctgaggtcatctgcagtgaaggcttagccaggaaaggaaataagtgcttttgttaggaaagagcaaagactgcattggacaagcaatctgcacctccatccttggactagagaagagaagtcagagataaaatgag

SEQ ID NO: 51014 - DNA, 2016 bp, Homo sapiens
agtgtgacggaaaggattgctgtgctaaatgggagcagcaaatgccagtaccgatgcctttgggcatttagatccaaagcctgcctttctcgttcttcagttccccggggaggcctgttgtgggtggggaggtgtcttccttctattattccagtctccctaagaacttcgtagacagttgagcaatactttctaagggctggtcggagtcaggaaagtcaggtaaggcgcctcacgtgcacctcaacgcgtcgcgggagcgcgtcccgacctcacacatggacaagctccgcccgcggccggcctgagtgggtgtggcctccgccaaaggccccgcccctagagcgcgtcgcgaggggcgcgaggggcggggcgagggaactggcaagaaagggcggggagcgaggggtgtgggtgtgctcgtgcccgcgcgctcgcgcccggagtgtggacgggggcgcgcccgtgcgcgcgcaggggagaggccagcccaggcagccgttgtcgggttcgactggaggggcgggggagtcacctgcgagcggctgcgctggcggccagcccgcccaccgcgtctggatcgcgccggctgcgcggggctgcggacagcacacaccctggaaggccccggcggggaacgggcagagtccgcgccctgcgtccgcgaccaggaggatcggaccttcgccttcgctgtcgccgccgccgccgcccgcggccgtcggggtaggtgaagcccgggtgggtggtccgccggctcctgacgggccgggaggggagacgcgaaactttccgggcgcttcctcccgcggtcccggagccgtcgcagcgccgggaggtgtcgtcgtcgcgggcggtggcggccgacgccatgttggggtctgtgagaaacggggcgctcccggccgctcccctcgcgccggggccggcccgcgggccagttgccgccgccgtcccgccagcccgggagcgagccgcgcccgcccgtaggacgccgccgccgccgcggggggacgggggccgccgggtagggtccggtccacgggtctgcggggcgggggccggcggacgcgggaaggagccccgaggccgggcgagaagttgtggggcctgaggacgggggtcctggacacggccgggggcgtctcagggtcgcgacaaatttctggccgaaaagtttgcagggtctgcgtgtcggggaccttatgacctgaactacatatttgtatgtcacttgggagacgaaaatggccccgcagaacttgctctgatagaagcgatggtttatttatttggagccttttcaagttttatgatcctttgacgaatttatttttctttttaaaaatgtgattgaaggccgagagcgcgctgccggtgttgcttgaatagccttgtgtgctctccgtacattccagcaataacttgagtgtgcggtggaagtgggtatgaaggttacagacacctaagccctcctcggtaattcatagactcacaaaacgcgttgttgataaatgccttctttgtcgtgttgtgtagtacgttgctgaagagactcattaaagaaagatttagacagaaactttgagagtcttaaaggcatgtgttctcttaagaataagaagtgatcttgacagtttgaagtttttttcccctccctttagtttcttaagggtgaatgcctaccgcgttttgagcatttactttttttaaatactctggcagctcgtggggtcttcacgttaattcagtattaacgaaggcttcattataatctctttgggtcccgaccacacggggaatgaatggtattaagctatttatttggaaagcacacgtaatcggcctctaaataaaactagtatagtgactaagcttcagaagaaaatattcagcctcagtaaatgaatctaaatgatttttaaataaagacatcttgctttaaaattctgttaaatgaactgaaaaggctcttaaacacaaatacagtaagccctaaaaccccaaattcttgga

SEQ ID NO: 51015 - DNA, 1083 bp, Homo sapiens
cattgtggttcttctctcaactcctaggtgcagtctgtggggtgagggagaataagtggcatccccttgagaggagaacaggggagacgcagtgtccctgcaaggatgagcaaggtggagagaaggacccattggtgatatggcttcagatgagagatttttaccatggaatgaagttctagagggctcagataaaggttatgcagagagggagcaatgagaggttggtgaatggcgaggaagatcagatctcttgtggatgttagagtgtagccaaagagatgacctgagaagcctgcattttggcccttgactaaagaaaatgggaatttggtgtttggagacactagctggctacaagttttctaaaagaatgagttccagaagtcgtctagtgcatgggaggaggtagagtgggactccaggccttctagaaggaggtagccttccttggactgaggaggaatgattttcccacagaacaaagagcatgatcagaggcacagagggagtttcacgataccagggtccagaaactaagtaggtcagtgccgctgggatgcagtgtttgtggaagagtgcctgcctgtcaggtggggccagattatgagaagccttgcagcacttactcaggactttagactttatgcagagatgtgacgcaatgagagttccctgatgccagcgagaagggcggactgagggcagaccaggcaggagaccaggagcatggacattcctggcacggagaacataaagtgatgagagctacagaggagtcagaagtgatacccaatgagagagaaagagagacaaagtggcaggggaagagaggagagataactaggagagaggccagatgcggaggctcatgcctatagtcccagcattttgggaggccaaggtgggcggatcacttgaggtcaggaattcgagaccagcctggccaacatggtgaaaccccgtctctactaaaaatacaaaaattagcctggtgtggtgatgtgtgcctgtagtcccagctactcgggaggctgaggcagaaaattgcttgaacccaggaggtggaggctgcagtgagct

SEQ ID NO: 51016 - DNA, 967 bp, Homo sapiens
tttatgaagttctttaaggacctcaaaatgcagaactgcagcaggaacccgacaatggggtgggagacaaagccagcttcagagatgccagtgtttacgctgaagggacgtgggcagaatccgccgacaaataatcacaccacagtccattgagcccgagcgaggtcccagtgggagtggtgaatgagtaactagtgtccccagcagccctcttcattctgcatgatagcacagaataaaccatgccggggcggcgaggatcccaccctccagttactgtttcctcaacccggctgccccagtgctcactcctctggccagcatgcaggcacaagcttggagaatcgggcaggaagacgcagctaagcattaactttcaaattcagctctgcccaaattaaagagagggacggggtatatagagttctcagaactgtgtctggatggtcagcatattccatgttgatttcttttttgcaaggtcaccatgctattagttacagaagtgataatattatttcttctctccaaacaaccagatgttttaaaagttaatagaagtggaatttgaacctgagatgtaaaaatgagccaagaacaaggtctcagaaagcctcctggtaacttctgtctattgatttactaaaagaggaagaaaaacatcataaaaacaaaagatgaagaggaaatcttcactttttttagacttttccatcttcatgtctgttgtcaagtattttgtcaagaaatgcattataacctcatttaaaaaaataaacagaacttatgaagcaattctcttggagaataactggaatagtttctagcgatgtttcaaaagacagactcacctgcctggtgtttttgtaggtctggtgatggtctgtgttcagctgagcagaatgaaacagcgctgacagacagaagacacctcaccctctgtctttcactttggcaaagtgggcat

SEQ ID NO: 51017 - DNA, 714 bp, Homo sapiens
ttttcagtgtatttccatctgttgtctcatttaatcctcaaaagaggtggaaagaaggggtgttgttaagcctggcctggaggttggggctcaccagggtcatgggatgagggagcaggggcagcatgtggagggtcctggctacttccctcaccctgccacaccctgactcctcctcccaggttgttcagacagagcgagtcctgtggtcaagaagatcagcagatattttgcagaatcaggtatctggtaatgccagggttgtgcagggagcttaagcagctttggagatgacctgttgtggagtacaccacactgggcgattacatgaggtcactgcccacctgatgtgaccaacttacttgtgggaaagcaggctgtttgctggagtctctgaggtccaacatgttttgattcatctgaagcaagccttcacccagggtcatgacctcaccctgaagtttggtgtaaattccatgcaatctctgtgtaaacattggaaagccactctttcagggcgctttcctttaggggccttccctggggggttaggccatttctgtggggctgcagctgcaatggcaatggctgtacctggttcctctgcaggaggctgaaccccctgaaggggaagaaaggcagtgtgtctgggactctgcccactccctctgacctgtactgttccctcaggctttctggggtgcagctgggatc

SEQ ID NO: 51018 - DNA, 1361 bp, Homo sapiens
ttaagaagtattggatttggaattaggactccaggtttaaattctagcttcaaaacccactagcctaaattttcatagctgtgaaatgggaatagtagtacctatctcatagctcaaggattaaatgagataaagtatgtaatcacaacctgtatggttactgggcaataatatacgcctaagtaatgtgtgcagaaatgaatgtgcctcatttgatgggagcacagagcctagagcctttggatttgcctggggcagttgagcagacttcacggaggagacattagcactggattcagagaaagcagctggaaatgacatttctggagagagatcttggagataaacttcctggggcttggcctgggggctgtagctaggtgaagctgcaggccaggcagcttccagaggagaggccacagcaatgcgatctgtggcaaggtcccctgccctagaagccgctgagtcacaccgaggcccagaggactctgttttgttccaagtgagctttcagctgaaggacaagcctggacagggcctctgttgctgggactttgtgcccagctctgtttcatgggagcagcttggagccctgcctggccccttctgtccctcccacccctgcagggaggccccaaggagcctcagcccagattcctaaagtgagttccagctctggtttagagaggggtatgttttgcttggagctttattttaaggcttgcagcacccagagcaaaaaagccgtaattcttgcatcatagtggtaggtgtagaggtcaagcagcccccaggatgaaatcccagctccttcaatttttgacctggcgtaagttatttaacctcttcaagcctctttccttcatctgtcaaatgggagtaataaggcccacttcccaggcatgttaccagaattaaataagaaaacatgcattttcttacttaacacagtgaagagctttgtgcctggcatttattattcacagttgctgtgtgggaaggttcaaagaaaggacctagagactctctcccctgatctaatgatcatggagtcctgcagactcagtgtttctcaaactttataaccaaatcacctagggatctggaggatgcacaacctgatccaggaggcctgggtgggacctgagggtctgcatgattgatgagcttccaggtgatgccctggctgctctgcaggaccacatggtgagcacagggctccagacactttcctcccccagccccactccaccccagggctcctctcccctccgtcagggcccaggtaatgcccttctcatgggtttggctttgtccagccttcctcacctccatgcctgcagctcactgttgcatcatga

SEQ ID NO: 51019 - DNA, 2436 bp, Homo sapiens
atacaaattaaccgggctcgtgcctgtaatcccagtttacgtaatcccagattacaggctcgtgcctgtaatcccagctagggtaggccgaggtgggaggatctttgaacccgggagttggaggctgcagtgagctacgatcgtgccactgcactccaacctgggcgacagagcgagactccatctcaaaaaacaaacaaaacaacaaaactgagctaaagacaaataggattgacctggggagtggggtctgaggcaatgggatgaggctgtctaacagggcacctcacagggagatgagaaccgcttggccacacagaggcaaaatgcggccgaggtcagcacagccctctcggggttaagaacggggcgcctgaggggtatcccggtccccgactagaacctcctacgcgctggcagccagaaacaggatgaaggagactggcgcggactgcgggctctgcgggcggggcggggcggggcggggcggggcggggcggggcgggggccagccctctggggcatgccggggggcggagtctgcgctgagtgaagaggtgccagaatccgcgaagagggtcgacgaatgcgctgccgcggagggtagggcgctgagggtctgaaccctgatgcaaggaggggctggaggtcgcgggcacgtttcttttgggttgggcggcggaggggcagctctagggcctggagcagggctttaccagaacagtccacccctcccgcccggttaacctgagcgtctctttcgccttggcttggttccggtcgctactgtgggtgccgccgccgcagcctttgggctgctcgaccataccccgtcttagaaggtcaggtgtgcaaaacttggactcgacttcatccaagagctcgtccaggtcctccgccatcttgaatcgcctggccttttcccctccaatcgccaaggctccggtggtttccaggagtaacgaggggacctggcgggctcctgccccgttaggcgtccccgcgcatgcgcaccgcttcccgtggcaacccggcgcccacgagggctcgcggcagagaacgcggtgggttcgtgaggggcgggcgtatgcagggacagagttcggagctgtctctgcagtgtgtctgtgtgactcgcgatgctttgcgtttcttcctttcagcatgtctggcgtggttcctcccgtctccccctcccgggcccacgttgtaaccacaagcacgcattctcgccccttcattctctcctctcccgtttgggtccctgttgtgtttcagccgtttgtaaattcctgaaatctgtggaaggtttgagcagaacgctctaaaacacaaaaagtaagtgttgacggcaaaaagctgacattcccgtagtcggcaggattcgaacctgcgcggggagaccccaatggatttctagtccatcgccttaaccactcggccacgactactggctgtgtgaatttttgcggtgagagtgcatgtagactctgcataagcgtctgctgcagcaataggcacgttttgatgtggaggaaaccattactgagctgttctgttaagagcatatttgaatgttacctcgctcatcattttacagtttgtaaaagtcttagaacgtatcccgtccaactctttgttggaaaaaacggaaattctaattaaatccgagagagagagagagagagacagagagagagatgcgtgctcaaaactattgcacacccacttgcttgcacaatgttggagccatttccaggagagaaccaggaaccgggtaggggccaaccagcttcccgacttccttgtggggctgccagttccactccttcgcctttctctttgacaaacggctcccaggactatcttttcacccattatacattaaaaagctattacccagcgatttaaattcactctgcagggtcagacagtcccaccgtgccataaaagcactactttgaaaagtgtaaagcgtgatacaagtgtaaggtattgtaaatggcattcttaataaatactgtgcatagtttaacctgtgttttgggtatttctaaagtggggtagcaaagaggttggcacccttgggaactctggagatagtttgatccagatgatttgtttgttcaaagtatcttttaaggtccctgaagagcaacatgtagtggtgtgctggagccaatgggacatgctcactcctacccagtgataaattttcaaggattttgggagctagttgttaaatgcaattattattaaatattaaattatgcaaacttgcaattacattatgttaaaagcaaatatgatactcaaaattcatatgctagtgattccactaccttttactattatttataaatataattgagattgtttacatctgaaagactttctctctttaactttccattcagtgatgtcacttgggaagct

SEQ ID NO: 51020 - DNA, 822 bp, Homo sapiens
ttcatggcacccaggctattcctgctgaggtgaatctgcacacccacaccaagttgccctcaccaccacccccctcggcctcactcccatgcttcttggcaccagaagtccagagctggctgaggtggcatggggctggcatatcagcactgccccaagcatgtgctcagccagccaggttgtgaaagcacccaggcttggcctcaactccattccgagatcggagcgggtgccaggagcagggagacagcaggcagtgggagcagatacctttgagcctgcgggggaagggggacttcctgggctcctgagagtgcagagatgcccaggcccgcagctgtggcttgagtggttgcagctgcacctgggagggtggggctcctgcctgctcccagcccccaagagcacagggatgcccaggtccatagccatgggtgggcagccacagctctgcccagggaatgtgaggctcttgccctgccaactcagaagtggggcagggcttctgcctgttcctggttcccgctggctccgtgaagcacacagcccggccgtgcctcccccactgcaactggcatcatggcagtggctgctccagacagatcgccactgccatcaaaaccataaaacctcttttgactttttcatgaagaaatattattttacaattagggaagtcttatattaaaaaaaattgttacaacttaaacagaaagtgggtccctaggtcatggccactgcagaccatttggattaggagtggggacagggatattagaatatggagacttctctgtactgggtcaggataccattggtagg

SEQ ID NO: 51021 - DNA, 826 bp, Homo sapiens
ttcattttacttttgtagaagcagtagtttggaaggagagtgattctgttttacaaggagaacattcttaccagtctctgaacagtagctctaccactgcctgaaaacattagcaacgtgtttatttaagaaagtcacagcaaggactcctatttataacaatatcctcccattgcgtaagactttctccctaccatttcctgtggtaaatttgttgttggattctagaaaaaagaataacttggtagaaactaagatttctagataagattaaaacaacccagacacgctctctgagaagaaaatgcctctttggaacagagaggaggaaattggcccaatttgtaaagtctcctgacccatcagggaaggacacgctgccctgactggggccgggtcagcgccagttacatccgcaggcaccttgcagtccaggcctccaggggccgcaggtggaatcctgtggctgaggacgtgactcagaagtgccggccaaaattccatgaatctgttctctctggcaggtggtcgagatattgaaagggctgggctttgacagcgggaggacctgggccaaaacctgagggagtctaagcatggaaaagctgacacttggcctggaaatcaaattccaggcacatgtggcaatgtggttgctgttttacaagaatgctcgggaaaaagtctcagaagctgccagggccgggtcatctgcatcctgcctcagctctaccaagggtcacaggcgggatagtgttgcgcattttttcctcccccaaactcctggtgcatgagactgataggattcatgctgccctcctccctc

SEQ ID NO: 51022 - DNA, 1263 bp, Homo sapiens
gacatttatccataaagcaataacaggtgggaagaaacttggagatgaaaatctgaacccacagcagccatttgactgctctgtttaggagcaagttttcacataactctaatcaatgctatgctccaacccagaagtattaaaaactatcttctaagcaaaaactatttactgtcagcttttataacattagaatttgatacaaaaagttgtataatgcagtctttttaatgacctattttgggcctgtccttgtcactttgccacaccaacaccatctaagccttattatatgctaagatttttttcttttattcctggattctgaaaaaattggtttgagctgcagagtacttctttctttatatttctaaggaagctttcataacatggtagccaaattatgtgaaaaatgtatccctgtggtgatgtcattttcaagggaaaacatacttgggatatgaagtattcccatcaggaatctccgagatctcacatctgtactcttaaccccaagaggttatcaaatgatagtagttgattgtaaaagggatgacttctaatggggtgttggcaggcaggctggccaacagtcagaggtcactgcacaaatatttatagaggaagtgaaggcttcatttttgctttcactatcagacagctctcacaaatgtgcaaagaaagactaatgcttgggattaagatacccttgtacataggaaaatccagaaatcgatagcttgttggtagagtcttacatggtgtcaaatgccagcctctaattattcagtgtaggccacctaaaggagtttcataataaagagaaaatgtccctaaataaataaacaaagccagatgaagaagtttgaagaaaaatgcatcacctgcccaaatagaacatgaagaatcctttaagaatatgtagacaataattacaaagctgcatggaaacatttatttcttgatgactttaagatggttgccaatatctaaaagtagagacactttttaattcctttcagaccaaagatgtattatggcaagtcctgtgatctcctattcattcccagagcaagatatgaatgatcattagtacaattagatgacaaaattggaaaagtacaagtggatactcaggtggtcttttagttggttcatcggggaagcaacatggggtggcagctaggacacaggctttgcagcaaaaatgactcaagtcagaagcctgtctccacttcttgttaagtctgcaaatttcttaac

SEQ ID NO: 51023 - DNA, 1144 bp, Homo sapiens
ggagatggaatgaaatgtgactgcaaacagaacaaatagagactccggtaaggactggagtgggggaagtgaaagagataaacgcagattccaaatttatggtagaagaagaggaggagacacttggcagcaaccacagattgactccttcagtgtctgttcaatttttccccaacattccagcccctctgactttacgtggtgctcagtgggctgccccacccttcagatccacccagccttgatctcaagagtgacctccatgttcatgaaggcattcagccactatttggtccagcctcaaccccaccagccttctcagagatggggcatgccaaagttctttcgcaagtatgtagtgagagtttgagtcacactcttgcttaagaggatactctatgcattttcagacgtatgactaactgggcaaaaagtttaaagaataaaattcagaataacagtgttcagcaggacagttgttctttgctttccatgttatttggggagcttaggaaaaggacagaataagattggcctgaaacacggaacaccataaagagacagatagagaatcaaagtccctgaatggcatttaatttccatgttgctgtttttcctggtctggtttcagaaatcctctgacagttggactatttgctatttagtcattctactgtactcattttactgacaatcaacaggcattgcctaatttgacactgaaatgaaaaaaaaaaagaccaaagtagattacaatgtaaaatatacatttaatttgatggtactttttgaatattttcaaataaaatatcaatcataacagcagcaaatatccactgttggaagacatttaagtacattcgggttttagctaaaacagcttgcaataactagatttaaaaaaaaaaaaaaagcctaattggaggctttcacattaggttctgacacacagtttttggtccccttgtgtcttatttccaagatggtagcacctggaaaaacatgcagcttgattttcgtaatagatatgagctcagatagtaaggactgcattacagcagttcctttgaaacgggtggcagttattgctggagtccaagtggctgaatcgcatgcttggaaataggagtatattcatctgttt

SEQ ID NO: 51024 - DNA, 1274 bp, Homo sapiens
ttctggcaacctgatgtttcctaacagcttcacaattgctgggggcggggagaaaaggatcaacattttttaagctactccaacttggttgcattgcagtgagacgagattgtgccattgcactccagcctgggcgacaaagcaagactccgtctcaaagacaaaacaaacaaacaaacaaaacggctactccaacttgtaccgccagagggcagagattagcaaaaaaaaaaaaaaagaaagaaaaaagaaaaaaagaacctacaataaattcaaatttctccaaacctactgatcaagctgacgctctagataatccaaggtcaacctgaagcgtcgctcgtatcccttgctcaactgtctctgattcgcagtttgagaagcgcgaggggtgcaatgatatttccaattctacttccttgggtcactttgcctcagttatcttatcagcgtaaaagggaaattaatatctccctcgtcgcaatggcaagaaaatttatagggccaatgcacacgatagagcacttgggtcatagaaagcactgagctcattcgggttgaaagtcatccactagttatcctcttgtgccctttaacttttctaaggccaaggggaaggacttccaagcacgggcagctggaactccagggctgtcagagccaccgcgggcaccttcacaaacagcgggttaacatcccaaccctatacaggcaagcccgccctggggacagcaaacgagtggggaagcacatccttttcactggactgaagcagccaatttcccttccgcgacaaacttggccacttacaaagaagagagaaaacggagcaagctgcagcaaaaataaacggtgaagcgcgacgatgccggccaagaagacccccagttacttaccggcctgcttaccagccattttgaccagaaagagaagcgttgccttctgggtaagtcatagaggacaagctgggcccagtccgcaggcgcgttacgtcacatcgcgaacagagaaaggccgcttgcgcaggcgcagttctgacgactgccgttcagcacctgcgtaagcacctctcggccagggtgaggccaatggagtaggcggggcattttgcgtgctacattctaagaagtattggttgtgatgtgatgggaagaacacaggtcaggaattaggagaccaaggcttaaagctgggttctgttatttgctgttaatagctatgggagcgtggacagtattaattcagctctttgtgccaggcaggaagctaaatgt

SEQ ID NO: 51025 - DNA, 2367 bp, Homo sapiens
tcactttcaaatttcaccccgtcattaaaagatctttgtgcatacaactaatgtttatccttgcatttttatttacaagtgcactatcttctccacatcctttcattgctgcctacacatcttaacaattgattaactgttcatgcacgagagcagagctgggtctcatccctggatccatccttccggggactattctccactttcccagagccttgtactgctctaatgtttgcggaatggaaataaatcaatggcaagtacagttaactcacttgcttacacagtatgcaaaagcgggtaggggatgtgcagatgtgtataaaagccctgtaaggtggtaacctgaagtcttctaacaaggtcctttcatcaggaaaattacagaaaacccttaaagaaactgaagtctcttaacaattcatatatactgttctcaatgagtgcctagtgcttcgctagaaaaaggcactgaaatagagttcaagatttctacctacgaaatgctataaatgaaatcaggagagaaagggaggttatgggggcagcttcctaataaagggtctctcaatacttcccaggccattttagcccacttcagttccccaaacttgcgcaggaaggcagagccccctcctgaggcttctcacactgcgctaattagccagcatggttgagttttcactacatcagccagggaaaaacacaaaacaaaaccaatcaccctctactgggccgcgaaaacctaaaggcccttgaggccctggggcgcggtctggacgcgggtgcgccggaacctgaaccctcgccaggagcgcgatcctcgtgctggggcagctcctgctttacctgtggcgaggcctgcttcccgtagcgggtgaccccgggaccgaccaactcgctgggccgcacgtcccgtcccgccgcgccgcacgccggctcctcagcccgccctacacagcgcagccgcgctcccgggcccacgtgggccgcgcccggagtgggcgagaccatgtgccgggttacgcggggagacagcgggctacgtgctctgaaaagagccagccaggggccccggctacccttctccggctcgctattcctctgaagtcctgtggacttggagtctgaaaattcctcgagtggtagagatgcctcagctaggatgacagcgtggggacggccggcggcgtcccctgccccaggccgcggtggcggcgccgcgaccccgccctctcgcgcctgtccttccctctgctcccagcctttgctgggcgccagacccggctttgccgtccggctattagcctactgtggctagtcacccccggggtcccggccttctcgggctggggccgccgccaccgcggcaggacggggaggcgggccatggcgtcctgcgtggggagccggaccctaagcaaggatgatgtgaactacaaaatgcatttccggatgatcaacgagcagcaagtggaggacatcaccattgacttcttctaccggccgcataccatcaccctgctcagcttcaccatcgtcagcctcatgtacttcgcctttaccaggtggggcggcccagccgagcggggggcgcgtccaagggctagggaagaggcgggagggagggtggcggggaggggggcccggcatggctctgggtgaggaagtgggctggctgctccacgcacacgcactggcagcccgccgcccacgcggcccctccgcccgcccggtgtctcacagtacgctagcctgctcccctacccctcagtgccccttctccatacagcgcctccggttacacggggaacgcacgcgagtcacctagcacgatcgccccctcacccaccgcactcagcatcgctccacacaacatcacgacgcgggcccctcctctgcactgctccagccttcgtccctacccagcacaccgcatgaatcatgtcgtatgcaccactttcagcacacaccgctacacatacaaagcaccccaatccacagcgcctgcaggcaccatacacaggcccaggacacaacctagatcccttcctgtggaactccggtattcggcactatccgtaacgcacaaaaaatgcacatgtgtgctgcatacacggtctttcctgtgcagcacttcccgtatgcattgcacacaagtcatccagcataacacttcccccagcctcaaacactaccatctgtaccacggcacaaactgccactctaaacacacacctcacagcggacctttcctttccagcacagcccaatacccatcatctgtgtacatggctgcacagacaccagcccgccacacatcacgcggtgcataccctgctcactcattacctaacatacgtgctg

SEQ ID NO: 51026 - DNA, 952 bp, Homo sapiens
ataagaacttaaaatttatcaccattcttttcctttagttgatgtctcacccataattcttaacaaggatcataactttctataaaatagatgaatgtggtattaaagataatacctaagctacttaacattggtctaccatgtaacctgggattaaactttttattgggagagatgatccttaaacagtgactcatctaaacatgaacctataggtctttatttaaggactcatattaaaagtaatgagggagaagatgggagggggagagggacaattaacctagaagccttaggaatcataataaaggttagatattcctggctgcctgaccccagggagaaagacttgtctaaaagattgtaggcaagtgaatggactttgctttggtttcctgaagttaccacccctctggtcaaattcctgtactcaaatattaaattgagacagaatcggagtcagagtccagaaattctttggagtgcaaactttttttttttttttttttaaactcagggctttcctgatacttcctgctgttaagactttgtctctttgggtagttccctatcctagctgaaacaatgctctgcagaagaagccaaggtgtttgaaaacttgattgggattttagatatttgctgatggtctcaatagccctctgtagccaacactctgcaaggggagagggaagtcgctgccagtggaccctgtgggtcaggctgagactcccccctcacgttacctgagtcactggcctactctgtcatatcatcttgctcattcttgccacctactatggcaggtggatgcctgctgtgtgtcagggcattgtgccaggcactagagctaccttggggaaatgaggtgggacttgtgccctggggagctttcttattttaatctgtacatttggtattttcacaatatgtggtcagtgctatgctggag

SEQ ID NO: 51027 - DNA, 664 bp, Homo sapiens
ggccttgacatccctgtgtttctgtggcctgaaatcagtcgagatgccagctcttgaacagggtccccatactccacgtggattcttttcccaatgttttgacgcattctgcaaactgttggaaggcaatttctctcccctgtagcagctccctctgccctcaggaatgtgatttacaatctgatgaggccataaacctctacttttcacgtctgaaaaacagcaaagtatgggaaagaatgtaaattataaatactgaattcctatggtcagcaataatggaatggcctgggtgggttattttttttaatatggtatgcatatggctttaatttcgaaggggttgggtcctcccccaccactgtatttcttgggagaacagataacagcaaaatgtcctgctgtgatacggtgtttttccaaaatgaaaaaatagcatctttctgatgactcactggccaaatactttgaaaggccactgtccatggagggggatgggatggtaggtgacagtgacatttccatactcaccaccctggtgatctggtgtctgtccaccccaaaataacccccaatgttctcacttagcaacctcccgccaccccactttaactttctaggaggaggttttcctatgagatttttgaaattctcttcccatctc

SEQ ID NO: 51028 - DNA, 464 bp, Homo sapiens
ctcgagtgactgagacaggagaattgcttgaacccaggagcagagatcacgccaccgcactttaacccgggtgacacagcgagactccatctcaaaaataataaataaataaataaataaataaataaataaataaataaaagcaacagcggcttccctttggtccagatggtgccctcttgtgtaaatagtgttgttaaatgaatgcccatcagctggaggacactcgatgacacactggaatgtggaaagagcagggcagatgaaagaatcaccaaacaccttctgaatgagcactcacatcagtcaacaggaagcctccactgtactgtgatcagttttcgctttcaagtgattgactattatgttaatagattatgaaatggaagtgatcaaaaaaaatggaggcatcagccttgtatttgaagtaagttttgtaagtaaatcttataaaggaaaatgac

SEQ ID NO: 51029 - DNA, 737 bp, Homo sapiens
cactttacacgggtaaattgcacagtacatgaattatgtcttgataaagctggtttttaaagaagacccacacgtgggagcagcactgaggggacctggtgctgatttggaggaggattcggcctctcatttctgttttctctgtgcttctgcttcatccttcttcctgtctgagccgggctttctctactggctctctctctgcccaaggagaaaagtggcttactctacattccagccagctgcagtggccattaagtagaatctctcacctgatttccaatttcctggacagagacgtgtttacccagcgtggtcagtgccaggaagcagggctgcctggttcttgcagccagcaccccccttagtaaaactgtgcagggtttttactgtgcagaggagcagttctgatcctcagaggtaacaaaagtcaattttcaatgttttctagacagaaccaccatgcagtgagcaccttccatgtgccctgtactgtgtcaactcctttcacctttctaaccccatttaatctctgctcgacactgtatgaaagcatgtgctgactcaaagaaaacattctcaattgggttcaacttgtggcacatgcataatgtcatatcaaggccacagctggtaaaatcatctacccaagggtagcaaggggcctcctgcaatgggattaccagccacagaatctggttaccagagggtggtgtatttagctcaccaaaacacag

SEQ ID NO: 51030 - DNA, 1220 bp, Homo sapiens
gatagtatgataattttcctattagtcaagattttaaaaaaagacttcaatattattttattaatagaaacagtgaaatacatagagcagttacatagaattaacatacagacagcagttaattcaaacatggaacctgagtatttgaggaaataacttcccattgactaccttgattgattgaattggccagaaagtcgattaatttttcatttcaattggactatagagagatgctaacgccctaatagcacatccttcctccttctcaaatgatggaatatccactttcaattcccaacctttgccaatgaagccagataaatctctaaagagttttgataacataatttgacaatctccatcagccagttcatggcagatgggaggtctagtcctggttctgccatcactagctgcaagcatgcaggggcaatctggcctcccttatctgtaaaacaggggttttgggggctggactttgattccctaaaactcctggcagctctaacatcccctgtgactctggctctgcccacaaacctctgaagctttcactggaaaatgctcttagtctatgcacatcaaatatctaacacacagtatttacccttctgatgaaacagccagagtggaatttgaccttttcaacgaatcatggatgtgagagccaacattctgtgcacgtaaagccagttggggacaggtttagcatttgggcatgtaagtaaggcagatttgttgactaacatgttttcagtgagtattttaatgatatggggaagctagttctgacctattgtcagcagcacagttttccctacagaactggttgactggcactaattcatccccattctcccacctggtctccttggtaaccaaggtcctagatctatgagatatttgcaggacatctggccaggattaaggcacagactagtgctatcagagatcaagcccatagccttggcctttgaagatcccaagcgaattaaagaactgcaaccacaggcagggatgtgaaaccacccaatcctgctgctgagtcaggttagcacagcagctgagaatgcaggctctgcaaccaggctgcttggaactaaacaccagcctgtcccttacttatagtggaactttgggcaagttaatttgattctctgggcctcagtgtcctcctcattcataaaatgaatttaataaaagtactttcctcatat

SEQ ID NO: 51031 - DNA, 1041 bp, Homo sapiens
caggaaaaaaagaagttagaggtgcattcagcccatacccataacattgagaccagctctctgtgatgaaactggaagcaaattccagatgagagccccaattgtgccagaaaagcattgcaaagcccagtgatcctgactaaattgtcacacacaaagcagaacctttgataagagccatacaacctctgttgcctgggtaaccatcaatccatcaagccagccttgagtcataaacggtgagaggagaagggctgccaggaaaaaggggtgtacagacacttcttgttcctccccacctccagatgtggcctgaggctgccatgcaaggttaatagaagcctactgttatgtccctacagacctaaaagacccctcttaccttaaccctaattcaaggattcttggatctccattagtcttattacaaaacctcctcaggttcttatcagtgcttagcaccttaccagccctaagccatactcctcaaaatgccggtccactgattggcactatgttgttcacaggatgcctcctggactgcactttagtaacactagactagggtgtcctcaggacaaccgcggctgctcaccagagctcacgcgcttcctgtcactttcactttggactgtgctgatgagaaatctactctatggttctgctttccatcacatccaagatgctgcacacaaattgagagagaaaaattgataaatatgccttcactgagcaactagttctagttctgtaccaacacttctaggtatattcccaaaagaactgaaaataggtgtcaaacaaaaacttgtacgtgaatgttcatagcagcactatttacttcccatagccaagggttggaaacaaactaaatgtccatggatggatgaatggataaataaaatgtggtatagtatacaatgaaatagcatttggccataaaaaggaatgaagtgctgatacctgctactacataggtgaaacttggaaacatactaagtaagtgaaacaagctggacacaaaaagtcacatatggtatg

SEQ ID NO: 51032 - DNA, 4159 bp, Homo sapiens
ggtttacaggatccttcctccatgtcccttttttgggggtgcggaaggatttgggagaatgggaaacactctcactatatatttattacattaattatcttctcttttaaaatgcaattttcatgaactggcgatttatgaacacttcacattgcttgaaagcatcttacactttttttttccctcaactcacaaagcagtttctttctactggtcgaattctcaaggcagaaaagctacatacgtctctcgtttcttcactaattgttctctagaaaagggaaagtgaagaagggaaagagaaaagacaacggggaagaaaagagcatagaggagagaggaaaagtggggagagaaaggaagaaaaggactgagaaaacgcaggagccctggcttgccggtgagcagagccggcgcagccacagcgcggagccgcggcgcccactggtcctcggagctgccaatcggcgtgtaatcctgtaggaatttctcccgggtttatctgggagtcacactgccgcctcctctccccagtcgcccaggggagcccggagaagcaggctcaggagggagggagccagaggaaaagaagaggaggagaaggaggaggacccggggagggaggcgcggcgcgggaggaggaggggcgcagccgcggagccagtggccccgcttggacgcgctgctctccagatacccccggagctccagccgcgcggatcgcgcgctcccgccgctctgcccctaaacttctgccgtagctccctttcaagccagcgaatttattccttaaaaccagaaactgaacctcggcacgggaaaggagtccgcggaggagcaaaaccacagcagagcaagaagagcttcagagagcagccttcccggagcaccaactccgtgtcgggagtgcagaaaccaacaagtgagagggcgccgcgttcccggggcgcagctgcgggcggcgggagcaggcgcaggaggaggaagcgagcgcccccgagccccgagcccgagtccccgagcctgagccgcaatcgctgcggtactctgctccggattcgtgtgcgcgggctgcgccgagcgctgggcaggaggcttcgttttgccctggttgcaagcagcggctgggagcagccggtccctggggaatatgcggcgcgcgtggatcctgctcaccttgggcttggtggcctgcgtgtcggcggagtcggtgagtgggccaggcggaggatgcgcgcgccgtttagggtgtttgaagctacgagaggagcccgcagggaataggggagcgccacctggggaacccccagtccccaagtatacaccggagatccgctgggacaaatgcgctcgtccggtcaccctttccccctcttcccttcctcagaaaagcgctgctcgctggcgttaccccgcggtccgcgggaatgggggcaccgagaattgcggtttggtctagccgcagaggcccctgaagtcactcccaacttcttcgccctcggcgggtcttgctgcgtggtctgggaaggacggaggggaaagggtggcaggaggggggagcctgggtcgggcccgcgagggaacggctccactccgcgcgctcctcgagaccagggatgacctggaaacttcggggtcccttcctccgcacaccatcccccccgcgccagctttcctgtttgactgcatgcaagttctggggagatgggggccagatttaagagacccgcgagtgtccagagagaaaagtttgcaaaagttcttttgtttgatgctccctgcggctagggcgaggtaaccgacactacgtggaatcgcagtaggcgatccctcaaggggatactgggggaggcacggaacgcgtccgaaaatgctgggacgccggccactggattcccagtcctgcggcgaccccctcctcgttgaggggtggaggttgcaccgcggggcgtcagggacgggaggacattttcataggagttacacgggagtgccgcaagcagggcgaggcggggtacgtgtgacacggcgctcggcttcgggtcgcctggccgctgggggacagaggcttccctcccgccacgctcgccctctctggccctggcggggcgcttctggggccgggaggagtctcgtctccggcggagcgcctgccggcacccagcttccctcccccgccctggcggtgggaacttgatttctccttttggtcgcgcttcgggggctggagcttgtttccccacgtcgcccaatgagcgccctctaaagggaactgcctccttggcctcctctcgtccgcagctgcctccacctgggcgccaggagctctgtcgggccaggtggaagcttgagcaccccagatttcgtctgcagcctcagtgccctctggggtctcagggagtgcggctgtttctggcccttctggttccccacgtcctctccctttgccatttaataacgtgtcaatttctaattaattgaatggtcttttcaaagacaaattatatcatcttaaggtcttttaggtagttttatgagtttgagtctccctcccccccttttttgtgctgaggctaatttaggactgggaaacctctttggcatcgagcggcagatggacatttttaatcagtgtgggagcctctgtgtgtgctagcagatccccatacgttctttgtggttggagagcatgtagaattggaaactgtacagactacatgagtattttgggtgctcaggttgtaaaatagaactcccagccttatcagtgtttccctttggcaaatgatggtttaatccgttggtattagttatctcccagccagttaggatgaactttggctctttgtacaccaaaaggcagcagttctcttgtttatttcagatgagcgttgttgctcctcttgttgcaaaacagggcaaagggacttcatctaataaatttcaagagcctgcctaaaaaactgcacatggttaaggaggccctttttttttgctgagtcttattcatggatttgctaggaaatgttactgttttgggattctggagaaagaatgtttctgtcttctgctcctctgggtttttgcataaatctaccagtgctccttaaggaagttttttggccgaactatatacctgtcctccccggtgacagctttcccctgaactgtgtatctttggggttctaatatttctcaatttgaaccagaactggatgctttccgagtgaactgcttcattgtgatagacactgttttcagtaattggaaaatcatccaaaaagggtgattagatatttataaaatgtcaacttagagactagcagagaatctttgttaggcagtgagtcagtctttctaaatagaagctgtttcaaggcccagaatggctaacagtccatttaaattacttttcagtctccgtttgtttcatgtatagcagcaaaaatataaatgaagtcaaaagactgaatttaaaaaaaaattagcaattacagaatattatttccaggactttgcattttaatttgaaaactgcaactgtttcctgggatttagaagtagtgatttgggtttaaagtctccctttaaaggaagaaaggaaaactgcctacagttagtgaattcttaagttttatacttagctctgggggtaaaaaagaggttctcaggaactaaggctcaaaactgcctatgaaaaggaactggtagctgttcctttatggatcctggaggcagctgggaaagcctgttcctagtgatccattcatactttccactggcaggttaggactttggctgcggagcaccaggcaaggggaaaatctgactgagtgtggcagtagtgatatgctgctggttttctgtccattttgtacatgactgtttatctttagaaataatatattgcagactgctataaacacataatttgaactggaaatatgtttaagaaaaggaagtgttttgaactagaggaattttataaacattcttagatgtctgtaaattaaaagaaactgtcaagtcatttgggcccatgcattatctctcggtgtattatgaaaggcaggctctggaaagtttgcattagaagggtaactaaaatcgaaatcatgtaactttgcagttctttagaaaatatagtttggctgtttta

SEQ ID NO: 51033 - DNA, 1142 bp, Homo sapiens
tgacctttatagcttccttctaaccttagaagattctgtacgacattttaaaggtgagtgctgagcaacttaaactatattttatttcctttcctgataacttggtctgactgagactagacatcttttgttgcctatagttgaaggagtctggcattctaggaccaacttgctgttaaactgatggcaagatctctatttgccaaagttaggggactgtgtatgtaaccattgaaatctaacattacctcaaacttcaagggactctgacaggtactttaaccagttagaatggcacacttgactatctggtttgagtcagagcagtgagtgcctgggagaaaacagcaaactcaagacaccatgagtggactttagggagagggaagagagacagagggcccacaggccagcacgaagaatgtaaagggaaagtagccactgtcccaacctgccaggggtttgggaggcactgttaatttcccaagcattcacttatccgcactttgaccaggcaacccttcttcggctggacagggacactcatgctggaccttgatcacccatgacccatgtgtcatagtgcagagctttccttctgaggcttaagtgaccagtgtgacaagaaccctgaaacacctaatgtacagaaggactctaggtccatggtccccaacctttctggcaccagggactggtttcatgggagacagtttttccacaggtgttaggggggatggttttgggatgaaactgttccatcttggatcatcaggcatcagactcctttcacaaggagtgtgcaaactagattcctcgcctgtgtaattcacaggggtttgcattcctaggggaatctaatgctgccactgatctgacaggaggcggagtgcaggcggtaatgagattggatggctactcacctgctgtggggctgggttcctaacaggccatggaccagtactggtctgtggccccgggggtcggggaatccctgctctagtcatgaaccatttgtctccctcttgatttttcctgtgctagcgctcacttccatgtttccttctttattctgggtaaagcaagagaatgctggacaggtagccagaagacttgggttcttataggctggcctttctctg

SEQ ID NO: 51034 - DNA, 1199 bp, Homo sapiens
agattaccctggtgctttaaagacagaggaatgcttaagtatttggtacaagaatccatccaaaaaaagacgcggattttttttcaaagataattgtgggaaattctgctaatgatttcttttcccttaaaatatcatacaggggagtaggatttaggtaggtgtaaagttgctcaacgtgttggtaactttaagattatttcttctctggttgttgccacagacactcagggtggccacaatggtggtgttgttttaggcttctttcaaaaaagaagtccagtccaggataatgttgtaaagtggagtatttttctttcacatcaaagggcaaggaatgttttacagacagtgagctaagaagtagggcacagatatttcagtacttgcgttgggaaactatgtgtggaatgtcatagttcatataccagagaccccgaagtgaatccaggtgcctgcacggtgctgacttttcctggagtgagatgactgtaggcagaaattgcagccagatgaacctaaaataaaattgatggctttattggacattcttttcatgagatttaacttcttaacgtgcacatacatcactctggggatgtcattatcatggctgacctttcgtttgggggagctgctgctcgctgtctgtgcagctccgatcagcttggctttgattaccacccacatctgttgagcatgtgagagagagattttgaaaaatctcaagcacactgacaactggctacaaagatttaattaagaccggtcagaactaatttcagttatatattccagtttagggtatcaactcctctggtttcagaagggggagttatgacttcctaaaagttgttgttgaaggcagcatgaggaaatctccttgggcaagcagtgggtttctttgtcctagctcccccactgctacctggggttaatgattgcagggtggctggcgtaatgaaccagtgccggaaagcttattatcaacatgctgaagtcatatttagaaatcattcctcctccttttttctcctttccaatacaagtcagagcactgctgtggttccacctaataaatactgcaggcttcattgggctgttcaatgagacctaatatagtatcatttgtgcactttagtgggtggttcctatttatatttttgtgtggtttactgctcaatcttgggaagatgtgg

SEQ ID NO: 51035 - DNA, 1668 bp, Homo sapiens
aaatgttaactgatttaatgcttttggcagctgcttgaggtaggcactatcactatcctctccattttatagatgatgagcctgaggtgcagagagatcccgcagctggtaagtggcagagccaggcaagtctggtgccagggtttcagcgactatcccaagctctgcttagtcttcctgtacaaagggaacgataactagtagtctccagtgatgtttttgttccagatagtacaggatcaaagtgatattttggagacagatccttccattttcaaaagcatctgccttaaagacatttgtctagaaatatttatatgattgtatcacacttaatatgtgcttggcttagagcaggcaaaaacaaaaaacaaaaaacccaaagacacaggtcctgcccttggggaactcatactctgctaaggggagatagagaagtatgtagacttacaaagaaaaaaataatttcggctgagaaaggcaaatgaagaaaataaaacaagccaatgaaagagacctgtgcattccactgtgatagccacgaggtgcatgtgtccattgagtacttgaaacatggtcagtcaaaattgagaaatgctctaagggtgaagtacacactggaattcaaacttagtatgaaaaaaatatataaaatatctcaataatttttacattgattatattttaagtgttcatacgttgggttaaatagagcatgttattaaaatgaatgctaagtgaaataagctaggcataaaaggacacttttattgcacttatgaggtaactggaatagtcaagttcatggaggcagaaattagaacagtggttaccgggggaagggagaatagggagttactgtttaatgggtagagtttcagtttgggatgatgaaaggtctagagatggatgtggtaatggttgcacaacggtgtgacgatactgaatgccgctgaactatacacttgaaactagttcaaatggcaaattttaggtatattttactacaactttaaaaagccaaaaaatatgtgtcacacttttaaaaaatgtgactactagaaaattttaaattgcacacgtggcttgcgtcatacttctgttggagtgtgctgggtagagagtaatgggtaagatggtcaggaaaggcctctttggagagggtcacatttgtgtcctatgaaatgagagggaactgaccacacaaaaggcttgagggaagcatttcaggcagaggcagagcggctgcaaaggccctggagtggggaaagtgtgtatgcttagggaggtgggatgaagttaggatggaaaggggcaggtccccgatcaccggggtcttatgggcttgaataccactgctctgcataaaacttgaaaatagaaacaaagcaataaaaaactcaaatttccatacagattaaaccatgcgaaattgctggtattctgacctatttatatgattcagcctaatcttgtgtttgtggttctggggtttgattctttccctagtgatgtacttgtttggctagcagagaaggcactgccttgctttctaattatttgctaattggtgggtaccctaaagacagcaccccctcttgctggcttacataccactttgcctgacaacaaatttgtgttgaaacggaaggaaacccagctgctcac

SEQ ID NO: 51036 - DNA, 3877 bp, Homo sapiens
ttgcactggttgaaagcatgtgcaggacctctgcttagtaggtaaggcgttgtgttttttaaacaaggctttgaatttctaaataacagatttccacactggcagtttgaaacatggtatttgttcagtgtaggttttacctacatgagaaaaatcaaacaaatagatttgttcagttgctatcctacaaattgtcttcgctgagaaaatggacaggtttgtgatgtttctgactacatcaagactctactacacttgatcttttgtgtattgaattaacacttgttcttgtcatttttattacaactaccgtataagtttgggctgaatcattttatcaaactctaaatttttatcatcaaatgtggaaggcctaaatcaccatcgctgtcctcaattttccaacctaaaggtgtttatttcctcttaggggtataatacgaaggaaagtagtgtcaccagatctcttcttggtgtttttgtattggtgcctggggtttgggtagaggaagcagcagcagcagctgagactagaactgcagctgaggccacttggtaaagaacttttttccaggctaaggacttttgttttgtttgtttgtttgtttgtttgtttgttgtttgttttttgagacagagtctccttgctctgtctcccaggctggagtacagtggcgcagtcttggctcactgcagcctctgcctcccaggttcaagtgattctcctgcctcagccttgcgagtagctgggattacaggcacctgccaccacacccgcctaatttttgtaatttttggtaaaggagtttcaccatgttggccaggctggtctcaaactcctgacctcaggtgatccgcccgccttggcctcccaaagtgctgggattacaggcgtgagccactgtgctaggcccaactaaggagtttttatgtcatcctctatgtggcagggagccaataaaggcaggagagtgatacgatgatgtttgagttcaagaacagtccctctgcatcgaatggcttcaaagacacggacgtgggcagtgacaaggtcaggaggccttagtccaggtccaggcccaacatgatgagttagccagagccggggggccagaggcaaaggggtggagataggagacaagtatgtatcttgccttccttctaggcattgtgggtttacacaactgaatcagatgcgcattctcctctgggaatttcatctatggaggcagtgtagtgcttcagtttccctggctgaatgtggcattacgcagaaccctctatctgtctgccgcacattttcctcttggtcgtaccttgttgctttccacagccttcctttgctctcctgtattcacatcttgcatcagccaaaagggaaaggtctgaaagaccagctttgtttttctcccagcttgtactctggaccctgttagccaacagtattggcactgcctcacagcgatggtcagtcccaaattaaacagcctcgttatgacaccctacagccaggctgcagctctggacttgtgcttctgcacgtttccttccagttgctttcgtccagcgtctcggtcccattgagtaagggagtgtgtgcagagtatgtcccgaggttttctcctcagtcaagcagactacatttcgccaggtgtaaaatcggtagtttcgaattcaccccttttcatggccttgaggagatgcttgtctccttgtcccaagggaatattggtgcataaatcatttcccgtcctaggcatgttcattccagaaacctttcagaacagagtgtggagtcttcataaaaggaatttgtcatgagcgcaggggtttttttttattttttattttttaaaggggaaggcaatagaggtattcattatctgctacagagtgaaaagggccctgctttatgttaaattggacttcatggaaagatattggtaatttctcctatgttctttgtgctcctgaaatcagagtgggagagaactttgatttcaaaattattttcaccaccctggatcacagagaaacacacttttggctgcctttaaacacattaaacatctggtcagcccagagaccacccgggagccctgtagaccccaagtaactgagtggctgagggtaagccagcttctctagacacaccctgacttccaccccaagtcttgttgaaatacaggcctgacggctgtcccaggaagtcagttggcttgtcagactgccagtgtggttgaacggtgaggtggctagaattctctgggaggcatttttggcccatctgcctggtagcatgacagatgtgttagtccagacaactgggtcatcgaatgaattgaaattcaatttacacatagggattaagtatctcagtattacccttgccacatcaaacttcattgacagagccaagaggaaaatgaaagtcattcaatgttaagaaaagggaaacaagattctaacatggaaagggaatattttgcttacttttaagactgtaggttacttaaatagatgcaatgcaagctataggaggtttggggcagatggtctcctaggcttaaaatggagagattttaaactacgaggatcctggaggtcttgtgacatgtaactctgaaacctcagtccaaggccaatttggtttaagtaatctcagtcaaatatttattttgtggccatgcattttgagagggacagagaacacaggtcattcaaaacatgccttcaatgagttgtactctgctgaggggcaagaaaaatgcacatgaaacaatgaaaagtaacagtgagggtttatgtcttaaactgttcatatgctacaaaatcctaaaatagtactttataattaggaggtgtataaggagtggagaagtcacagcctgtttcatagtagccaggatttgagagaagaaaccaggaggtcctccaggggaagtaaatgggacaaagtttaagacaagcaggacggagaatggctttttcatgggagcacgaatggtggttcaacccaagcggtgtttactgagcatctactatatgccaggcactgtgactgggggagggaagccttgcctttaaaggagctgagagcctaagaggaggcagttgatgatagagctgtagaacacagggctcctgacacagttcacaagctttgggaattacaatctggaatggtgatagccttggaaaccagtgaaacagggtggcgtcagattgcagagttaagctctgaccattctactagaaaagttgcagcacactcttggctcagggtggtccaggccactggaacaccagtccctaaggtttcagttctcagaatccaccagtgtgatagctcaaacaaaatagattcccatgctttgctttcagttggcactgaggcctggtggagaatgtgggctcaggtttaaagtgctttagccttgctagccagctgctgaaacctgagaaaataaagtggtactgttacagagggttggacctgtcctcttaggaaggttccaatcacagcgactgctggaagagaaaattttattttaagattaaatctaatgaaagccagtgtagtaagggaaacattattttataatttctgttaagagcaaacattctatatgatttttaaaaatagagcaataatgagtgttgcctgtttccaaacaagcgttgtttaaaagctgcctgtctgctttattatttttttcctgggcttttgcgagataatggtagtaaaatatcaatttactaaaaccattttttaaagtcttatacctctactctgtctccagttcatgcaagttcttcttttggcaggattaggttgaattttaatactaaactcttactgaagagttaagaagct

SEQ ID NO: 51037 - DNA, 1378 bp, Homo sapiens
gtggcacatatatttagttccagctactcaggaggctgaggtgagaggattgcttgagcccgcaagtttgaagctacagtgagccatgatcgcacccctgcactctggcctgggtgacagagcaagaaaagaaaaagaaagaagtgaaccatggccattgcacatgtttccagcatgtgttgctttcccacctgcttattacattgatgcgattctgtggaaaatacccattttcttttgtttgaggaatttagaggtatttatcaatgtgttgtccgaggaagcctggttagtttgagttacagagttggagtttgtttgagttgttacaaatttgacaaatgatcaacttaaaaggaatgttgtatttgaatgtcagaaattctcaaatgctattctagtgaaaaggcaacaacaacaaacaaaaatcatgctcaggtagaaagtcacttgttgaacaaataccagatcagagcctgttatgtcttagacactatgttaggcactcaggggcctattaggaagaaggcaggtacagtgtttcatggaaaggtcacagtggcttggattggagtggtggccctggaactgtagaacggtgttaagagtggagggataataagaagataagattgataggactggataatggattcaaaaacaaggtaaggaagaggaagtcagagttctggtgtgtaggaacagagggcttcagtcactgcaaggtcacaggaggagaagacaaagggaccatgagttctggtttggacatgttcagaggtgtgttgtacctttgagtcattcaagtgaaaatgccaggaaggccactggatatgtgactttgagaggggtggtaaaagccgatgatgtaaatttaggtatcatctgtgcttaactcatcatttattgacattgtggacatggatgagggagaaagtgtagaggaagaagaggcctagggacagaccttcagatactctttgatatttgatgttgaggtagaggaggataaaccagcaaaggaaacttagaatagccagagaggtgagggggaagccaggaactcttaggaacccaaagaaatagggtttgtccggaagcagatggcacttgacagtgtgcagtggtgctaggaagttcttctactagaggaaggcgattctgaagagtgccattgggtgctgtggatactggtgaccttaacaaaacagtattaatagtgatgacagggaaaatgctcctggagggagtagaatgcagagtggagaagatgatgaggacaagacctagtgagtatccacccccactggaaaaatctgcctgtaaaaccaggagagggccaggcacggtggctcacgcctgtaatcccagaactttg

SEQ ID NO: 51038 - DNA, 647 bp, Homo sapiens
tcaggtaactgaaactgtggaaagtgaaattgcaggtggggggactactgcaaatagagaaggatggtcctgggtctgccttctagcagtgtgactatctttttaggtgaaccagtacctgattcactgttgagcactggtttgccatgttggcagatgctttgcagataacacaatctttcattgcaagggaggaaagtccccataatgcaccactgacacatttttgagaaaattaataggtaggtaaagtatcctcttctacctggtcattaataacataaaatctgaactgtttttaaaatagaacatagtagttgggtggaggagtaagaagtatttgaatatcaggaagtgccactattatctgtgtttacaatgggaacatatcagcaaataaagcagtgagtaattctcccacttgtagctttgtcctaaagtcattgaaagcatgatttttgccaaccttaattacattctgcttcagtaaatgccagagtatgcttgaattcctctgtcgagatcaattacagggacgagcagtaaagagggtaaaaacgtagacaacttggctctatgtcagatccaggacttagagatcatgaagtttccttttctgataaccccacatcttagtcctttatgct

SEQ ID NO: 51039 - DNA, 632 bp, Homo sapiens
gctgggcacaatttcagtccctgggaagagacagacaataacaaataagttatatagtcatgtgctatgtaacattgtttgtgtcaatgatggatggcatatatgatggtggtcttataagattatattaccatatttttgctgtactctttctaagtttatatatctttacatacattaatacgtaatgttgtgttacagttgcctacagtattcagtatggtaacatgctgtacaggtttgtagcctaggagtcataggctataccatatagcttaggcatgtagcaggcgatgtcatctaggtttatttaagttcactctatgctgtttgtacaacaacagaattgcccaattatgcatttctcagaccatatcctcatcattaagtaatgcatgagtgactgtgtgtcagtgaaaaggtgacatttgcgcagagttgaaggttggtgagggattgagccatggtgtgtggggaaggggaaccagggccttgggggatctgggaagcattgcaggcagaaggaacagcaattgccaaggcctagagtgtagccaaggagcaagtgagctagagagtagagtggtgggtagtcagggctgtatccatgagccagaccgcatatgtatggc

SEQ ID NO: 51040 - DNA, 2408 bp, Homo sapiens
tttggtttttttagttaagaggagagactggaactgctcagtgtttcacaaagataactgtttgtatttgataagagtttcgttaaacaaaggaatttgcacttatcaaaacataaagcattgaaaacactgagcacatactctgtgaccagaatgcgtgtgacttgttgagataagccacaccgggtaatcagatgagtctcctttcttcttgggcaccctcatataattcaggcacaaacgaaagagaaaacgctttttctgatctctcagttcgggtcatctctgccttccatcatcaccgcctaacaatcctacacctggcagggtgggaaaacggtttaataatctcttccctttgggaggcgtttgacagctcagaaagcatggcctttactcaggctcagagacacacaaaaacctttcacgttttcctttcagcttcgcagccccgtccttctccacctgcacgggcacccactgaagcacaggacccttctgccaagccatgagccttctcaggcccctgccgcccgcctcgcctgaggctgcgcttctgaaaagcacgcggccctggcctgcgcaccacccagtctgaaggcgacgcccctgcacgaaggagtcaggcctaggggctcgggacccagggcgacactcaattttctaacaggagccacagcccagaagctgagaagccttccggccgatctgtggccctgaggtcgcccttggagggcgagtgagaaccccccaggcgttccggaggtggcccccagcccgaacccggcgcccgccccggcttcccgagtcaggtctttgccccgcctctcggccccgcggcctggccggcaagcagggctgcagtcacggggcggcgcggagggccccagcccagtcaggggtgtggccgccgccaccgtaaggctaggccgcgagcttagtcctgggagccgcctccgtcgccgccgtcagagccgccctatcaggtgtgtttgcagccgaactggcagtgcccgcgggcggctgggccgaggccttggctcctacccgcgggggtcgggcgggctgaggctggagcaggccaggggcgggggcagagggggacggacttccagcatcgctcattcgggggcgtgacgggaggacctggctggggagcggcgggttgggagcctgtggctgccccttcggtgacagtggagtcaccgagcctagaaatggggaagctgtgacgtgggggtggtggagggtgctgcgggacagcagcgagcacggccctcagccgtccttcccaacacggtttcacttcccctcagctccagggctcagccccaagccgcccccttcatcccccatctgcaaacaatcctggtccccctgagcctccaatatgccttatgcagttcttttggggttcctttcgcattttaccgtgtactttcgcttttgatgcgtctagtttctgctactggactctcctagaatcgaagttccatgagggcaaagtcccatctgacttaggactcagagctactcaataagtaattgaatgagtacctatgccgtagaactgagtgaattaacaaatgagtaagtgaataaatgagtgcatacgagatacagctgaatcaatcagtgcatgagtgaaaataaagatgtatgaagtggaagcagtggagacgcaggcttacaactcctgttttttgatagctttccaaaaagttgtgtgaatgtcgcacttttgcaaatggaggcattctgattgggaccacttaaaaagagttctatgctgttcaaatggtctctggaaacgccccctggtatttccatttttgttggacttggctatatgtgtttgcttaaaacaaaatatgcctaggttttttcttgcttgtgttttgttcacttctactttggacgtttaaagaatcattgtcactataatattatttcatgtatttcttaaagataagggtgactctgaaggcagaaccatatgactctgacttgtttgtaaaaccaggcttttcttttgaattcagagttgttaagaatcttgtctgttttcctgagacaggtgctggctgatttgcaggtgactgaagaaggctacataaggcccagaaagacgcttatctgtttgtaaacaaataggcttagcacatagctttaatacagttggtcactgcagccgttcttacttgccaggtccaggttccagaagagctggatgaccttggacttgccacttgatctctttaggttttaatttcttaatctccaaaatgaagatgtttagctaggaaccctgcctgagttaaacctctgggattcttttgtatcagggttagaaggtgaaattacagatgatttcatggagttctgcttacttcacctcccatagcatt

SEQ ID NO: 51041 - DNA, 367 bp, Homo sapiens
atacatacatatttaaatatttttgcatgctacatttaacaaacacaaagttccaaatgtgttaagtaaaatgaaattaatgttacctacttcagtgaattcaagtttataaggagaagtggaatacacatgttgcttggtgaaaagggccaactttctcacactgttttcccaatgaggtcatgtgtcatacaggcatggaatgttacaaagctgatatttatggggcactgaccatacaccaggcactgttatatttaacctttttacttatattgccccatttaatcatcactatatatctaagagctagatactatggtaagtcctatttgatcttcttaactagaaacagtacatggaaaat

SEQ ID NO: 51042 - DNA, 1119 bp, Homo sapiens
tgaacctcagttctcttatatcttaattagagatgatacctatctcacaggttgtaatgaagactaaagttggatatatgctagtgtactgtcagtagagattagttccttcagtagttcaggctttcctccaggctactgcaagctttcaggtctgtcctgggatgggactgatggtttggtttaatctgggaacttcagttaccttcatattatactcatatggtagggtgtacacagattccctttactcatgaggggtctaaaattcctgattgacttgcagcatcataggaataaatggaggtgggatgggggtggagtttgttcactgctgaatgctaagggagaagccaggagcttccatgaaatgactcaggaaatgctctataattcagataaactgttaatcaatggggagggaaccaggcaaagtccattttaaaatgaaaaaggtattaagatccataataggcatagtggaagggctgggggtgttgaggtgggaaggagttctctatggaccagaggagcaggttcatgactgagggaggagttattgattttttttgtaaacaatagatttttaagcaggaatgaagaaacatgaacatattcttccctatttttttgttccaatatggttaaacaaaactcccagataatatagaaaccttgcttattccccttatgaatattttaccagtattgctaagaagtgaaattgattgatattaatttaacttcctcctcttcccacccagacattagtaaatagtgaaatggttgtaagtgttcagggagatgacaaaagagaagtctgaggcttgaggaattacgaagtcagatgatctgtaattgaataatattgagtagaatacacaaatcaaaagtggtgtaaaatctattacaggaaaaactcatttgagtctggccctgtcacagtcattgaactagtgattcaagtctgaacatggccagcagtggtatttcctgtttatctttcacaaagctggcaacaatttccacattatgttctctgcacatctccaacctctacggaatgaaaaatgcattttagtttcctcagcattcacaatgtagaaccttccagagaag

SEQ ID NO: 51043 - DNA, 4709 bp, Homo sapiens
taaaataatattttatggcaactctggatgctgacttgtcttcctccctttcccccatccatttacctggtcattcatttgtttaatcgcttgactgtactaactctgtgatgtctatttctcctacactgttcagcttctgatgttcctgtttagattgtttttctgttttattttttgtttttcttttggctgggttccctatgagtcacccgtaggtctgcataagccacttattggtcaaaggttatgcttaggttcctttagacagttatatttttactctttgccatttgatgtttttatggcttggagtctgttattacaacttaagaagtttgttttttcccccaactttggccaaggccaaatgccttggaagttccttttctaatcacttctgagagggtgcggccttgagcatgcacacagccttccagattaccagaatgcaaataattttatttttaagcgtggcttaatagtattttctccagggtcagaatagcttattttttagccagtgtttgctcagaggttgtccttaaacaccttgagtgagtgagatttctgccctttgttgacggatctgtgtgcagcttgggaaatgttttcaagtctgacccatgtgttgttttgattgttcctgagtaggtatgacctaggacatgtgtgtagcttttcaacccccagggtttactgggatcccaggaaggcccttcttggttgtttctttccttggttctttctgttaaagctatggttgttctgccattttgcttgttgctagcagtatcgtgaagctaccagcacccccttaattgttcttcaccaagctctccattattttcagcaacacccttaagtagggaattctccgttctctgcactaaatgaagtcactaacatcaataagaactatggagctcttcatccttatggcttctctcttcccccaggagaacattcgtgctactgcaagggagctagatgcagtgatagtggcacctcccagtgtcacccagaatgatatccctagtggatgataagaagggaggaggtagttctcagccttgttggcttgcagcttccagtatgggaccacctcctatgagtgagctgagaaaggggtgatcagagtcttagtattcttgatggctacttagggtagagtttccaccctatgagtaggacttgggtagaggaatggcacctcagttctcttggcattgcttgactagaacagaggttctaccacaaggtaatggggttggggaatgagaaacactggtagtctgtccttccaaaggtgaaactgtagccctaaactgagaattgggtggagagaaagctcttacgttcttgtctgcacttggtcagaatacggtacctgtagtagagtttctgtaacatggggctgggggtgggagaggaaagcagatcatgacccagatgccacagactcttactgttctcatcaagacttggtaaattttcttggatgaatgttgtcctttgctgtatgcccttaggggagttttgagagacattaaattattttttaaataatttttcccactaaatattttgtggggtgaagatctgctgagttactcatgctgccatgctggaagaatcactgggatagccagttttgatctctctaaggctgcatgaataggtggtagaattctccaaggtattagggagctccttagcttgggttctatagtgttagtcagttttcttcagttgccttctgttaaatgctaatctatgttagacaccaacttaaatcctcctttttaagctctctcaattgtccagttatctgaaaaggattagcactttttttcccagatgagagaaccagactccaagaggttatgtaatttaccaagggttgcacaactggtaagaggccttgtttgggcatgaacaactgtcaaactccagagtttgtgcttttagtcattagactatattgcctcacatacaaatattttaatgttgtttcatttataagattactatttttagccatctagctgaagcagatctgtttcaaaagccgttgatacctgtactgtgacagcagaatatattggtttttgtgtgtttttttaaagaaagttttcttattcccatttctttctcattgtcatttctgattctacaactgggcctcctctttcctggctacctgcctggtattgaaaactaagccaagttactgattgctcctgagaccttcaaaacccagaggatatgaattttactcaccggaatctattctgttttccaagactcactttcaccccactcctcgttccatggggctcaaagtagataaacagttgtctggcaactggactattttaagctctgaagagactggagagttaggctggaccaggtgtggaaaagtcccacaggagacagtgtaaagttggcgtaacaggatctctaatccaggcagagtggtgcagagcttatcttctagcctctctctcaggaaacctgtcttctcactttggcttaccactaactagttgtgtgaccttggttgccatttaatcatcatggccttgatttcgtgacctgtgaaatgagagatggttggaatgttgaatctgtaaggtctcctctagattggaaagggtaatttttatgagactccataagggatcactgaagctagaatttacaggagctggattctgccaactatatgtgatggagtagattctttgtttaaccagattttttaactttttaattctagacttgaatattacagtatgtatgttagtttatgcactcttctcaacttcagtattacagtaggtatgttagtttattcacatggcaggattgagagctctgcaagttatctgtggagagtttgaagaaggcagatatacaagcaggccaagtccgaagagatgaaggacaaacttacaagacaggagaaagcacaatctccaatcagtcctgagataacatagcatacatcagatttgaatggaccaagtaaaagaatgagaatcaacagtcacatctgggacaggctgacatatgttcaagaaagaggaacttgggcagactatgcggttctttcccagcagacataactctgggtcttcatggtttatggtctctgagcccaacacagcaggtcattgagtatttattaatcctcattggagactgacatctctaccgaaatacagggctttcttaaaattttaggattgtatgtttttattatgtttggtgtatgttttattatgtttgtatgccatattatgttatgttttattgtatgttttatattagttagggggctcctggcggcctggactgagtcttatccatttctatattctcaacatctagcatcatactcagtaaatagttactcatttagtttactcatttatttgagaaacagtggatttttaaggtagttctttccttggggtattattcacttgtactaaaataaggccttcttctacattgtattagtctgttctcatgctgctatgaagtaatactaagacaggataatttatagacgaaagaggtttaattgaatcacagttccacatggctggggaggcctcaggaaagttacaatcatggcggaagacactccttcacagggcggaaggagagaatgagtggcaagcgaaggggaaagatggttatacaaccatcagatcttgtgagaattcactcactatcacaagaacagcatgggggttactgccccccatgattcagttacatcccactgagtccctcaataagatttgggtgggacacagccaagccatatacataatgaatgatgatactgttgagccatcatcatttactcagaatttccctgattataaaattaatacttgcttattatagaaagcatgtacataaatataaaaataataaaaatcacctgtattggtccattttcacgctgcttataaagacatacccaagactgggcaatttacaaaagaaagaggtttattagacttacagttccacgtggcttgagaggcctcacaatcgtggcagaaagtgaaaggcatatctcacatggtggcagacaagagaagagagcttgtgcagggaactcccctttttaaaaccatgagatcttgtgagacttattcactatcatgagaacagcatgggaaggacctgcccccatgattcaattacctcccactgggtccttcccacaacatgtggaaattcaagatcagagttgggttgggacatagtcaaactatatcattctgacttggcccctccaaaatctatgtcctcacatttcaaaaccaatcatgctttcccaacagtttgccaaaatcttaactcatttcagcattaactcaaaagtccacagtccaaagtctcatccgagacaaggcaagtcctgtccacttataagcctgcaaaatcaaaagcaagctagttacttcctagatacaatgggggtacaggcattgggtaaatacagccattccttgtgggagaaattggccaaaacaaaggggctacaggtcccatgcaagtccaaaatccagcagggcagccaaatcttaaagcttcaaaatgatctcctttaactccatgtctcacatctaggtcatgccaatgcaaaatgtgggttgccacggtcttgggcagctcca

SEQ ID NO: 51044 - DNA, 1609 bp, Homo sapiens
tgagtgcctgttcatgctgctgcaaaaacaatgggaaaagtttggattttaaggcaatccaatttctaaggaccagaagcagtctatgcttatggctgcttattgctagttgggttcttataaacctggagtgtcctacatttcatgttgaattgaacataatgggcctgtgataggcacctctccacaaaataacaaaagtctctgtataaactcaatattttagaagtcaaagtagacaggatactttgcttgtggcttgtcctcaggtatcagtacagcaagtggctctcagcacaccaccaaacagggcaggcagctggctctctagagataattataatttattgtgcccatggattttgatgcagtggggtctgggctctctcacaaggccaacagagcaggtctaatttgagccagatctcaggagacacagtccggagaggatgggtcatgtgccttcagttatcacttggagttgcactttgccccttgttcctctttctctcaactagtagctgagttttaatttttttccctgaaaatttattcagagagactgttttccttttcttcctggaattcacagaatgaagatggaggtccataaataccttggttaaaagttggaagatcatagagtgtcccactgtctgttttggggcctggcaggaatactcctaatcactgtaaatgaataggtgtttcatctatttttgtcttctcttctttgttctctacctgaaaatgtccttccctcattttcaggctactgaaatcttctaaagccttcttaaagtttcttctttataggaaacttcctagatttcttcctttagtcagaattaatgctgatttatgttctctcatgaaattgtactttgtactttcatttagtgctgtgactgttctttttaaagttattgtttacttatttttttctcctccagattatacaatccttaaggatagtactggaatttcctcatcttcctattgtccacattgcccagcgtgaaattttggcccagtaggaaggctatacatttgttgaattaattttgatctgtaaggcatattcttccacgaaaaggacattgcacaatcacaatattctccataaacaaatggacactcagaaagaactgttgtgttcttttatctgccttccatgaatgtgcagtttccttaccacttctccatggacctagttatcttgcatagtgcacacattagaagattatgtgataagagtagaaagctaggtttcctttgggtagggctagactatttcctgttcagaggtgaagacttctgaaatcagaatcaattttctaaaacataccacattaaaataagaccatagacacgtttttctgtctataagtctttttattttgatggtagaaaatgttgtaagattatttcattatcttcttattgttaactgttttggggaagaatcaaatcaggagagactgagattggagtctttttatcaaattctctatagactacatgatccgtgccaataccacagcagtcagcagctgttgtctgtgctaggagaccacagtagtaattacacacaggttaagtggcttaa

SEQ ID NO: 51045 - DNA, 854 bp, Homo sapiens
ctggcagctctgtgaaggtaaaaaggagccaggctggaggctggcacaccggtggtatgggagggccagggagtagagacctgtaatagttcaaaagagaggtaatgagggcctgctgtgagagtgtaagggggttgaacagagttcatgatttcaattggtattgatttctaaggagtaaaattatcagtattgggggattgattacatatgggggataaaggagacagaggaatcagagatgactgtgagttttcagaaaaacagattaatttaaactcttcttccaagttcacagtgataggttttgacctgtagctgctactagtgatttgcattggcaactgtggtgtctagattaggttttggcactttaggactccactctcttgtttgttaaaaacaaaacaaaacaaaacaaaaaaaaacttgaatggaagcatagaccataatgaagtaccaccctcgtgtgactttaatttcacagtggcctatgaaaatttatagaaatttggcttcatttctagtggctccaatccggatgccaaaattgccctattgttgcgacatcccttgagtggactatcgaacctgttattcattaggagcagctgcaaaccatcagccaagttcccatactatgccaacaataacgccagtcaaatttcaaggtaactccaggtttcagaaatgtatgaatctcaaaatctgtctagccaaactcttatttgtatttttatgtatgcatattatatgaaaaaagctggtggtttccttagtttccataattatacattgcttcttttagactataaattgagttctcagtgttggtgaaggcatacctatagatc

SEQ ID NO: 51046 - DNA, 469 bp, Homo sapiens
cccactgccacacatacattttttcctagttattttctccattgccccagatagttgaacagggactgcgacttttaatcagctaaggaagcaaaagactttctcttcactttactgtgaaaattgcatcaccacactgggtatgaactcattgaggtgggaatgagttgttgatagggcttggctttggaaatactactggctgatgttttatatcacttggcctttgtgtactgtattgacagagtatagtgaagaggaggaggaagaggagcaatttagtttgaagatgactaagagctgattaaacattcagctggggagagagatgagtgaatccaggtgatgtttatggagtgtcagagagggagaatgctataccatctggtgagagagacatgaaaaagtacataaatcaatctctataatgatacttaattaatacagagttgataaatgacataattga

SEQ ID NO: 51047 - DNA, 662 bp, Homo sapiens
atacatagatgcatttgctctttgagctctacaatcacaggaattctgataaattctattttgcatgacttccttaaaaatataaaattagaggttgtgttcgcaatagcatactctgaattactgaacctattcttgataggagagaacttccattttaagtaggaattaatgaggattggatacctcgactgcagttctgcatatctgataactggaagcattttccagtgactggcttctggatctccaccactgtctccatgctttcactgccagatgttgcaggatgcattcttgttacaatatgacctctgaccctgtgtctttgtattatgacactagtagtcccgggacacattcctgtaccaagatggaaacaactgtgaatcacctaagcacatccctgtaaacccaagccaatatatctccaggtcagcttctcctagctggatcctcaatgcctatagtcaatccagtgctgctccatatgttgggaagtatgacagaaaggaagtcagagtggattaaaagattccacacctttggtgtgcatggattggtgcagcccttctagtgagacatccccagatgttagctgataacatcctcaccctcatcctccccaccatcacttctctatgttttactggcctgatcca

SEQ ID NO: 51048 - DNA, 1871 bp, Homo sapiens
atgaaatcactcctccacttgcccttgcctgttactgaatcctgttccagctgggatggaaaaagtgcattggtcatgctgtcaaaagcatatcacatttctccactgctatttccttccttcttaactaaaaacaaaacaaaacaccatagacaacaaatagacacacacacaaaaaaaaagacactaggtgagagtgaaggtagtttgtactattttcatttttcgtgtgttcaatcgtatttctctcagcaaatatgattggaagtggtgcttttccttccttccccaccttccagcattaggtttgtaggtgaacataaaaatacactgacactcaaagaaagagctctttctgctctgcacacatcccatctcgccctcttccttgctcctgcttatttctctctctttctgcctccttacctccttcagtttagagcttagagaagtttttcactcttcttttgacaggtgtcagatagacagtatgagctcatttaagctgaactgtctgggggaaactaaatttgttcaggagaatagcaatttggatgacaagtgccaggacataccagatggcacggctggagaaattcttatcgggctcccagctcacgttccaggcggcctctctgtctctctcctctattcttatttgttcatggttgacccagatggaaacttgaaatgcaaatgtatttcttcttggaagtttccaagtaaaaaaggtgatagtgactcagcataagatgcttacatgcccccaaaagaatagccagtacttgttatttatgcttattactactgatgcttcccagacccctgtgggcacatatttgaagaagtcttaattgtgagccctaaactgattgtgtaattccagttgtttactaaaataggactgttacctaagctgcaaaatatttgatgttcttgtcaggatgtgaatggaagtgttcttaaacattcttcctcagttgccacacagtttgactgattttgttggccctcactttccagaaagggaaccgtggacataaatgtcatgggaaggtatttagtagaaggtgtgatttttgggggcgcatatgaaacattctaaaattcaaggccagggcgctgtgacaggctctaatctatgaatcattatattcttaacatattctgagaacaggaagagaaagctcaacctttatagacacagatggaatttctcctgtgaagactggtaattcatgtgacatttgctgtttgcttttgtttgcagtcaaattctttctctcaaccttgcactgtgctgttactggtcacttaacagaccttctgaaagagcaatataagtttatattttaggtacacaaacaaagcagatgtttataatactgggcatgattttttttttttttggtcaatatttggttcacatgagaagatcaactttttctagcctgtatactttggctctgaatttacgtgttttgaaaggtttgttgttgttgataatttagtgatgaaacttactcgtggaaaaggcttattgtgagtgaataaataaatagtataggctaaagtgtgtgtagcctacattatttggtagtgtagtgtacactccacatacttttatcattttaattttctactaaattatgcatgtcctggtattaggattcccatagtcatggcaaaaccaatgatggtaacgccatacttatctggaggttaaagtttcattaacaatttaaggtggaaatcagagaagaaggcctctgagccagcctaatagctattctaaccccacacagcaaggtagtatattgtattgctgctcttctcaccaagagcttctgggcctttagcacattattttt

SEQ ID NO: 51049 - DNA, 604 bp, Homo sapiens
ggggttatcgttcctttcttatgagctatctagtatctgccttctctgaggtaaaaataagccaaaaatttggtcctgatataaatgaggggactgcatgagagagagacagacagggagagagagaccttgtgtttagcagcagataggcagacttgtgatttgtgggcgaaacatgtttatcagatgcttgtctctttgcctcttaatcaggttcttcttcccatggcatgctaagcaggcaaacacagttaagcagtttacctctgtactcaacagttccagaactgaaagtaaacagccttgtgtgtttaggctgcagccaccgggctgtgctctgtagagctgccagatttctccacatcactgattctcccagtgaaaagcaaaggcttcctcttcattgtgttcacagactgaaagttgcttgcaggattggcttccgaagttcagaccctgatgaaggaaaatgatactccgagtctgagggtggcaaatcagaagaaataatttgtttggattcgggtctgattttaatttcaggagtctggggcctgaaagctttctgctgagtctgaacacaaaccccaaacttctcaactca

SEQ ID NO: 51050 - DNA, 1455 bp, Homo sapiens
ataccttgtgttatgatcatgaaaaaaagtttttaatgtatacatttaactacggtctttgtatttctgaattaaaagtgaggacttgtggcctgacagaagtgactttcaggagacccagcagtggagaggttgagagcactgcttaggaggtagaagcaattcctctgggttggaattctggctgcaccacttaactagctaggtaaccgtgggaaagttagtcaacctgactaaacctcagttacttcatctgtcagatgagaaatataagagcacttaaagaatgatcatgcacactcatgggatgagctgtaagacgttacacatagtgtctggctcgtaggaaacatcacagaaatgctgcctagcatcgttgtaatcagctaacagaagggcttatattgagaccatccttgaaaatctgagaagtgttgatgctcagtgccaagaacagtaacaacagtaatgctactgtttaccaagtgctagttatgccctagcctttacaatgtactgtttttgacaattccatgagctgggtaccattatcatccccattacagctaaagattggttgatgtgagggtcaaacccagtctggatcattcagaagcccacactcttgatctctctgctaaaatggctgccacatatatagcctagggcacctttgaaaccttctttatttacactattctctatgttcctgtcaacatcctgtgacattgcacaatggcattcacaaactgtgaagtcccctgtccctaggacatctgttcatttgtagttaaagaggaccaggaaacacttaatgaacacattattagaagccctggttttcaattcatgcaaccatttttgctttggtttaaaggccttttctttaaaggtgcttgaagcttcatatggacaggctcattattcaagcttttgtcccaacctacagatgcagaagccaaggaccaaagtaacatgacttggggacagagggagaggccattcacctgccttggtagcccagtgtatcagttgctgaatcaggaatacaacagactgagcccagggcagtgtccaactcatcaggctgctcattaatgttgggtctaacagccaaactgctaactagctccactttttaaaaacttctattttaagttcaggggtacatgtgcaggtttgttacatagggaaacttgcctcctgagagtttgttgtacagattattttctctcccaggtgttaagcctagtacccattagttatttttcctgatcttctccctccttccaccatccaccctctggtaggttccagtgtgtgttgttcctctctatctgtccatgtgttctcaccatttaactcccacttataagtgagaacatgtggtatttggttttccatttctgacttagtttgctaaggataatggcctccagctccatccatgtccct

SEQ ID NO: 51051 - DNA, 2598 bp, Homo sapiens
tctgtaaattgctttgggcagtatgaccattttaatgatattgattcttcctatcatgtagctccaattttaacctacacagtacatgactagaagcactttgcctgattttcttgttggaagaatgggatctgcctgcaatatggaaaccctcacaaacaagatgactcaattctgttttcatttgcaagatatattgtgaatgttcttttctcctttttgcaggagagggaaagggtttagggttgtgggtgtggcagggcatagaagggaagaggcttaggactgccaaattacatgtcaacctgctgacttagcatcagtgtactagttaaatgagccctgaatgtaagacattaatgcaaatattttgcatattattaactctaatgatgctaccataatgcagtatcctcagctgaaagctgaggtggcattttttattataaatgccctgggtctttcactgaaaatcaccatgaagacaagtcccttagaagtgagagcagaaatatgaacagagttctgcatcgttaaccttctcatcattaacaataacaaaaaatattggtgtcccagggccctgcattcagtaaatgccggcaacatctttctttagaaactatcactgctcttgcccttataactacaatatacttccaaagcaaaaggttaggcaatcattgtaaaatggaatctgttttagaaaaaaatactatgcaatccccaaattgttatgtaggtggaaaatcattctaaatgcagaacaagtattgcttaccctccagtgccatgctagtgatggtagtgtggagtcttggaaagcagagggtttcagagccagcgctaccatttgccagctgtatgacattgagcaaatcgcttgacctccctgattgtcagatcctttcctataaaacagcaacattaataatactgctttgtctattttatgagttgccaaagaacaccaaaggagattgcaaatgtgaaagctctctggacgcaatgtacaaatgttattattgattttttactaggtgagtaatgaggaatgagtagcagtgtttgtccaaggatagcttgggaataagtcaaccaaggtggcagttggtaggtcttgaagatgtggttggctcctgggaaacagatgagctggccagtttgaaggatcttaaagttgcaagttttcgggctgggtagcaatttaactgtgcaacctgtcaagagcctattatattctaaatttgtgccgtgacaatattggctacatgaaataactgtgtgctttcttaccagactttatttggaaagagtttatgaactagtggcctggcagcgttgcctggaattaacagtgctgtggttttacaccagggagagaagtgtttcatgccttgttctattacctccctccctggagattcaacagatggaacaacaacaaaatcagaaccccaagacaaacctgtcagcttgatgcctttaagcttcggcagaactcacaattaagataagatagaatatccatttagaggaaagaggtgcaaagaaataagttcacagagcataccttcttttgtctgagcatggctaatactatctggagatccctgccacataggaggaattgtatactggaacacagtgaacacttaagaaaattagttgaaagaatattattgctagtagaaataactgaacatctttaatatggggctttatatttcccttcattatatttttttaatcctttcaagccaactcttgagtttggcaaatcctaggctgagtaattgtgcatctcagaatggttagataatatgcagagcagaccttaagtcaggcacagcaacatgtgttttggcacagccgtaaggaggtaaagtatttggtaattgttgtttgatagttcccaaggagaaagcactgaagcaacagataagaaccaaacaattttctcttgtgtttaggtaaatatttccaactacagtctggtgatggagtctgacgcaggaaccttcttacccactgggctgcaattcactggcagtgaaaaggccagggccatcatggaggaggttatgagcctgctgcagcccctcaatatcactcaggtcctgagccatggagaagggacagacatcaacttttggatccaagctggagtgcctggtaagaccaaaagatgaagttgtgttccttatatattgccaacaatttaaaataaaatttctgttttaatagagcacaatgaatactagtaggccaggttgtccacggaaaccttaagcttttgttcaaggtataatctgatgatttctaaaactgggataatagtcctcaccttgtatttgtttacccatctgtatccctccactctttctaaattataagctcctcactcccagagattctgatttagtcattctggaattgggcctaaaaatccattgttttgttttgttttttaaggaggtatctttggtgattatagcacaaatgatctcataaccaaaatttgagaaatagagtagaaggcaaatattactactaatatccttctagttctagtcctgtgctagaaaaacttccttg

SEQ ID NO: 51052 - DNA, 1674 bp, Homo sapiens
gatctaggcagtgttttcccaggtatactaatgttaacagttgcagaagcaaaaggataacactgaggttacttcacacgaatggatgtttgatggattctgagagttccctggagtagggagacctgggtgagttccagggccctgatgctgatgctctggcattgtgcaacttaaatgactcagttttctagtgtgtgagtggagataatcatctttccctcctacccacataattccaatgctctgacaaatgtcgaggcactacctgtaaaaataatctaatttctacatgatggtgtagttatataagtaaaagttttccagaacaaaataccaattgaaaacctagcattttttaatgttttataatttccccccattttagatgatagcttgtaaaactacttcctcacagactttccccataactttctactttacctttaacctgtgctaattcatttctataaagacattgagataccagattacatgtcatgtttctaaaccactctctaactggtgtccttggaaatttcacatttcccacactcagaacctaggagatcaaccatatttgactcaccgaaaataataaccagtctgggatatggtatgggaaaaaaattaggttaaaccacaaaactcttcccaataatgagtcagtgtgtgagtgcctctgtgtaagacctcatttaagagcagcaggagctgagtgggggacagttctcaagcggttctttggaattagcatttttgcaaggaagctttcttacccaccccaactagagaaacctctcattgttttacccacctcatcctctccaaacattatgatgcaacttcacatcataacaggatgctgcaagagtccatgcccctttaacttctgctttgtctaagaccaagaacacatctatggctggacaaattgggtttatcattcattgcagtgagggagaactcatgtcatggggacccacgatgcatctcaataaaagggtgttagaagggcttggaggaggattgagattttgtgtagaggagagtttggtaagagtccaagaaagtggcgttcgctctagactgggcgctgttgggaagtggggaccatcctatgactgtgtatcttaataaactgtgtctacagggacagaagcccagaaggagactaaagctttaattagtaaagatgcagccatcacttatatttctcagaagaggggatgtctgatattttgtggtttgccagtgactttgttttttctgggcttaaatgaaattatgaactggctagttttgactgacttcagtacagtcacagagtgaccttgtctgttgctggcgttccatgagattagttatttgttcatgaggagaacagatggcatggtttctttaacagcactgatacctacttgtaattgtcaggccagttcccagatgtcagaggctacttcttttttagatcagatacctttgtagcataaaatcagttttagggcagtatgatttttcatggtgaacattttaggttctctttgtaggtgctggtttttaaattaatctttagttttgccattgtccatttatgatcagttgatctgatttcaaaatgcaaatccctagcatttaggaacttatacattgggaacatttagggatttagga

SEQ ID NO: 51053 - DNA, 1160 bp, Homo sapiens
ggtcttgtcagacaccagcagagttttgtgtggctgcaatagagatgttattgccagttgtcagtattgaaatgaggcactccttcatccttcagtgaaatctgtgcaggcattttcctttctctggttaaacattttatagtctcctttaaaaacaatgccctcatttcatttcctctctctggctggactcttctcctccctcctgctttcctaaaatccatcttgtttccctgtattgtttgctgaatgggcagtttaatgaatacagcatttccattttgaaatgtacagagcacaaggcagaaactgaatttcctcctggacagtttccatccacagtcctcatttccagttttctcccttcttttcttttctacaacacaactgaaatttgctgaaccagaaaggggaggaaggaggtgtgacaggagaggcaatatgccttctcattgtttcagcaaaagcttattagcatcctgctccctagaagagaccaagtgccctaaagatgccctgggtgcctcttctattgcacaaagctcaaggtccagagtatacagtgcatgacagaatctaattaccaagataattactgttacctgcactacctaactgttgtgttttgtaatcaaaagctatattggcaggggtgagtgtgagcctgctgaaaactcagggaaactgttgaaggtttatcaacccgaagcaattttactctagttagtgggcctgtgttgctcagttagcagaatgtttggggatcagaagaataccccagagcacttcagccattgcatagacattagttaccgggtaggaatatcctcagctgactcaggtattcatgttgttgaaaccagacttcatggcaatttgaaaacgtctgtgccatttttaaatttgttctcgaaatagttgatcagtacctgacttagccttcatttggcattcggtgaaggagaaattgatttcctttgggcatggctgtatgtacctgatgggtacagcgtgtgctaagctggatgtaggtatgtattcatactatcaccacctgcttcatattcattatggcacaaggttacaaattggctttctgtttcccatctcagccagctctagttaatttatgtctttacctctgtgcttcacacactaaa

SEQ ID NO: 51054 - DNA, 971 bp, Homo sapiens
aagccagttggaatttgaaaattagagagtcaaaaagataaagtgaatcaaaaatcatttatttagtattgaggtaccttttggtacatcaaagagatcatttataaaatagtataatgtaaggaagttgaaagaatgaactacagtggaatactattattatatctacttatgcctttttttctggaaaatgttcacaatgatgtgaaaggatctaagaccagcctggcagccaccagatggtgattctagtcctggctcagtcagtaataggtcactgaccccagagaaatcaattcagcctccccaggtccttggatttctttctgtgaaaatgaaagcataggtaggaatttcccatggaacagctagcagaggagaaatattaaaagtcaggagactcatgctatagttttcatacttcattacaacaatgttgtttaggacaagtgagttaacctgttagcttcctctatataaaatggaaagtcattaaaaacctacatagcagggttcttgtgaagatcaagtgataatgtaggaagcatgtacaaatgtcacattctgccgtcacgtaatggtcctcacagcttgaggtagcatttagcatgtgtcatgatttagtacaagggttggcaaactgttgctcttggattaagtctggctcattgcctgtttttcaaagaaaaaaattgtatatgtgtgtatatatgttatatataggtacacacacatatgtgctatatatagcatatatacacacataatatataaacatgtacatatatagcattatatatatacgtgtataatatctccagtcctcatgaccagccatgcttgttcatttacatttgcatactctatgattgctttcatgcaacaatggcagagttgagtgattgttttgcaacagagactgtatggcccactaaacctaaaatatttagtctctgaccctgaaatgtaag

SEQ ID NO: 51055 - DNA, 495 bp, Homo sapiens
atcagacaagttactaaaatctattttccatctgttaaagacacatgaagatctctccctcatagggccaattcaatgaaatcatctccagaaagccctcagtacacagaaagcactcaacaagcagtgactattattcttgtaattcccctatttggggagtctgtagcatcatcttcatgtagtactgattaactagtcttagttattgctgccacacagttttaccaccttacagagatgactcattatcacacagttcagatactgtgggacctgcaagtccaccagaggtgttggtgttgacctaaactatttggtcaaaattatgcccatagccaagccaaggtttccaaagagatagaaggtacatgggcttagtggcgcacctaaaactttttagcccaagtttggagattcttgggtagcttgagagttagaaactaaaagtagaatacttttaatggatttgtgattgaggattttttttgtttt

SEQ ID NO: 51056 - DNA, 1261 bp, Homo sapiens
tgcctttcaccttctgctgtgattatgaggcctccccagccatgtggaactgtgagtctattaaacctccttttccttatacattacccagtttcaggtatgtctttatcagcagcctgaaaacagactaatacacctccccacagctgacttagtgctctgccagtgggttacagttttccagaaggagctgcagtcaaggactcaggccgcctagggcagccacccattcctcacccaaacacctccattcaaggcctccttatcttatgaccaagatactttcatccactctgacccagtacttttctagtcctagacttcccctactcccttctgtcagtcccctggaccataaaatgtcaggagtcatttgttcagggctctttggtagtgagatgattttccctgtctgagctgattcatctgacccttgcctactgccattccctggggaaaaaatggaatgttaggaagctggtgcttatttttgcctcttgtttacactatttctgtaagtgattaaggcttgattgttaactttcagtttggcttattgttctgactgaccacctaatcctggccactggacagaaattaagagcaaagaaagtgataaccgttttaaacaaacatagaataaataaaaaccacaataataaggtggtatttgaaaagaaaacaagatggaaagaatatatttcactggaatagcatgtgaataagacgtgaagttactggaattagtgttctaaggtccttttgaaactgcctttgcaaaattataacagtaagaaaaatctgacctagttgactccatcttacttctaaccccaagctgtccttggtcattcctggacataggccaagataactttgagaggaatttagtttacagtttaacttagaagcaagaatgataatagtccctccctgaaactaaccctctccctgttcaatggctgaaactgcctttgtaagactaatgaaaggccacaagattaggattatgggagaggcccaagttctgctaaaatgtaggcatagtttctataatttcttactgctcaggagtcatgtggccagaggtcccaagatttataacttccccaattgcttctataggtatcactgttgtagaacctaagactggggagtttttttttttttagatgtttttcagactgatcccatctggactcatgactcagctggtcctgtggctctgcccacaggtggcctcactgcacaaggacagtct

SEQ ID NO: 51057 - DNA, 1222 bp, Homo sapiens
aagagtgcttcctactgcaagacgacttctttatccttctgaagatttaatgctgccacttgtgaagtgtagggaataagcatcatgcacaagctttcactcacagtagtgataaattaaacatcctcagaaagtcattatagaccccctttagttgcctctgactcccaatcacaggaaatggctgggttctctttctctctggaatgtgtttggaaggtgtttggcatgctgggagggctactcgatcagatggcacctgccaaactaacatagataaaaacctccacaaagtagatctctgagaagcgcctccatgacatattagtgatttcacaaacacattcgaatgctcagataaatcttttgatgtccctgatctttgcacctccagatggtggttgaacaaacagaaatcggtcttctttgaaacccttcaaagcagtgaaattgcctaaatcagtctgttgactattctttgacttccaaaggtcaggaaggctttctgtttgttcatctttccaaagacacgttcacattctcttctaggtacctctgttctgggaaatttaaatccataactgatctgtttgatatacaactttaaattccacatgaagacttggctagtttttctaaagaccaaacatgattattttcaaaacagttgtacaaatattctattaagaaatggtaaactgaacttatcagcatggaggtaaataattaagaggagaaactgattgttttaccaacatatttaaagctcatgaaatcacaaatgtgtcattgtcatttactagaatattctgtgtaaaatccaatgtgctgaggttattatgttaccatctatgtgaactgggcctggcaggaagaagactatgtggtttgtgtttgtttttctttctttttttttttttttgagacggagtctcgctctgtcgcccaggctggagtgcagtggcacaatctcggctcactgcaatctccgcctcccgggttcacgccattctcctacctcagcctcccaagtagctgggaccacaggcgcctgccaccaggcccggctaatttttttttttttttttttttttttgcatttttagtagagacggggtttcaccatgttagccaggatggtctcaatctgctgacctcgtgatctgcccgccccggcctcccaaagtgctgggattacaggcatgagccaccgtgcccggcc

SEQ ID NO: 51058 - DNA, 393 bp, Homo sapiens
gcggacgcagcggcttccaggccaccccaccccgcgccagcctgcacctgtgccgcctgggtgtcttccccgagactctggtactgtgaagggtccgggtcgcgcggggcgtcgtccggagcagggcggactcgggctttggcgcggcctttgccccggtttttggcgcgggaggactttcgaccccgacttcggccgctcatggtggcggcggaggcagcttcaaagacacgctgtgaccctgcggctcctgacgccagctctcggtcgggaccgagcgggtctctccacggcaaccgccgacgtcacgaacgtacaactgtaccgtcgcgagaggacgtgatgcgcccggtgattggcgccgccgctgcggctgcgcaggagacgaccccc

SEQ ID NO: 51059 - DNA, 933 bp, Homo sapiens
atgtacatattcaaaccatgaatttaattagtttttccatgtgtgcataccttgccctgatttaattttcttcttagcatttatttctaccgatttatttgtttgtttgtttataacctgtcttttccattagaatatgtttcattagaatgtaaataccataccttttgggcagcatgggtgactttatgtgggagctatagtcctaggctggctctcttcatggttttcctacatctaattcatccaagagcaaaaaaagccaaataggttctctcctgcctgctaatcctaggcagttggatacagctgcatggagcaccgagttgaggggaattctaagattgcatttatctgggcttagcagaaatgagaatggtgatccattaatgatgcctacctcgagtaggaaagtaggaagtgtcacaggcatatttgcaattattttcctagaaactattgtggggctgaccctgctggtgggggtcaaatcatctcagctgtgggaggaagtgagccacagaggctgggaaaaggcaggacctgacagtaacattgctgaaatgccatttaccgcctgcactggctgtgattacgcaaaggctggcagttgtgtgattaaatacactgagatgaatagtctgaatgggctttgggctcctggcttttttcctgatgattttcaatgggtaataataacatggtgataacttccacataggaagaggacacaagggcacaagaggactttcatgcccaccttaaccaggcttgtgcttaccctgacaatggttgcatctcactaaattggtacttatgcaagcccccttttcattccagcagcatgatttctttccatgggatgccttaaagcaaagcacctagagcctgatgaagcctcgtctgacagtaattgaagatacagactaaacc

SEQ ID NO: 51060 - DNA, 755 bp, Homo sapiens
tcacctctgacagatatgattaaagcaaaacaaaaaatgtcattctaccatgacttgtaagtaaagaaaccaggatcacttacagttaaatccaaataagttggtgcatgttttgcagctgaccagattttagaattttgctatctcagggatagattatactttgattctttgaagcacaatgggatgaatttcagaacaccaagagacaggctgatcaaaggatttcaccaccctttattcactatcatatgcaatgtttaaataatatttagacattgcccatattgatttcagctctctgcccaaacattggaaacaccaattatgtaaacagtcccagaatccagagctagggttgcttgcatagtgcttaagggtagagtatacaaagaacgccaggaacctgatgccaagccctacagggaactttcaggttataattccagcaagccgattatagacctgtggctaaatttacttaaaaccaccacccagggcgaaatccattgtgaacaccagccatggcaaaatcccattacaacttccttctgatacaaaggcacataataaaagagcaagcaatcaagagtcccaaccaaaagacctcaagtggggcctcacaaatattttttctccatttcccagatcttgcaagatagggctgtagagcccttgggcatgctgctgaaaaacactggttaccattagcaaccactgtttattccaggattttgttttattattggctataa

SEQ ID NO: 51061 - DNA, 1532 bp, Homo sapiens
cagccacatggggccagaggcttccatattgaacagtgcagctctagactctacataccttctcactgtcttctccatttcagaagccctgccttccccagctggagctccacctacttaaaggtgtccagctcctcccgactagccacttaactatccaagttaaaaacattcctaattcactctgacttacaaaatgtaccatcccatctcccagattcctgccctaaaatgccacttagtttggtgttattaagtgccaatcaatttaagtagctaatattcccaagtaacagtctggtttttaacatgttttaggaaggaagacattttcttcccattaaaggctttacacatatcctatattggaaaaaaaatgtgactacgaacttcgatgaaggcacttcagaatgtccctggcacacccaaagatgtgggtgaaatataatactttggtccaggactcactgaatacagaaactatcatctgtcttcatgtccgcagtgccaagcactgtgtctggcacaaagagagcacactaaatattggtattatatgtcattaaaattagttgagaaacacaagtgagagttccatcagagctagttaaggttacccagcaaggaaaagaaattcatgaggcatgactaatggcgttcttgggtttttaagtcaaagagtcagtattttattagaaagtggaaaaaacaaaatgacataatgggaaagaaataaaatggcaaaagtcccttaaagtccatggatcagagagcagagcatttatgactaatcttcagggattgtgggggaggatatttacacattcattcaacaaatatttcttaaactgctatgcgccaggctctgtgcttggcagaagtcacacaaatgtaagacatcgttcctaacctaaaggagctctagacttgagaatagacaggcatgaaaaataaacagcttcctaccttatgatgtgatgaaagctatgctataagggagatatttgcaaagaggaatggggtcaaagaggaaggagggactgtttagggagtttcaggatagcttcataaaggaagggaaaataagaccttgagagatcagtaggtttctgcaggcaaatttaacaacaagtgcaaagacagaggaaagaaaatacatacagaatattctagataggagagtaatgcagtgtaactggagcacagcactgcatgaaaagtggagagtagcaggagatgatattgaaaaagcagactgagctcaaatcacaaaggaccttgcaatgctctgcacagggatttggactttagcctaaagtcaaagtggatccaccccaaagttctaagcagatacacgataggaaagaatttctctgcctacaggaagccagaagtgatcatgtgacttatttgggccagtgaaatgtgaatagaagtgatgctacattctggccaggcatggtggctcacgcctataattccaagactttgaaaggccaaggtgggtggatcacctgaggtcaggagttcaa

SEQ ID NO: 51062 - DNA, 1886 bp, Homo sapiens
agataacccaatgtttctgctttggaagacagaaagatgaagtgagagtcccacattcaaaattcagaattagggctgggtgcagtgacacctttattcccagctacttgggaggtggaggcaggaagaacgcttgagcccaggagttcgaagctgcagtgcactatgaaggaacctgtgaatagtcactccagcttgggcaatatagcgagacctcatctgaaaaaaaaaaaattagactttgttggaagattcaaaaatcgtaatataaggcagaaggtggtagttgccataagagagtcatagatcctgtggcacaaaaatacagagaaaatagatcaattcctgctgagaagaatccagcaagacattggagcttgaccttgaagaattatctaggatttggagtttcaaagatatagaaaaagagttcccagttaagctggggacaaaagcaagacaagaagccagcgtatttataaatttctcaatgtgtcaagggccccttatgcgtcattgctacaatcacatttcagaagttttaatagaaaagagattggaaacggaaaaaagcaccaaaaaaaaaaaaaaaaactaacaatggtcatctttaagtggttaagaaaaattgtgcttttatttatttttcaatttttttctaatgagcttgcattatttttaattagaaaaattttttaatttttcaagaaagatttttcaaatcacctcaaaattgttgcctcaagaaaaggacaaatcaaatccttccagacacagaatgtttactgagtgagacaactatcatcatgtccattatgacacagaggaaggaacggccatgagagctacttgatcaatcagctggttcctgcagatacaggcattttagcctctacttgaaggcagagtagagcttggatttttcctttaagtaagcaatgtctgccctctgctgggcatttaaaagttaccaaacacaacactttgcctttcccatgcggcaagacagagtgatcaagagacaagaaaggtaaaatcaccattctgatcttaaaggcattcgttttattactttgaccaggtttcccatttctataagcatactcccacatcagagaggaaagccctttgttcactttccctcagaggtcagtagcacagcccatccttggctgggactccaaaccaccatctgagtcagaggcacatggtttcagttggcagagggcaggtatgctttggtttgtaggggatgggggcaggggttgggcccagtaccccagtgcttggggttggctggaggatctgcctaaagcaacatggacagtcacgatgcagaaaggaatcagctgtttctcctaactcaacacctttgagtggggttttttctgaattaggctacattctcaacctcaacactattgactttgaggacaggctcattcttggttattacatagaggacagtgcaggctgtcctgtgcattagaggatgtttggcagcatccgtggcctctacccactacatgccatggcaccctgccctcagttgtgacaaccgaaaatatctcgagacattgtcaacttcccctccttcccacctggagggaggatggggaaagctgggtagggggaatggccccctgctgagaatcacttcttgagccccagcttctcttccttttaacccctgacatatatacaaaccatcactctcattgtgtgcaaacaagcagcaatgacaaggacaaacaactagaagttaaagaccctggccgggcacagtggctcacgcctgtaatcccagcactttaggaggtcgaggtgggcagatcacctgaggtcaggagctcgagaccagcctggtcaacatggtgaaacccagt

SEQ ID NO: 51063 - DNA, 742 bp, Homo sapiens
aggcaggatttgaaaaatgtgcatttcaaatgccaggagaagcgtgactaccttcttcaactgtaggaaaaccaagaagtagagaagttaaacagcagtgaaaggaatccaggttaagactcgggaaaattttgttgaacataaaatatatgaagcaggaaaatgccttcctaaaagaggtatggaatcaccacaaaagtggcacacactgtggttgcttcattcggaagggcttggttcaattttccttgggaaaaacatgcatgaaaaaaaatggccaccagagggtgctgtaccaaaatccaatggaacttctgcgaattcccgacagagtgctcacgtgttgaagacgtagcatgggccagtctcaaagctttcctggttttcccaatcagttctccataaactgtgcttcatggaaaagcaccctgacttttgctctagacttccagagcagaacaccctttcttagaagcggagtcacatgggaccaacactgccctcaccgggagagctctatcacctacaacccagtacccttacatgaacagtcccttttctattcttgcatctgctcatgaatatagtaatttacatatggttaatttatgtctgccacttcccttaagtacactggtgattaataaataaggacaatatgagaacctatgagactgttacatttaatttcataattaatagttaagattaagagacctatttgtcatttaggaacaccagg

SEQ ID NO: 51064 - DNA, 460 bp, Homo sapiens
aatcctcacaacaaccaggagatattaaatcttcgtctcatttatatggatgagaaaactaaagctcaaagaaattaagtcacttgcctgaggtcacacagctagtgatacaaacccaggactcttctggctgatcccaaagccacccttggcagtgtgccatggcactaacctcatcaagaatgcccaagtggtgagatgacaggctaaagcaatttaagaatgcgctggctgcctgccacactggcctgtagagaaggtcttggacaattaagttcagattaaattgaagcatttttgacaattattctggttaggtttgagttagcctgcatgtaacagaaattcaattacagtgtcttaaggaaagatttttcctatgtaacaagaagtccagaaggaggctcctttcactttctgatcatccattttttgtgtgtggctttcttcttcatggtca

SEQ ID NO: 51065 - DNA, 3059 bp, Homo sapiens
ataaaaatggaatttttgcaaaccccttttgcagtgttgtagaaaagcttaaaataaaacgtaacgagaaagctccctccataagtaaatacaatctaatgtgcttccccttatgtgttattaaagctacaaattagtaggaaaagaatagtgccgcccacgggctttccaacttttgaattctggggactaacaacagagagcaagagtgaatgagccaaacgacgcaaacgtgccctcgccaggctggcaactggtaggcacgcagtgtattagttgccctggagagaaacaccctggagagaaatacccaatttgtgaactaaacctaggtcccggaagaacagtgttcggcgtcagactccgttgagctcattctggaaggatccaactggcgccaccagggagaaaaagcgattccacctcaataacactccagaaaaaggcatgaagagccctatacctgccagggcgactttgacctagacccggtgacccggttcctagcgctgcagccctacccgccccccgcccgcccccgccttgcacggagcccctcctctgtactcattcgttgcgccacgtctcctaactctgcgccaccagccaccccgcgaaggcgtccaccaattaacccctcccagcttctggtctacagtaacgggtccccaacgccgcgtcttaaccaggcccgaaccgaccaccgccaaccttccctgacacgcctttgccccacccgaccccgcccgcccccacgtgacgcccacgccccgcccactggcgcccacgtgacccacggtcgtccccgcgcgcggcgtggatcgcggcccaagccgccattgttccgccgagggaggacagcggggcctggcgctggcgccgagacgccgcttagcggccgccactggagacactccctcccgcctcccgggtctcctggcggcggcggagtgaggctgacagcggggaacctgggagacccctccgccctccccgcggtggcagcggccgatccccggctccggcgcgagggacggccgcgatgcgctcggcctgaggttacccggcccggcccttcctcgcttccctcgactattccactgcgtctccgcgccccggcgtcatcctgcgagtccctctgacgggagggaagatggctgcacggagctggcaggacgagctggcccagcaggccgaggagggctcggcccggctgcgggaaatgctctcggtcggcctaggctttctgcgcaccgagctgggcctcgacctggggctggagccgaaacggtaccccggctgggtgatcctggtgggcactggcgcgctcgggctgctgctgctgtttctgctgggctacggctgggccgcggcttgcgccggcgcccgcaaaaagcggaggagcccgccccgcaagcgggaggaggcggcggccgtgccggccgcggcccccgacgacctggccttgctgaagaatctccggagcgaggaacagaagaagaagaaccggaagaaactgtccgagaagcccaaagtgagtatgggatgagcggcagtagagaacgggcgaagggcgggcgtggagaccctcgagcttgggggaggccgcgccccagccgggaaggaaaagagtgcttagtcgaaagccgagaggcagcactcccaagtggaggaggaggtgataggtggtcatgttatttggggaatggggggaactcaggaagtataggacgagtggggaagcccagtttcgaggaaggaagttaggaggtctgggggtccgttcagataggcgcccagaggtcaagccatctttgggaaccgtcaccgctagaataagcacagcatccttccttgaggcctgcagagtaggctgcatgtggagcgtaatgggaccttaaggtggtgttaggaagttgtataaagactgcgctcggaagacagatgtctatctcaagtcacattgagacagtaggcagtggaagaagtgcggtgacctagaaattctggggcttacacaggattaaaggtgtccaggtctagacgcgcttccattttagttgggactgttaaagggaaatggttgcccattcttgttctggcaaatgtggccaacagaggccggaacgggagcaaggcaagagggggtcggttacctaatacgctttgaggtgtatggtcctgtgagaaagagctaaggcgagttcaacgaacgagtctgttgcacactctgtggcgtggtagatttgtgaaatagagtaaagggagatgacagggcagaatggtgaaagccgagagaggaattcaggcaccgatttactgggccacgtgtggaagttgcagagggcatcacgtctgtcttaggccttcatgttttacgtttacattctttattgccattcccatggttctcccattatatctttcatagttttatgtatttttaaaaatattttacatttgagcaaattgagactatggagggtatgcagagttagaaacagcacctaacctatttttatatccagcgaattaagatcttcaccttttcagtacaattcagtaagccagtacgaaggccctaccatgtgaaatttgcactctggtgtttggagggcagtgcaaggtatacacgtagagtcagtgttggagagtagtggagacagattcataaataattagaattttgcatagactgataggtgttaaagaggttttaactgagtgttaatgaggtttggagggtaggagacatttcactggagggctttaggaaagttgttggaggaaatggggtttgagttccaactaacaagagttttgttggtaacaaactctaatctctagattagagatgtgacaggtcacagttagtgcattatgaggcctggataggccttcacgttttgcctgctgattaagagatgcaagatacatatgaaacctggaaaaggcacaactttgtcaatgtgaatactaccataagttaggagaggagaaaatagaactgatttggaacataaataatttaaaaatttgtggagactatcaagaattac

SEQ ID NO: 51066 - DNA, 1429 bp, Homo sapiens
aaaaaaaaaaaaaaaaagctaccggaagcacagcgaggatgtccttgacacacatcctattttctgggaaaagattactaccacagtaattgagctgtgaagcggagacaaattgctctcggtggtggttcaaagtactgcaattgactggaatagcaccgcgcagttttccttcctctcgtgcaagataagagtgataggagctgtatcgattacctgcaagatagaagtagaagcgggccgggtgcggtggctcacgcctgtaatcccagcactttgggaggctgaggcgggtggatcattcgacgtcaggagttccagaccagcctgaccaacatggtgaaaccccgtctctactaaaaatacaacaaattagccgggtgtggtggcaagcgcctgtaatcccagctactcggttggttgggcaggagaatcgcttgaacccgggaggcggaggttgcagtgagccgagatcgcgccattgcactccagcctgggcgacaagagcgagactctgtctcaaaaaaaaaaaaaaaagaagtagaagggaagaaaatcgcaaggaactagactaaaagaatctcgacccttgaatggagttacacgaacggccagatgaaagaaggaaggcccggacctccactcagggccgactaggggactggcggagggtgcacgctgatggatttactcaccgggtgcttggagctccagcagctggctggagcccgcgatgacgtcacggactcgggtcacatggccaagtccgccccgccccctccccgtccccgccgctgcagcggtcgccttcggagcgaagggtaccgacccggcagaagctcggagctctcggggtatcgaggaggcaggcccgcgggcgcacgggcgagcgggccgggagccggagcggcggaggagccggcagcagcggcgcggcgggctccaggcgaggcggtcgacgctcctgaaaacttgcgcgcgcgctcgcgccactgcgcccggagcgatgaagatggtcgcgccctggacgcggttctactccaacagctgctgcttgtgctgccatgtccgcaccggcaccatcctgctcggcgtctggtatctggtgagcgcggcgcgcccggcccgggaccctgcgttgcttccgcgcccctagctgggcttctggcccggcctcgcggtggggtgaggcgtgcgctcatccgcctaaagttgtattattagaaacttaattctccgggtgccgcgtccgcacttcccccggctgggccagcgccgactgggggaggccaggagtttggggcgatgggggaggccaggggcgcggggcggagggccgcactcgacccttggcgcccaggtggtgtgggtcgccgatctccagcctccgcgcagccccgcggcctcgcgtagggcgcaccggggcaga

SEQ ID NO: 51067 - DNA, 748 bp, Homo sapiens
ataaaagagtaaagttgcatgatctgatcacaaagaatgacgattttatttcttagatattttgtcccaagtgaaaggagactgaaaaccattaggtggtgttcaccctggtgagcaggagccaagcccatgagtcatgggccttctccatgttcttcctcaacattggaaacaactttgttttggaatattgctcgtgaggaatccaaacacatagtgttgaatggtgaagggagataaaagatgagatagcacagtaggctgccttcccattcacttgcctaggccagtgatgtaggcgttgatcaatgctgtgtgagtgttctgtggggaaagtccggcaactccctctaaccatagtagcagactttgatcctcctgaaaaggttccctttgacctggttgttaagcattgtggatggtagtgcttgattatttccccccaccctggaagtacttgctagtataagagaatatgctgtcttgggagaagtaccatcaacaaaaatgctctttgcaaagaagacctcattttagtaggtttctgtcccttgccctgcatatgccctttagaatggttcagaacttttgagacatggtctggctctgtcgcccgggcggctggagtgcagtggcatgatctcgctcactgcaacctccaccaccagggctcaagtgatttgctcaccccagcctcccaagtagctgagctgggcgacagagagaaactccatctcaaaaaagaaaa

SEQ ID NO: 51068 - DNA, 821 bp, Homo sapiens
gtcatcctactgagaggccttccttgactccctagcctaaattggttgtccttgtctgttctttcctaacttgtctgcatccacacattgctcatgttgagttttacctgtgtctgccttctgctagattgcaggcccctgaacagacagtgacatgttttcaggttcaagtcgctgtgactgagttccctggacacctaggtgctcagtgggtgctggtttgttggacttagtttcctgctgtgcttccttacctcaggcatgtgttctgtactgagtgtatcttgcctactccattccttttccacgtgggcaacgctgaacatttgccccagactctgtatcttggttaatacctgacatataaagtatttagcacataggcaaagatcactacctctttcaggaacaaaggccggctggcgggtgcgactctggcgcattgcctttgcctgtgtgttgctggccagttatcggcttcttgcatcacagctccagagtcccatttagcttgacatgggctgggccttgcagatactcctccttcacctcctgaccctgttcagccaggccagtagggggcactggaggaggaaagccgccaccccccctcctccacccccctgcccgcctgcccgcccccggttcctgtgtgtttctgcagtgttcagatcttgctggcagtgctccccagggcccagtgcgagcggagacagcggtggcagcgcctctcaggcggtttccagagcgggccgtggctcccgggaacggcttcccgcaggtgattctgtgcacactggcctctacctggttcagcggga

SEQ ID NO: 51069 - DNA, 1907 bp, Homo sapiens
gcatccctccaaggctccatggggacatccaaggtgaggttcctccattctgcaaagttgcaaatgtctctgctcataatttcaaaagtcttgtctgaactagactttccctgctccctcggggtaggaattttgtctcctctccatcctggcatctttacctcctccccatcccggggcctggtccccagccagtggacgctctgttaatatgaactggcactggtggggtgctctgggcactggcaagacagctcttggcgcttgtcatcaattagcccaattctcaccacttttttctccatccccgcgtcagtgggtgcgtcccgcaggtcatgaccccaagttctagatgtaagattcctgccatgtctcctttcccccagaagacccctccccgcactcccaacccgacaggcccctaaagctgcctgtgttccgtgcctgcggctccggacccctggagtctgatgcccgcctgggctcaggcacggacggagtggagccaggtggcagcaggcagggcgcgccgccagagtgcccagctcccggggctgcccacagggtggggccgccctcgccgccgctccctctccgcgccttccccatccccaaagaggacacccctccttccgcccggcccgctccccacccccgccgcggcaccgcctccccagccgcccgcccttgcccagcgcctcccaggcagccagcgagcgaagggagcgctctgggatgggacttggagcaagcggcggcggcggagacagaggcagaggcagaagctggggctccgtcctcgcctcccacgagcgatccccgaggagagccgcggccctcggcgaggcgaagaggccgacgaggaagacccgggtggctgcgcccctgcctcgcttcccaggcgccggcggctgcaggtgagcgcggcgcgctttcccccggctctgcgcggccgggcggcctcgaagtgcaggcggaccgacccaccgacagaataccgagcctgggctgcccgacgcgcaggcgccctccccaggcccgcactgcagcccccagcgccccggggccccggcgccttcgacccctccgaggacagggggagagggagggcggcgctgcccgacccctcggccgggagagctgggcgcgctccctgcgcaggacaagccgcgctgcagccgccccggagtgccccgtgggggcgctgtggcacgcagcggggacgcccagaccccggccaccgcgacccagggaaagggagacctgttgagcgggtatgcagggtgattcctattccacggacagccgatggctcccccttccctcttcggaacctggtattttcatgcccgtgtcatctggattttgttcttgggtctctatggcagctaaacctccagcttccctatattgtggaagagggagagaaaggggaaggcattttgtggtagttgctagaaaccccagaacaatttggagccgtttggggagaggacagagaaatggggactgtccctggtagggtctccaggactgggggcacaggaaagtgctctcctcagggacactcgcgcccaccctgaacaaacccaattgaccaagtttcaatttgtcataaatcaggaagccacaatgcatctgcaccaagcacacttaaaatcggcctttaaggaatggggcagtcaagagacttcagggacccgtggtcgagagcagagactggggtcagcctgcttgggtttcaaccccagctgtgaagtttacagggttgataacttgaaggtacccaagtatgcctcagtttcctcatctgtctaatgaggatggtaatacccacagaactgtgaggattaaatgagatatggcggccgggcacggtggctcagggctgtcatcccagcactttg

SEQ ID NO: 51070 - DNA, 1074 bp, Homo sapiens
gataactcaaaatactgtttacactcatcactacttcaaaattacactagttagtagacccgcctcttgatcttgacatgttgtttttaaaagtacatgttactctataccaaatttttaaaaatattttgataactgcagttcaaataattggcctcctttctaatcctttgcattcatttacttgtttattgtgataaaatatacataagataaaattgactattttaaccgtttatagtacatgtttgatggtattgagaaaatttacaatgttgtgtaaccatcaccactatttccagagcttttcatcatcccaaatagaaactctgtaaataatgaagcaataactcctcattcttcccttccccaccccccagtaacttctattctacttttttctctatgaatttgcctaaatacctcatacaaatgaaattctatcatatttatcctttggttgttagcttttttcatttagcttagtgttttcaaggttcatccatgttgtagcatgtatcagaacttcattctttttgtggttcaaaaatacgctacattttactccattcacctgtcaacggccacaggttgttttcacctttggactactgtgggtttttttgttttgttttgttttttgtttttttgagacagggtcttattcctatcacccaggctgcagagcagtggcgtgatccgggctcactgcaaccttgacttccctggctcaggtgatctttccacctcagcctcccaagtagttgggactacaggcacacaccatgcctggctaattttttgtattttaagtagagacagggtttcatcatgttgcccaggctggtcttgaactcctgggctcaagcaatccacctgccatggcctctcaaaatgctgggattataggtgtgaaccactgtgcctggccacctttgagctattgtgaataaggctgctatgaacattagcacacaagtatcttcttgagttcctgctttcaattcttttggatatatactaaggagtagaattgctgggaaatatggtaattctatgtttaactttctagga

SEQ ID NO: 51071 - DNA, 1285 bp, Homo sapiens
tgatctactccaggctctagtcactcgtccttttttgttgttgctttgttttttgtttttagagacagagtctctctctgttgcccaggataaagtgcagtggtgtaatcatagctcacggcaaccttgacctcttgggctcaagcgatcctcccgcctcagcctcccaagtaactgggactacaggcgcacgccatcatgcttggcttgtgaaaaaacttttttttttgtagtgatgtggtatcaccatgttgcccaggctggtctctaactgctgggctcaggcagtcctcctgccttagccacccaaagtgctgggactataggtgtgagccatcgtgcctggcctgctcatattttttatgaatcttaatgaatctgtcttctctacagggttgtaagctcctcccaggctgagactggttctcatactctatccctagcacccagcacaaagaggggattcctgcaatgtttgtacaactcaaccaaaccaaaatgatgatagaattgtctccgaagacaaactttgcctttgctggcacagggctgtggaaccttgtgccctgttatctaactggccccttcctccttgtgtacctacacctcctcccctcctccttccagggaaaggccctgaggcgctgtgttttggggcctccacctccttcctctcctctcttgcagcccagccctgtgttgctatttattcacaggtctctgctctgctctggctttcacttgctgaattctcagaaagcagatgaagcaatttattcagttaaagtgcccctgtgggtcaaatgccagcttgctttttaaaaccttcctatgctgctttttactttgcagagagcagaaattacctgttttgtttcctggtgctttctgcactctcttgtattgagggatggttgtgtgtctgtgtgtgtgtgtgtgtctgtgtgtgtattacaattttaacgtacatgtcatttctcaatttgagaaaggaagaaagatagtgagggggtttgatagagaatatcaaaattattttgtatgtattcagtcagctcattttttaaaagaaaatgttttaatatcactggctatggtttttattttattttattttattttattttattttattttattttttgagacagagtctcactcagttacccaggctggagtgtagtggcgcaatctcggctcactgcaacctccacctcctgggtttaagcaattctcatgcctcagcgtcccaagtagctggaattgcaggcacgcgctacaacac

SEQ ID NO: 51072 - DNA, 2433 bp, Homo sapiens
cttcataaaacaacaacaaaatcttaccatggcattgccaagcatattttgcatacaaacttcccaggatggattctatctccatgggcagatggaatccatcccgaaagcatctttctctgccagcacactcacctgtctctgctctgcaaatgcccttcttggtagtagcttgttcaagggtacgcagagcaaatttggcaattctgaaatttcagcttttgtttgtgaacttcggctctgctcaggaagaacttgtcagaatgaaggttgacattcagcctgtatgtcgagcattcttgagagaagcacacggtgcctggcatcttgaatggcatcagctgcttgctacccagttctttgggacaagtgggtccatgagagaaaatatacagagcagggataagactgcacccgctctggcaggacagggagcctggctaccccaacttccttttcccaagccatctgctacttttcttcttctgcaaccaggcattcaaagcagggtgtatgtgggggaagaccctggaaatcacctccatctgggtgtacattgttacttttatcctcagtagttggtcaagaagtagagtgtattctctatatatctttattgggttcatccccacttattcagaagtagaatctctaggccgggcatggtggctcacacctgtaatcccagcactttgggagactgaagctggtggattgtctgagctcaggagtttgagaccagcctgggcaacatggcgaaaccctgtctctttcaaaaatacaaaaaattagtcgggtgtggtgggtgtgcctgtagtctcagctactctggaggctacgttgggaggatcacttgagcctgggaggcggaggttgtagtgagctgagactgcaccactgcactctagcctgggtgaggctttgtttgagacccagtctcaaaaaaaggaaaaagtttttagaaagttttagaaatactaatttttaaaaaagaagaatctctagcgaccgttcagtgtgatctggagttaggctgttctggttaaacgtagattgtgcctatcgaataataatttctcttaccctgcctagctctacagtcgcctctatacttgtctcaatgacccctgcactgtgagcttcttgaggccaggacctgacgatacagcactaaccattgtattttgcctgtggtgccttcagtacagtgccttctatgtgccggccctgagccaggcatcgatgaaagatgaataagtccaagtcatgacctcaaaggtggcttatagattgatgggacttgcaggccagtaaataccataagtatttgtggggcgacatcactgcacattaagttactcattgggcttactgtcatcacgacctggtgctgagaaggcacatttgaactccggtaggtgcagcagatgaatcactggggcctgagcgatgcctcccagggcactggcctgggcagagggtgaagtggggagatttgcacttaggcgactgtgtcttgagttgagctttatctcctgggtcacattccaggctcagctgccagtcaatgtgttatctggtgatggggagggtaacagggctcttcactcttggccacctactgggagcagtgggtaaaaatgcaggtatgagagtcagaccaacttggggtttaaatccctgttctgccaccactcattaatcccctgactgtgcacttgtcacttaacctccctgagcctcagcttcctcatctacaagtggagggtaacagtgcctatcttctttattttctgaacctaattgaatgccagatatatctgtcatgcatatgatctgacaatggaacagaatatttgcatcaggagacaaaagagactccaggctgtatgattgccatattttcaaggccactcctggtttgggggaagaagatggcaggacatcagaatggggtgccctgccactatcttcttttctagacccttggcagatggtctctcaggctcacataaccctagagacagagttctcaaatttgttgtgcttaagaatcacttgtagcaattacaaatgcagattcctgggccttaatcccagagattctgattccctgggtctagggtacagctggagtgcagtggtgcgaccacagctcgctgcagcctctgcctctcaagttcaagcaattctcctgcctcagcctcccgagtagctgggattacaggtgcccgccaccaagcctgctaatttttgtgtttttagtagaggcagggtttcactatgttggccaggctggtctcgaactcttgacctcaagtgatccacccacctcggcctcccaaagtgctgggattacaggcatgagccacgatgcccagccgtccccacctctttctgatgttatcgagctgtcgagtatcccagctgcaa

SEQ ID NO: 51073 - DNA, 1915 bp, Homo sapiens
ttggccaagactcagctattgttacaggtgcatactcctaagttaggttttcaatcttgtgtacttataagcttggttgcagtttttccacaaagactgaaatatagaagcatggagtcattctcaggccatatttacttcacttttatactagataggagaactcaagcaagttatctaacctctctagactcactgtcctcatctattaaagaacagtaacaacacctactttctaaggtgtgttctttcctactttctaaggtgtgtgtgaagaataaacaagccaacacctgtaaaccattcagaacaaggcctggcactaattaagtgctcagtaaatattagctataaattacgattattttctcttttgagtctcacaacagtattgtaaggtattattatccctattttgcagaggaagagactgagggtcacacaggttaaggagaggctcaagatcatttggacagaaagtggcagaggctgggcttgcatgggatcataggactctaatactgtttcacttaggatttcagagccccctttggtctccagatgaaatgattttacccttgtcatggagattcatattcattccttctccaaatgtgtcctaacttccccatgcagatggcaccaaatatttacagtatgattacactgccatgattgaatttagccagaacgggagagaggctgattagtgacaaggctgcaatcttgagaggaggaaatagttctgatgttgcacattgtcattctgctggagtaggaatgttgcttaaaattgtcctggctcagttccctttctctggaagagtaaaagacactcatttgcccaatacatggactttggagtcaagctgacagtactggaagagctgttaacagagtccagatcatcactttatggttagagggatgacgttttattatgggcccacaaactgtcctccaactgtggctgaaaaccctgtcatgagaggccagaaggaagatcattgtatgttcttctcccaggccaaggagacaggatgtccttcatcagaaccagttgtcagcataagaagaacacacaccaaggaaatccatttcctggaaacatctctcaacagttcccatgtggagaaactgtgaagcttttcacagcaaatgttttagagtgttcccaggtatttgcaaagctcctatcataatgctggctgtactgataatttcctaagggtgcctgccatgagacgatggaaagggcatcaggtctgaccatggtgagccatgagggccttgcagagatagagtcaactctctgggcctcagttttcctttctataaaatgagtgacttggactctgttgggacccctctgcctctaagattctactagtctgtgattccatgagtcaaacttcagaagtggttatggtccctcataaaatggcaaagatttgggtcctagaatctatgactccattagcaggaccacatctcctctagaacattttggcttcgtgcttgtcatcatctttttgtactaactgctctgattcaatctctttccctgaagacttgcttccaccagaattccatttaattccacagatgttgaatgaagactttctgtgtttccaactgcatgcctacaaagataaatgagactagtttcctaaccttggggaattcccagtgagatagcaaggtcaagactttatagaacttcttttctccagagagctctctatttctttgacctgtgtgtgtccctagaccagtaatattgacttcaccagggagcttgttagaaatggaaacctacagaatcagaagctctggggttgtggtgcactggtcttagttttgttctgttttgttttgtttttgtttttgtttttgtttttgtttttgagatgga

SEQ ID NO: 51074 - DNA, 1795 bp, Homo sapiens
tcctgggttcaagtgattctcccgcctcagcctcccaagtagctgggactacaggtgcgtgccaccatgcctgactaattttttgtatttttagtagatttggcgcttcaccatgttagccaagatggtctcaatctcctgaccttgtgatcctcccgcctcggcctcccaaagtgctgggattacaggcgtgagccactgcacctggctgaaaagcaccccccttaaggtgcctcttagggtggctcagcccctggggctcagggcttggctggatttcagttcctctcacctccttgagcaggtgcctgtgtgcagcaccaaccacatagccatagctgtaaccctgcccctacccagcctggggctggacacgagtgagggctgatggaggggtggggagagcctgtacatgcagccagcacacgtcgggagttcccaagtgctggatccttcattacatcatttccttaaattcttacagctgcccaacgaggtggatattggttgcacctctgtatatttttttctttttctaaattatgaaagatttcaaactctcagtgctcccatgttctcatctatgcaatgggtatgatgcttcttgatcctttctcaaaaacttgttctgaaaatcaaatcacaccaagtgacaaagtgctctggaaatgttaggtttcatatagatcttatcgctgaaccctcaaaggctcactttctggggcctctgttttgagacactcaccctggactcacccagccctcagggttatgcatgggtatgtcagaacgttggtttcttgccaggctactggtatttgtgggtgcctcctcccctaaaatcattagacttgtgaggcggcaaggatgagttgtgtgtgcaggcactcagggacgagtcacagcctggcaagctggcctggacaggatgacttcatgggcctttcccacttctcatttttatgactagctttactgtttcattttggctttctctctctttcttgcagctgtggtgattaggatttagggcaagcatttgggatcccttttctaatacctttcaaatcctgattcagctgcaaagtccgggaagggagtagagaatgggggaggagggactcaccctggtgaaaggcagtagctcagaatatccgagaaactcccaacaggaatgcccagcctccacccactaaagctggaggcctctcatctcatccaatatcaccctcgtactagaaacgcaaaagggatgagtttgtctatggactcaaacctttacagtcttcttgcttagcagcttaaggcataattatggtagtcatggtggtaagggacttaacatttgcctttttccaatttaactgtgtcctttgttgaaatatttcttagtcaggtccccttttctctatttccactactgtcctaggattagatctgagtccccctctcaatgagattagtccagaaattgtgtataccatccatcttgcaaaccactgccagactctgttgacttttcattatgtaacttccctatgggagaggtgagttacataatatgatgctaagatgcccctcactggtggcatcatgtacatatttctcagtctgaaaggaaaggtctttttaaactggcttcaggccatctgtccaactaattcctgcctgcaactcctagtataccctctactacaaggtctcatcacttattctgttacccaccacattcattccgtcttgggctttggttcatgtgatccactcgatgtgctccttctctctaatccaaaca

SEQ ID NO: 51075 - DNA, 1117 bp, Homo sapiens
ctgcagaatttatgtttcccctttcctgaaaatattaaaagggaaattggttctgtaaccattttgacagcttattcatttgtgttggaaaattttaatggaggggttctttttataagccttctgtatttatcagaaaatggaaagataacatgataaggctgaggagctacacaatgggactgaccgcccccctccccccacccccgcaatcctggtgtcgaataggatataccaatgtggacttgtctgtggaaaaaccatctctgtgtgctttctggcaaggcagcaaaatgaaaaggcagtttggacttttcctcccttcatcttctttgttataatctggaagctctaagaaaacattagcgttatcccgcttgttcctgtgcctgagaaatgaatcccctgtgagtccccccatccactctgcaggagacagggctgctgtctctcactgcactgcactgcccggctttgctcagcagactcagcagccgtcttgaaaggctgaagaggccccagggcctctttatcaacttcatggtaaagactgtagtaactaacatttataaagcactttcccttatgttatcgcagaaagccccaggaggcaggcagcacactcttgccactctctttttacaggttaaggaacttgctaagtgaatcacctgaaaaacaaatagccaagagatagttggatgctaattccaaacctcttgctcatttcactcctctgcatgttgggaattacaaattcctcttttaaggtaaaccattttctggtggccacctccacagtccagcctggccaggtaaacctactttgcaattggcattcacctaaaataggtgaaactctgaaggcagccttcgtaggaggaagaggagctgactctagttgtacaatcttgagcaaatcctttgtgctctctgagcctcagttgcctcatctgtaaaatggggattttatatgcagaaagtagatgagtgaacaggtgttgtaaatggtagagccctattcagtgtgcactgtgttatgtattattacaatcaaatacactgaggaccgatgggctaggcagatggcctcagttttgatctgcactcaaatgat

SEQ ID NO: 51076 - DNA, 2726 bp, Homo sapiens
ctcctttgcacagtcatgtttcagaagcactactatagaagacaggctttaaagaaagtttcaaagaatggttagggaaaagccgaacccatgggacaagacagaaagggccctccaggctttgacggtaactacagacaccctatataaaatgctgtaagcagcttatgcatcaccacagaaaatttgctcacatagcttatactctgcaaggtccaagtttgtttggcttatttacaacaccccctaagttcaatttcaaaacagtgagtcaagcataaatcttgactcagaactgatttagcgggctaaactaggtgattctatgatagcctgcaactccatagcccagcctcaacttttcttacctagttttttgacactaaaacaagttcacacaatgaagcatcattaaagcacctcaaagctaaaagaaccaaaaaagcaggacacaaaatacatggaaaaaacagtaatgtgtctgtgtttccattaaacctcgatgttctgttttcactcctgccacacacacacatttctcctccaaaaataagctcacagaaggggagcacacgatttgggggtgggtcggggagacgggaatgaagggccaaacaccacaatcgctaccgtaattatcctgcaagtgttcgagttcatggtactcagattacaagtttacactcctgtatattcgttcacgatgaattcgcggtaggcgaagcccgttcagtctcttcgattacctcaaagctgggcagttgttagcgagaatgaccaatttcgctttgccttgtctgatcatcttcagagtctgcttgtaccccaggacgtacttcccacttttcataacgagttggagcctagagttgatcgactccagcgactttttctacaaagcaaacattaaatacggacctaagggcctcgcctgcaaccgcctcaaaaccggacccagctttttgaagccgagccccttaaacttccgaagtcgaggaccccaagtcattgagagggccactgggattccttctggggccctccaaatgccagcaggcatgctgtcacccccgtgggctcacatctgcccgccctggccaagacatctctccacgtgaatcgtcttccgggcctggcccgcctcactcaccgtcttctttgcggccaccatcttcctgccttaggagcgggacggcccccaacctagaagagacagagaacaggacaggaattttaggatccggagttacaaatggcaacccgcaaagctccccgcgctgcctaaacctcggtcggtaggagcccactcaccaacagcagccgctaagatggccggggaacgagaaaggaaagacttcccacaatgcaaagctcttcacggcagagccggaactgcgggaccggaagcggaaacagatcgcaagcagaaggggcggagcaaaagcggagggcagctgccggttgctattggtaccgctagctagaatggctgcgggggccgtacgcggctgctcatacctttaatcccagcactttcggaggttgaggcgggaagatctgttgcgtccagctcaaggccagcctggacaacatagaccacccctgtctctacaaaaaaataaaaaagaaataaaaaagaaattagccgggcgtggtggcgcgctccagtagtcctagctactcccagctacgccggaggctgaggcggagaggtcgcttgagctcggtaggtcgaggctgcagtgagccatgatcgcgccactgcactcagcctgggcgacagagtgagactctgtctcaaagaaggaaaaaaaagaatgacggcgggggtgttcttttccccctctgcgggcctttaagcttcgcggcgttgtgttgctgttctgctgcgagctgcggtctaactaatcgaggcgcttagaacccggagggagttcgaaaagccgactgaaggtgaggtgggagggtagatgagaagaggctgcggcggctgcgaccacggtctcaatgccgctgaattcatctttgtcctgaggcgcggctcttggagagccttgtgggtgactccgatgcgccgcagcacccgcatttactctccgcttggtagaagcagctgtgtcctcacccctgcggtcacccaagttacctgtcccctggagaacggtggcgccctgctcgagtttcccaaaactcgccttttgtgactgtgttagcgtgaacttgtgagccgagtttgcactgagagcgcgataaacaggtctaattttttaaaagtatttttgctgttaacgttggatcttggtataaatgtccagagacagaccactgaagatattaggcgctgaaaatccccacctaatcaatcagaccagtggataagctatatgagggaaacctcttcccctccttaattaagcctcaccaaaaaacgcgtgctgtaccaggaatcatttacatatatttatttaatactcacaaaagtcccatgagatagtaacctttttattgtccattttacatatctaggcctattgtcagagctaggaccagagcccaggtaacttaggtctcttcacaattaaagttgattcaggccgaatgcggtgactcacgcctgtaatccaaacattttggaagtccgaggtgagcggatcacctgaagtcaggagttcgagaccagtctggtcaacatggtgaaaccccacctctactaaaaatacaaaaag

SEQ ID NO: 51077 - DNA, 2146 bp, Homo sapiens
gccactgtgcccagcctatgttataaatttaaatcagacagcagctactagtaggtagacattaggttgcacaggaataatctattctactgattatgtggggacatttgccctgacccattagacactgaatctcacggagctgcttcctatcacctcccaagatgactgaccagataggtgtgtgtgtttgggagaacagaggtgaagactctgattgttaacaattattagtgctcctcacagcgtagaacagtgcctaatatgtggtagtcacacatcgatttttatgacgtgccctgaaatgtgtgaggaaagagacttttcattccaaaggataattagacagattgagtttggaatttcttgtgtttttggaagcaagttttaaatattaggacaatttctgttgttttgagtgtcctgaggatccgatgcaatctgaacacaaaggttttattgactccacagaccttaatgtgcctgaaggtgtctatagacgttcacatccaaaccctcctcccagtgttcctagccctctgctaacatggataatcactgctcgaatctttcctaatataaatgggatctgttttggcagacttctttccaaggtgttacagcccaagcaccaaacatggacaaagtaaataggtggtaattattgacaagttcattgctaggttaatgtgtacatttccactgacagctataatcatttgtttgttctaacctgaactttcactagctgcttgctgtccatgcggcctaggcaatcagatgaagcttgaatttcacagttatgtgaattgttctttgtactgcagtcataccttcagttttcacccaatatttcacactctgacatctagttaggtcatctggtcctaactagacaaaagttttccttttgaattgaagaacaaacatcataaacattaaatttaatttgtataggcttttcttgcatatagaaattatataaatgggattttttttctttcaaatgtgtgccttgtgtcatttctggagcctggcacttaaatagcatttggtatgtctttgtgataggcctggcgattgcatatggctaattgaaatggaataaaaaaactacatacatggttcaaaaatgtgaaaatatttggaaaaggcaggtctgaaaagtataccttccaccccatcctcatcatctatttagttcgaatcacacctgtgaatacacacttattattttagggtttttttttttatatattcttttgaagtttatttatgcattgcaaatattatttccttctctcatctttatttataaaatgtagtgtactatacccaccgttcctcactttgtttttttcacctaacactatggagatttttccacatttatatgcagagaacttctttctccttttttatacctgcataataatatgttccttgatttatttaaccagcccccctattgagggacatttaatttgtttacagtctttccctgttgcagacaagactgccatgaattcctttgtgcctacatcattttgaatgtgtgcaagtatatctgtaggacagtttcccaggagtggcattactaggtcaaagggtgtacgcactgaaagttttgatagataactgcctaaatgtgttctgtaagacttgaagcagtttacactgtcatcaacaataaagtaaatctttttctaaaacagaaaactttcagacatttgtgcagccacatcgaaacatacacatgggacagaagtcaggagataaggagggagcatgcacttggtttcaggtgctttagtttgtgatcttatttaatcctcacaatagccttaaaacacaaacattaattgcaccaaatacagctagaaaacgaagcttaatacagataagtcacttgccctggtctcagagctagtaggtctagtaagcctacttactagatggatggatggacctggggcacatggctaatgtgtgtgactccaaagcccctgttcttttcacaacttccagttccatctgggatctggtcctagttctgcaagaaacttgtagtgtggccttacacatagaacatatgcaatcagctgagtgtggacgctcgagcctgtaatcccagctacttgggagg

SEQ ID NO: 51078 - DNA, 516 bp, Homo sapiens
agcaaaactccctctcaaaaaaaaagaaaaaatcatgcttctgtaaggtggccccacaaccagctcatgtgtacagtttcacttctatgttaatgttttacaatatcaagttgaaagaaaccctgaatacgtgtgggggttaatgaaagtctcaccaaagctgataaaaacttgatgaggcttctaatcctagagtgtgtgtgagtagtactaggtaatttttttttcttttttagagacagggtcttgctctgttgccgaggctggagtgcaatggtgcaatcatagctcacggcagcttggactcctggacccaaattatccttccacctcagcctcctaaggtgctgggattacaggcatgacccactgtgccccactgtaatttttttttaaagcaaagtgccagactatagctctccaggtgtgtttatgtcttgaaagtcctgtaatgacttcagaagcttcttcacccatctcagggctattgctgtttttcacagtccttgaaccact

SEQ ID NO: 51079 - DNA, 744 bp, Homo sapiens
cacccgcctcggcctcccaaagtgccgggattacaggcatgagccaccatgtctggccaattctttcatttattaactcagcattttttggcatgcctaaacatatgctaggtgctgagatgcagactgaggaagagatagtctctgtcctcaaggggctcactgtctagtgtgggaaggcaggatgtgcgtgcatcaccatagtctgttgtgggaactgctttcctaagaatgtgtaagaagggccctgggaacaacttgggagaggcaaataaaagcaggtagtttttacatcaggattggcaaactcaaaagtctttaggcctaggatactgaaaatgagtgaggtgaaggacacatgtcatactgtgggagcccaggggaccttggcaaacaggagagcacagccttgtcaaaagaggaagctccgcacagctccagccatggaactagggccaatgttgccaaagccaacttctcagggaaacagggtttcctgcaagtgtgtgcaatgtccagacttgttagtgttggctgtctgtaaatgtttaacgattgtttttaaacacataatggccaagccagacaggtttaggggcacccctggaccaccctttgatttagatacaaattagactttctttttctttctttttctttttctttctttctttctttctttctttctttctttctttctttctttctttctttctttctttcctttctttctttctttcttcc

SEQ ID NO: 51080 - DNA, 822 bp, Homo sapiens
cctatgttagaaatttttccttttgcccaagactgagtcttaacagagcaaaatgtattctgatcataggtccccagaccctgaaagaagattaccggttttgccctcagattcaaaatgcacaagatggacaaaaggcttgagttgttcatagagaaactgccagcagggctggatttttctatccctggggtgctgtgcaaccactttgtagtccagttgtgttcttttaattaagataacttcattatttctgtacctgatgtacctaactgggatggaaatgaacaaatttcccaactctcattcttgggagtgaacatttgcatttaccagcagtgggtgccagtttgcaaatctaggaaatacccagaccagactcaaattcttggccagaagtgccaaccccctgaggcacccacagggtagaaatgtgtagtcaatggctgggtgtggtggcccatacctgtaatcccagccctttgggaggccaagtcaggaaaatcacttgagcccaggagttcgggaccagcctgggcaatatagggagaccctgtctctacattaaataaataaataaattattttatttatttatttttttaaaagaagaaatgtgcggtcaacctattatattaccttactgctttttccatttagactgtggagtaaaagctcttaccatattttgagcagtcaaaacacccacaccactctgaacaaatgctttattccacattgggccttgaattaagaattgcttaattaagaaaatgtttctttccacatttaactaatcaaagaatgttggatggtcatggt

SEQ ID NO: 51081 - DNA, 561 bp, Homo sapiens
cctggcctcccccaactaatttttgtatttttagtagagatggggtttcaccatgttgtctaggctagtcttgaactcctgacctcaagtgatctgccagcctcggcctcccaaagtgctaggattacaggtgtgagccacatcgtgcctggcctaaattatggtttaattatatttattggattaaaattatattccccattcttatttttaaaaatgttgactttttacttctgtggtggtaatttttttttttttttgaagaggggcaggtcagtggccctgagaagaaaatttcccaatccatgtggaagtggcaacatgtcatctgacgtcaataattcaggtttaaggtcaccttagtgttaaggaggtggaatctctcttttggttgttagatgattcatgatccatcaaatttccaactcttagatcaaaaactatgttaaatcaagcagtaagtagtttaaaaaacatttatctgttaatctctataaaacaaatcaggcaagtggattcttaatgctcttcaacattaaaaaggtagtagaaaagggaacc

SEQ ID NO: 51082 - DNA, 1708 bp, Homo sapiens
acacactttctctaagtaactaagcttttctttcccctggatcccaggagtgctttggttgtatcttccttatactatgtacaggatcctgcctcgtgttgtaactcatcctgttattatcctgtctcccaaggtatcttagactctaaactccttgaggtcagggtaatgtcttaccatgtctctgtagctgtgtagggtgtaggtgattccttgcatacagtaggcacactataactacttgctgatgttttgctctttaaccacttagtagcataaacaattttggttgtcagtgaatctctttttagcaggacctgttgacttacagcaaatgctttggagagagctaaggaggtatgtttaaacttgataacatgattcagaaagtctagaaagtcttctcaactatctggctttcatactggcccacaaatagataactactgagtttgttaatttgtaatcttttctcgggttaaataataccatcagtaacactgttttttattaactgtcctgtgtagaattaggccgtctgccctaggtcctgtgcaaagtgccttcagctttccccatatctgaaacacactttaagaccatatgcattattatttatcagaaacttcatgatagtaaaaagaaactcttttattttcaaaatataaaaagcaagcactggagctgagaccatctgagctatgtgagttatctcttacagatctaaagaggtttgttcataagaataattggctagttgacactttctgagcataagaatcctactatccaaagacaagtggttggacttcagaaaatttaaaagtgcactgttctactaccaggttaaagggtaatcacactttcaaaagcattctaataattctcacatcatagtctataccacacgggctactgcttcaaaaatttataattatgaggacggtgtgcaaaatgcgcaatgcaaagcaatgcaatgttgaaatctttcaaggttctgtctggaagtattcctgaaatgtgctgagctgattggctaattagtgacaacaccccatccatcccaatgccagggactgaaagttcaacacatttgaattcttcctggagaggacccaggattttcaaaaagtgtactcactacacactccacgcacaaaaactcttgttcccaaaaggttcctaaaacatgtccaattaacataagtagttagttgcagtctgttttttttcttaaacattaactattgaaaataagcaccatttctagtcacctagtgcacaagaggcacaatgtcctggaagtctccacaccatgaagctggctggtggctttttttcttgtcatactggcacattcatatgatgattcccctctttttagctttcagctttataaagacagttgactcccacctaccttcaagtcaaccaggaacattactgttatgctttctttcctgaacaaagtccacagagtatctctaaataggtcaaggaaggggtatgctctttagcaggctccaggacaaagtgtctctaataatcactttgatttggttgtgtccctcttgtttggaggtaaagatgtttttctaaatgctaccactgtgtgattgagagaaagacattagggcagaaggagaaaaaaaatcacaaatttttacttataatatcccctaactattctcactttctttacctccaa

SEQ ID NO: 51083 - DNA, 2056 bp, Homo sapiens
ttcaatttataggaaatgtccacaacaagcaaatccatgaagatgcaagtagattgtcaggggccgggggagaggagaatggggagtgaatgctaatggggatgggatttatttttggggtgatgaaaatgttctgaagaaagtggtgatggctgcacaactctgtgagtatggtcaaaaccactgaattgtacatgttaaagggggtgaatcttacggtacgtgaattatatctcaataaagctgttaccaagaaaacaaaaacgaccccctcccccaaaacaaaacacagggtctgaaggcttctaactggggagagctttctggcaggctgtgctccgcagcgaggcagccccagaacgagcaaagtcccatggagtgcaggttcctggtcccatcgtggctcccaactctctgtgggtcttcgggcgcgttgcttactttccaggctcaatttccttgcgtgttagctggggctccggcccggagtggccccaaccccgaatccccgaacccgcacgccctgggtccgacacagcttccaccagccacgttacctgtagggtccaatggcccctggggctttcgcggtgctgatcacccttctgatcaaggacgacatggctaagccttccctcttgcagccccttcaggagaagaagccccagcaccagccctgctggcttcttactggactgaccaaccacagcagcgcctctgccccacagctcccgctgggggcgggctcgtgcggcattctgggaactgtagtttcggcgacgctccaggccacgtggaggaagcgcccggtctggcgcatgcgctctccagcgcgctctccaggagctttggctcggtgggtactgtcgcggaggcttgtcattctgacccggggattcctcacagcgtctggcaggttggtcgtgaggggctggtgccttccaggatgcgagtgtcgggggaactgtatgcggcggcccccctcccggcgcccgtctcccctcttcatcgtttctctctcagactccgctgacctctttccttgctgcctgtgcccggggcccctctccctggtgtcgcatctccttcggcccctgcgctggagccccctacgtcagtcatttcccttcattgccccgccgggtggaggccgtcctgggaatgggcttgcatcccctcttctgcaaccccaaatgactaatatgggtcattctggcgaccacgctgagatctgggcgttggtcctcccgtgttccctttcctgctcctcctgtgttcccttctctagggtgctcctcgggctttacaaggtcactgtctgaacagagccctagtgattgggatatcatttcagaaagaaagatggtgatctggaatggcccagatcccttgtaagtattctgctgtgtcagaaggggtggtacttggctaaatatttcttatcctgttaatatttgcattgtaagtacgcttcgtttcttcatttatgcgggcactcatagatatatgagtccctactttgtgtaaggcactctgctagatgctaggaggaatgcaacagttaaaaaaaataataataaaatctctgccttccctgcttcctaaagataatacaagaaaatctgctttattccctctcattttgtcctacatactgctaaggttttggccttcctacttccggctcaggaaccttctgatctttttcattggtttggggcctggaataaaagacctttcagtctggcctccccttgcctattcaagtttcattgtcatctactcccttttcccactagagtcctcctgtattcacactgtggattcctgaatactctttcttccttatctgtgcaaattccagctaactgaaattctattttctctttgacttttcctaccaattcacatttttttctttttcttctttccttcctttccttttctttttctttgttttctttctttcaagacaggatctcactctgtcaccctggctggagtacagtggcatgatcttggctcactgaaaccttgacctcctgggctgaagcaa

SEQ ID NO: 51084 - DNA, 1849 bp, Homo sapiens
cttcaggcataaaaggaatccagatctttgataattggttaaactctccgatttaggacaacagcaacaaatattttctgattatattgttgcaaaaataaaagtatccatggttttgttaaagaacaagaacaaagtaacacatttaatgaaaacaggaggaagcctggaatccaccgtgataaaacttagttgcaatatgaacgctgctagaggaagggctggccagaacacttcctcatcttaaaccaagccaaaaataaatgggcggctccaagtccctttgattttgttaaatgtatatttccagtgtaaactggcgttgtttaagttaacaaagttttcccaaagggccggtgggaaagaatgagagtcctgcaaatgcaacctgagaaaatgtgttcctcgcacggaaatggaagagctgtgttgagataccagggacacacgcagggcatctgcgcgaggtgacattaggctgcccttaatgagttttctgcttctgataacagggtgtcacttttttcttttcttttaactgtaaaaggatcctggggtgaaaatgagtgaattgcccccacactcctagattccttccgggagaagagggcggacgcaggctggggaggcgggatcgggacccggaggtcccaggaacgggtggctgaggtcaaggccgaagacctgggcgcccactcccagtgccgggtgcccgggagaggaagactgggcggacccccgcgcttccggatgaggcggacttaggtcaatgcgggaaacattgcatgtcacctcttcccactcggagaggccgggtgtcttcctgagagctggcaggaaagcggccgaggcgcagaggcgcccggagccagccgccctggccgcgtccccaccgggctgcggtggctgcggggcggcccttacctggttcctgcggtaccagtcgcccgagagggagccgttgccggcgcctggtgccccgtacgtgaaattcagtgacagctcgtccagggcggccgaggcggagtccccggggcccgcgggcgccaccgctgccatgaggtctcgctcccggcgctcgggctccggctcgggctgcggccgcctccccgccctgttgcaccgcgaggaggccgcgccgcagccacttcctgctcggtgcccgggcgaggcgggcgcgccgaggccacctggctcccgcccccgcgcggccgtaggtgctcccagcctggccgggcgctgcctcctctcctcctccggtgcgaggtgtcctcggggagcccggcggtctgcggcctcccggggccgtccagctcgcaccgcgccctccttccgctgggccagtgtctgcatcctcggggccgcactgcccaagggggcaatccccgcggccgtccgcaacgggtccccgcgcctgtcggggccagaatcagatcatctccgttgtaaacatttgtccaagtcaatggaagaggaggagacactgactaacccaaagcagctatcatctcccatctctacctggcaattccagtcctctatcacatatgtagtgtttctcaccgatattttaaaaattgattgcatatgaaaaagtcatgagttcccagaaatattgtaagcaatatgagaaaaaaagatccgagcgattgaatctcagtgccagtgcttgatagatccttagtaaatattccttgaatgaggaatgtggtagccataggaccccagtgtgcgatgactggattgggtttgcttcagatgggatcaggtggagttgctgaaaagttgccagctactgtatatatgaatttaggatgaaagataaatgttgttattaatcttaagaact

SEQ ID NO: 51085 - DNA, 677 bp, Homo sapiens
gtgagcatagtaccagtaggtagtttttccacctgtgccctcctccttccctcccctctctagtagtccgcattgttgattgttcccatgaataaaatgttttttttaaaattcatctctagcacaattcagtcaatactagttgtgttacaataagcattactcaagttaggagcttttaaggggccaaagtagagaagggtatggattaattcaggtatctcacatcataagccaagtccagattagagactttgatgagagaggcgaaactttgaatcttatagaataacatatgacatcatctctataaacaacagtttggcaattgttaaagtgcaaacacaaggcagactgtctgggttcaaatcctgactccactgcttatttgctgtatgacctcatctagttgctcaatttctctgagccttgtctttatcacctgtaaaagggagatgataaggagtacccgaaacatagaaagtactcaataggtgccggctataaccttacaatagggaagcatcccttaaacaaattaaaaaatacaatccacatagacaaagattcataagtgcaattacaataaaactaagaacttttttttttttcgagacagggtcttgctctgttgcccaggctggagtgcagtggtacaattttggcaggacgaagtc

SEQ ID NO: 51086 - DNA, 830 bp, Homo sapiens
tctatctaaaagacagaaaaggatttaggaaggagttgcctttcaaccagcaaccaggcacaggcagaagagacattagagctttgtaacaagggacacacagagttggcagcacaaagggcctgggcctctgaaggttggatgaccaggctcatcatccatccagggatgaccgagcctgtgccctagactattggcctcccacagcagccagtccatctgcccagcagtccctgggcacccaggaatgcagcctacacggcatgagcgggcaggctgggggtatgtgtggcaggaacagaattggggttcttggggaggtttttttccacttaaaactctttttgtcgcctacgtctccagacatttaaagatttctgagctattttcagacctactatgaaaagaactgaggtgccagcagtcagacacccatcgaactgtttcctaagaggagaactggcatgactcacttttgatctgtcagctttgtattgatttttctggcaaactttgtaggtctgcccagggttgactccaccaggagcggctacgttgtaacccactgcgtccagagtcagtcattacaaaggccaccatcacaggatcggattctgcatttctttttgtgggaatgtgggaggagaggagggaaaccacaatccacaaaaccaagggtgtccctgggcttccccactgcctgctgaagggaagccaggcagctctctacatgcctgtcctgggctagggactgagggctacttttggaaagagggactgatgggagctgacagaggcccagaggcaaaccatttccaccctgtcctttc

SEQ ID NO: 51087 - DNA, 737 bp, Homo sapiens
gaagaatatccactatttcaacaaacatcatacaattcttaaatcacttgtgatttaaaactaaataccactttttaaagtttttaccttaacagtaaaaagtggcaatttacatttgtatagaactttacaggttacagagtcctctgacacttaccatgtttttttcccacaagaaaacactgatgtaggtaaagcaagtaatatgatattagatcaatttcaggattaggaaactgaagctgagaggagttacacaatgtacccagggtcacagagctaataagtaacaacccaagcactgaagcttggtcttcctgctccacatccaaagggctttccactaaaccacatcactccaaataaccactgttacagcgtgctatggggtcaggcttctgacagggaagaagggctcactacagatctggcaatgacaggcagtctgcctgcagaggaatgtacaatacaaaaataaagtgtatgaaggtgggcctgactgacgaaagggaagtagaactgggagaaatgccaagaagaataacaaaggtgaaaactgggcaacttaccaataagggaagccaaggaaatacctttgtaaacttaatttacttagttaaggtagaagggatagtctatgtaggggactatatattataatgtggaaaaatcataaagtgtttataattcaatcaaaagatttagaaaagatgtaatgaagcgtgatgtgtatgctg

SEQ ID NO: 51088 - DNA, 878 bp, Homo sapiens
aacacaggtgtcaaagattaaatataaactattaataacagtaaataccataccaaagcagcactatttttacacgcaaaactatattgggggagggggttctaatttaaacttcccactgtcttgcatccataaatacttttgaacttgagggggaagggggaagaacacctgtcagagcagcacatccacaatgttttacagactgtgtagctattaatatttaattcctcccgccccgggaggtcaggccgcagggagcccggcgctgcccacccgactttccacgcgccaggcctgccggccgcaggggaggctccggctcccgctcccctcaggtcccctcgcccgtggacagacgcggcgggacactcggacccgcctcccgacctcagcgcgcccggctcggggcccggcgggcggggagaggctcgcagcagggcctggcctagccacccccgccccgcggccgccggcgccgcttccctccttcttcccgctccccgattcgttacctcttaggcgccggcggctgctccatggcggccggggacagagagagggacctggtggacggcgaaggccgaaaggaggaaaggagccggggcaccggccggccgagcctagggcaccacagagggaaactctgggaactcggaccaactttcccgtaactccgcggcggatctccctcccgcttaggagcgcggctcctcccgccccgccccgcccccggccgccccgccccgcccccggccgccccgccccgcccccggccgccccgccccgcccccggccgccccgccccgcccccggccgccccgccccgcccccggccgccccgccccgcccccggccgccccgccccgcccccggcc

SEQ ID NO: 51089 - DNA, 1906 bp, Homo sapiens
aagacaatctgggcaaaacttggggagcatgtcctatgcgattccttgaagcccagtgtatattttccgagttaatgtttgagtttcttgactttgttagcttgtaagctattatacggaaaggtaatattttatactcattacagcctaataaaaccaacaccgacccttacaactctgaattcattacttatcagttattttcactttgtctctagaactctcaattctgtcttcattttggttattcccgcagcttccctaaatcccacgtcagactgcaatcctatggttccccgcaatattctctttgaccatcccttcccccgcccctcatcagcaaactagggagtactttaccattgctttgtgaaagtaccagaatgcgagaacttgtctacacgtttggccaaaacgcatcctccaacggtgtatgtcctaatcccttcaattttcttcccacatccaccctccttccagcaaataaaccttggaactaagttgaaatctgtcacttatttcgctcctcctaccagcggcctattgcttctgccctccccagtgaacccaaccaagttcctcttcccagtcctcccatttctcaagaaaaacaaccacctctattttttcagggctttacgtgctaggtgtggtttcttcctctgcatcgaaccagcgacctgggtgcctccccacccaagacggacctccacatcgggaaccgccgccggcgcagcggccccagcagccgcagccaccttctccccggagcgccacttccggatctcgagtgtttcccctttacggttccccccacccccttagacacctcctagagctttgtcctaactagcagggtcggagctgggaccctggctagcagaacgcaagagttctccttcacgaagacgcgcagagtagcttctccagcctgagaaatccggtccggctgcgtagagtggcagccgtggagggacagtttgttttgagcaccaagtgggacacacccggaagtggcgcggtacaggagcagcactgccggcgggggcgggtgccagggacttggaggtggaggggacgcggcggtactctggcgtgtgagccgagggtggagtgcagagggagcgggagcgggacgggaggtcttctagctttggttctatggtggcagatccggctgggttccgggaagcgagggcctcgcggggtggctgggttggtgaagggctactgcggccgaaggggagcccgcctcacttcattcttccactctgagggacccgctctcttctggtcactacgtcttcctccctcacttcgcttggcgaagggtgttgtacttgtgaggaagtcgcagctggagctgggagtccgctggagtttttctctgtttctaagaggaggcgaacggccgctttggtggggacttactgctttcggcctgagataacgaacgctctttccttcactctaccgccgacttctaacgtttctgtctactcctttcagcttccgacttcgactccttaccttaaaagatgctggagtcatatgtaactccaattttaatgagctatgtgaatcgctacatcaagaacttaaagccgtcggatctacagctttcactatggggtggagacgtggtactcagcaagctcgagttaaagttggatgtgctggaacaggtaagctatttagctgtcattaactggaaacagttttcagcttgtttagacggtaatctattgtttcctaagctttgactttatgctgtaaaaacgtaacttttctactgatgtattttgagctaccctgaaacaagggggctttattttacactattttctttttctttctttctttttttttttttttttttttttttgagatggagtctcgctttgtc

SEQ ID NO: 51090 - DNA, 1171 bp, Homo sapiens
tatatcaccactgtatttttaatactttttgttaatgctgtttatttttatcagatgactattaagacaaaagttttcgcttatgtttggcgcattggttgtaataaatgtgaagtggattctttaagtcaatttaagggcatctggcaactaggaagactaatccttggagtgaattaagggcatgaagacaaggacctgtcatttataggataagaggtcagtgaactatgtgggcaggataaatatatcaattagggagtttccctgagagtgggcaagaggctaagaatctgagtcaataggtcaggaatatgtagacagtaggtaaaagacatatctagagtgccagatggactagtgaggtagaggttatatgttttcattatattttaggggtatttgactattaagtgagaaaataatgctgtttgggggaagctggccttggaaaatagtgcattcccattagaagttgatagaatatatacgtagtggaacatcttggtcctggtagtgggatactaattatgtttattgtattaaccctatttgattcaggattgtttttgcctacaaataacttagttcaaactaggtcttaacaaaatgcaagagactaatgttcatatttatttagtgaataaattggagtagttttctgtgctattggtggaacaaattaaactttcactggttgagggcttacacctacacagtatagtgtgggaggatcatcagccagtttgtcttattgttttattggcagcagaaaactcttaaactgtgttttcccatggaagaggcatctcacttgaaatctcagaacttatactaaaaaatttatgaagtgggatgatagtgaattacagaagagtcatcaaagaaagtatgtgattaactgacagtttattgacttcatcctcagggccaatttaaagaaaagtgaggcagagttagatttcaagctatgctttgaatgctgtgtgaggtctttttgagctttttggttaagctgtaattaattaactcgattaaacaagtattactacatgaataaaagtacacacacggatttttcaaagaggtaataatgggttcactgctgataaaactgtggatctgagtttggttaacattaaagagcactccaaaattcacctgttgtttt

SEQ ID NO: 51091 - DNA, 690 bp, Homo sapiens
acccctagttttcctttgtaaattgtcgtttatttggcagagaaagcatttaatctgtaaatgctgctctgtgttttatagaatggtgaaccttacaagtattttatcccaaatagatgtttattaaaattttaacttaaatatttgatgattattatgaataagagtttttaaagcagtcactttgctttgatattcacagtgtgaacaagctaaaattttctacctactttctcttctttttattcttccaggtcacctttgtgtcaggcattgctactttggcaaacctgcttgcctttgacctttggttactcagttttagtttggttttgagccagtgtgtgctgaaatctttaaaactaaacaaatatttagcattcatttgatttaccaacaattgtctttttaaatattcagtcactccacaagaaaagtaactattgtcagttacagactgtagtaccaaagtcagattctggaacattctataaattactaaaaaactatcaggttataatttagattggctcagatgattttaggttgttttagaagctgacggtatttttactcacaattttctttcttttttctttttcttttttttttttttttttgagacagagtcttgctctgtcgcccaggctggagtgcagtggcgtgatttcagctcctgcagcctccgcc

SEQ ID NO: 51092 - DNA, 585 bp, Homo sapiens
aaaagaaaacacattctaacaattgtttgtattaaatggaaatatttgtttatatgatccttagatgatttatactttaaactatgagtaattcttttcatgctgacatgttgatggggagcactgtacttttgtgcacatatagctgcagcttcctgtgtttcagtctgagtcatggtaaagtgggaaatatgagtttgaagcttaagtactgagcttaaaacacttaatcattttttcccactcttgcattgaaatagtgggagcaaaggtagttgagaccacagcaggccacttgttactgttgacttaagtacaaacagtggtcgaagtgtttagccctttgggaagttttgtaattgaacaagaatgcaggagttattttgataagatagagtagcaatggggccaaaactatgatcatccttaagctctgaagcaggccaaggatgaagggatataaagtgtttgctcttccaaataaacaaagataaattcacctaggaaaataaacttagcatttggtcaatttgcaacaaaatggtaaaagaattgaactgtttattttagaacttggcctaagga

SEQ ID NO: 51093 - DNA, 469 bp, Homo sapiens
atagtaaatctgcagtggactggtgacaaaccagtggatttttaaatatgtctcaaaatcatcagcttgtttacttcagtgctacagatagtttagaggcttaaaaaaaatggaggaaatcctggcttttaacccagttttaggaatttagttttctagtactgggtaagttgtactttttcttttccttccaatgaaagccagagtctttcatctctaggtcattggttcaaattccattctgctcagtagtgattagaattagttaccatctgacttctgttcagtaacctttgtgacctgagctgatagctgccatcctgccactgctggttatttatagctcaagatcacaccacttgacatttgctggagactaatgtagcagtctcagcacataatataggctggatgctaaatttctttacctttctctacaggtggtttgttgttttatgttaacacctat

SEQ ID NO: 51094 - DNA, 440 bp, Homo sapiens
tatatttttttgatacaagtcttttgtcagataagtaatttgcagatattttctcccagtacatagcttctcttttcattctcttaacactaccctttacagaggaaaagtttttaatctgatgaagaccaacttataaatttttaaaatatgcctttttggtatcatgtataagagactcagtacagagtttctctgtactgagctgcctggagatggggctagggaaggtaacatcagcattgtggtggccactgtgctgagtcatacctgaagccagcacagcactgggcctcacccaaggcccgtgataacccctgcctggctatccgcctgtgttcactcaaggtcctagggctctataacctgccaggcttgtgtccctccctataggacactgaaatttctccagtcccaggtacgtccagagatgctgtcca

SEQ ID NO: 51095 - DNA, 439 bp, Homo sapiens
agatgatcgggcagatcgagggcttgatctcacacctggagatggaccagggcctgcaagctgggcctggcctagggcgcgcccgtaggggagaacatcatcagtgtcactgagctcatcagcaccatgaagcaagtcaggcacattccagaaagcaagctcaccagcctggcctcagcactggatgaagacaagaatggcaaggtcaacatcaatgacctcatcaatgtgattgagttggtggacaaagatgttcatgcctccaccagccaggtggccaagattgtagcgaccttggagaaagaagagaagatggaggagaagactgagaaggaggccgcagaggtgaagagctagagctgctggcctagccacctgtcctcctgctgccccactgccctggcgagggccgtgagagcaattgctttgaggtgattct

SEQ ID NO: 51096 - DNA, 1913 bp, Homo sapiens
tagaacaggaatttctaaaaattggctgggaaataagaagaacaagtaaaattatcttaacttttttcaaaaaatgtcccatattatgttttctaatatgacgagaataaaaaccataaatgtatgagatactgtaattctcctgtcctcttagaaattatatgaaatggagaagacatctcaacatacaaattatattctccttgctgtaactgttatatgattagatacactaatcattattaattaccactaccttagaaaagatttttttgacaccctcaagaaaggagattaaaaattatgactgtttgacatttaaaaaaaagcactaggaggtatgtgctgctcagccgtgtttacatagtcatgtattgttttgtttaaccaaattatgtaaatacagtattctacatcttttattttgaggtatatattcattgtcctgtgataaatagcttgtgcatttttaaaatgttgtttatgtacatttttgttttagtgctgtgtggttgctatagctgttttggattccaaagggaagcctttaaaatacataggagaataacttcagagatatggaagatatccactgggttgagtttctgatgtatgtatttcaaagctgcataaaaataaaaattatctaataagcaacaaacttaggatatcagagcgatctcatgtgctgtggtgtagtgaacatgatgtacctgcccagcctttcgtagagggagatgagctcatttcagagagataaccatctctgactttttcttctgattcatcactgacctgaactcgatttgaaccttgttagacaaaaaacaagcagaattcctggcctaaactataaaatataattaagcccttttgaaatgatgtgtaaaagaacattgctgtacccccacttataaccaccaccaccaccaccgcaaccaataaagttaaatcaagcactgcctgtaatggattaaaataataaatgttcctggatttcagtgtttgaagtacttgaagaaaacaggctcccagcagccggggtagctgaatgcaagagagacatttattaatgacgagttcaaggatttggcctgtttaagatcattactttctgtttaccgtgtgttacacatcccttgtatttttacacagcccacatgtgtccacatgcaataatgagaagcttttttcccaacaaaggaattaattgtgtaaatatggttctcttggggaatatgaagtcttcataagactctgagcccttctaatgagaaatccagtgtagtcattatagtcttccatgtaaatccaccttcagatcttatctttaaccaaattagtcatttctggttattggttttagttaccaaattccaaatttaatctagactgtttgctagaaaactgctggcctcagggtatttgttttagaattgtgtgccattacattggacacataattccagccctaataattaagtactagagacttttttcttaatagcatctccttagcattctaatgatagcccctattaggttagtattaagtaaaatggacaagcactgtagccccaacccaaggactgtggaaaaataaaagattagaagtaaatctctatcccccactctactgaatttgtgacagcatttagtgttgcctgtggtcacaggaaattgcccgcttgtccatataagccagtaggctgtttgctaggaaagcttctagcaaagcaaccctgagtgatgagtaactgacaacatcttagatgttcttttactccctggttggtcccctggacttgttggctatgttggcataacatactggggctgagcaagggaactgaggacaggaaaaagcatgtatttacaacccagttaccaattagaaaaatgaaattactaag

SEQ ID NO: 51097 - DNA, 700 bp, Homo sapiens
aaaacacatgtacaactaatatattttcctctttctgaataaatacaagttttaattttatcttgccaatgaaatcttttgttaactctacaaattcctagaaagttacttggattactgtgcccattatagatgttttaagaatatacttagctgcatttttgtgcatagtcaataacctagtgctccagagtctgttttctttgtctgcaatggagatttactagcattgcagtaaatgcttacaccacataactgaaaaccctttgaggttaaacaactcagtaaacatgctggaatgctcctagctttcattttcaccagcctgtttcacaacctctttcaaaacccaatggaagattcacacctctgaaaatcccacatgattcacccatgccattaagttcctcttgtgtttccaccctggcagcacttcccactttcctattcctggggggtcgttctgtttggtaatttttgtaaatgtctacgtattgagtatcaccagttagactgtgagttctttgaaaatcaaggatttgtttctttagtgcttcctgtcatagttctccctaggatactgtaaatgacattgcttgtccttaggctcctcatggatttgggagccaggctgtgatagctacagagcatatttcaggatgaaaagaagagagtggaagacagtgagctgtggggaaag

SEQ ID NO: 51098 - DNA, 576 bp, Homo sapiens
tagtattttaagatctataaatgacttttctggtttttagcttttgcctagttcctttgaattttggaaggaattaatttgtagatgacatcatgcagtacatttaaatatggcaggattgagatttattttttaagtcagcatttgcttttcttggttaaatgcaaccagtttaggggtaataactgcttaatatgcctggcacattattgaaatcccttatgagtggctcaaaatgagtcagaaggtcaatttagtccttggctgggttcctttcacaacaggggttttcctgtgctgctgttcaggaggagcaattaaaactttttgtgtattcaaagctttccagctgaattctggccccatcaaatgatatcagagctctggcttttgcctggtggtgcagagctttcgtctgttagtgaatctttggggaccgtttttccccaagcttaaaaacacaagattcaaactctaagggattccttacttattcttctagcaagcctctttactatctctctgccatcgcacggactttctccagcttttaagacactttgatagcattgttac

SEQ ID NO: 51099 - DNA, 1695 bp, Homo sapiens
ctattgactgactaaacgctgtcctttatatcacaaattcaggaataagatttgggttgagacatgggtgaggggcggcactgaagtccaatactcaggtctctgcgtcctgcatacctcatgtagctctcactactctgagctttttttccctttctcgggtaaaataataaaagaaaaactcagaaaagatatcaaaaggaattctcatgcatagtacattttactacctagagaggcacagcacgacagtggatggattcctcccacaaagcctaagctgtctcttggcttagcctgtttcatcttccccccgccccccatatactgagcgaccaccctaaataaacgcgacaaactgcggcacactagtaatggacgagcaaaggcaacaaaaatctttccaacaacaagaaaaataagcagtagctccgcattggtaattaacgattgcaaacccatttatgcaacactttctcttctaaaaattttctgtccactcgttaaaccttcgcgacaaccctgtcagatcatgaggcaggtgttttccacggtcacacggtataccattaaaacctggacgggaacgcggcaaataccatgagggcccaaattccctaactgctcctttgcccagcctcacctaaagacctaaggggcctaaaaacttttgcgtccctgctggccttcagctaacgcggccgggggtaggatgggaagccgtggggcaagggaggttgcaggaagcccatccttcccctcctgcggcaggtacggtgaccctcctccagttttccagctctaatttaaaacgctgccacacagcgagcgacgctgccagctgcttcgcctacactaacccttgcgcctcacgaccagctgcattagaaaccaccaccccttttctcacgggagaaacaccggggccagataggtcaaatgacctcaccaaggtcacaatggctgtgaaaaagcgcagcgggtaccagccccgggccagctcactccgaagccagctgggttctcgagggtcccgcagcccacccggcttcggtggggccgtcgcaacccaccccggtccgtggtccgcccgccgccctccctcaggccgcagcggaagcgtgagagagtagatgcgggagaggcctgaagctgcaccacggcggagacacacagtcacgactaaatccgaggcagagagaaagcgggagggtgccgttgtgacaacccgcagtgtcggggtagggatgcaaaagggaccggactcacctcaacaccaacgtccttcctgactaaaggaaaaacgaaccgtgctgtagccgcgcgcaggcgcagaataagagtgcacagcgagaacgcggcgacggtagccgaaggagttcaaaagacctctagtgcgcccaccgcaggtgacagccgaagttcatttcgtggtctgcttctttcctgtgtgaccttgcaaaacgggcttgacctccttatttatcgacctctttatcttcttagtaaattgaagatattagtcgtactcatacacagagtcccaaaccatgtgcacaaaccgacattttaattataaccaaccttacgcgaataaccgtttggcttgggtaaaagtgaaaaagctgacttctaggagctcacagcccagaagatgaaaaagacaaacagattaataccgatcccatgcagtgg

SEQ ID NO: 51100 - DNA, 1575 bp, Homo sapiens
agggcgttttgttcttctatggtggaatacatagaacggagggcgggtgagtagacagcgaaagctaccaaaatctcttagatttaagagggagttgttcatgtagctaccgtcacactaacctttgctttaaaacaagtaaacggattgggcgagggatgtgacagtagcctatcagagaaggggccagaaagcaaaaacaaaatcaagagaaaggtaggaggcagctgccccactgccccagtacagatatcaaacaatttttaaaaacaatctggaaaagtgtttttctacgtgaaaatcattggtgtagtcgattcttctatgttcgtccgagtaacggctatcctagtacttctcggacactgtcatctcggtttttcttctaaccctctacccttctggaaaagtgttactttgtaccactacattagtcagaaacacacaccgccttgtacttgcataactgttaaaatgctctgctttcctgcaaaattaaaatagctggggaccaggcacttaaacccgtagaatctaatagacagaaagcccctgctttaccgcctttgcgccatccgggttgtctggccacgcctggggcggaaggggcggggagtaagagagagagaaagagagacagcactgtgcgtcatgtaccagcgccggaagttggtctcgacacctggactagccgggttgtatttggaaacgcggagtgagtttttccgtgctgtgtaggtaagcgaattggcgggttggggtttgtggtggatatttgggccaaaactggaaagacacttggggtaaaaaggtccggtatgggggtagagttgagagtggctggggatacggtccatgctatcgctcttttccctattttcttttagtttagatgtttagccagtaggagttatttcattgttcttccctcggtgagcctgttcccctgttgagggatataattttttttggctaacttctgctagagtttgggaaaatagaacttgtgttaaacgagaacgcgagctttacagtcagatctgtatccctttgacttttagtagctgagtgatcctgcggaaattaacatgtctaagtatcggttgcgtcctctgtaaaacaagagtgatgtctcctaggattgttatgaagattataatggcctaacacgtatgaagtagttattatgtccagtttggggtaaacgctcaatacttgtgtgtatgcgtttcgtccttgagacctaacccataggatttggggaaaggaacagattaggaattggatctttgtagcttttcctgagaaaaatgggcccggatggacttgtgagaagcccttttgagatattcagtatttgagtctgtgatttcaggggctaacaatggacacccagaaggacgttcaacctccaaagcagcaaccaatgatatatatctgtggaggtaagagtagcacttacctaaagtaagaatattttatttaagtttttttgaaattgttacatttattctttgcttaaatgagttactggtcttcagagttataaagtagaacactttagcaaccataaaa

SEQ ID NO: 51101 - DNA, 1129 bp, Homo sapiens
cacacacacacacatatatatatgtatagtgtagaggcagggtctcactgtgttgcccaggctggtctccaactcctggcctcaagccatcctcccgcctcggcctcccaaagtgctaggattacaggcgtgagctcccgcgcccggctgatgccagcgttttaactctacaacaaactgaaactcaaacgagaggaagtggacctctcacaccaactcttatgcccaattggtcctctgccagtgaaggcggggaaggtgaacctgtggccgtcggcagatctgcagatctgccggactgcgggtcggggcgtggcaggggcctagtccccgccccggccgtcagcctgtcgcctctggctcgggccgggcgacgagaccctccctcagcacctgcagtgcagccagagccggtgcggcggccgcgacttccccgacgcggggcgctgagaagcagtgagtgcctgtgtgtacctgccggccgggaatataggacttgtcgcatctcagcccttccctcccggagcgggggcgagaggtcgaggcggggaggcgaaggggcggtgggccgcgagggagaaggagcgatggggtggacgtccttcaaggccggggaacacgcggggctttccaggccgcgggggacggtggcgggtgtcggggcgcggtggcaacgctggagttcccgggtccaccggcgcggtcagccctggtgacccaagccaggggctggggagcaatctgagaccattgcggctgggctgtggggctccccagtcccggcaggtcctggcgccgctgtacatagaaaccgttgccacggcgggaggatgccgtttcttttcggtctccgactgcagggggcggtcggccctgtggatgcaggaaagagggtgcctcggtgggagagacccagcttttcgcgttagtaggcccgagcagtttgaactggaggtattactaagctggctacgaaatatgggaggtggatgtggatcaggatgatggagaaattaaatccagctaggatcgaaggttttcccaattagaaacaaagactgcaaacagaggtggaagagttctaaagtattgtataacttgttttttggaacttgagatggacattcag

SEQ ID NO: 51102 - DNA, 759 bp, Homo sapiens
aaggaacccacttgaagaaacactgtcctgagtaccaccaacctgtgacacctcttttggatttcttttctttctttctttctttttttttttttttaagactggatctcactatgttgtccagactgatgtcaaactcctggacttgagcaatcctcctgctttggcctcccaaagtgctggggcctctttgggcctcttgagctattttcatttggataccagagttctattgcagaagacacttgtggagcatgaactgctttccaggacatctagaattcctattaccctgtggtggttctttatttcctctatccctattccttatcactgggttcttccctttttctctttcatcacctttagcttcctttcttccctgttggtccacagccagatgctgatgtgataacatcatcatttttaaaatggaaagtgaaaaatcaataatatcaattgttttcccttttttagcagaatattatcatgtatacttggtcaaggacggataaataaaaatgaaaagtttattggatgaaacagttggaaagctacagttataataatgttggttccaagaaattttatgaatagcctaattcagtgataatatattgaacttggaattgttttttaaaatttaatttggaaatgaaatttatttatatttttctagaaatgtaagagtgaacagacctaagaaagaatgggaaaggactgattttccttaaaataaaaggaacagatgtctccatt

SEQ ID NO: 51103 - DNA, 1192 bp, Homo sapiens
ttgtattcaagtttttgcaactccattcaaaaaagtacgtattttgtaagctcacctggacaggtggacttgatgaaggggatggctctgagatgccggttttcagccacaggcccttcagcgcttaaacagttagagacagggtacgtttctggccgaaacccgggagccgagtcctcaggaagccgcagggggcctcgagggagcggactgggccgactggctctagaggtccggcagcacaggctccgcccgcaggggcggtgcccgagccggcttccctagagcccgccctccgcgtcctgcacccccgcggcctccgcggcctccgcggcaactgctcccggtgatgcaaaccctcacttcccgcatccacttcctcacagagcccgcggagccggcgggagccgcgcgcgccgcccagccgtgcgtcatgggcaacatccagaagaagctgactggcaaagccgaaggcggcaagcggccggcaaggggcgcgccgcagcggggccagaccccggaggccggcgcggacaagcggagcccacggcgggcctctgcggcggcggcggcgggcggcggcgccaccgggcatccgggcggcgggcagggcgcggagaaccctgccggcctgaagagccagggcaacgagctgttccgaagcgggcagttcgccgaggcggccggcaagtactcggcggcaatcgcgctcctggagccagcaggtaggtgcgccgcgccccgccgcttcctgggcccctcgcgctgcggttcacccgacctccggggcccccgtgggagaggcgctgccgcctcctgaatgacaggcgccggcatcgctgcattcctcccaggtgactaagagcgccgtgccacctgacctcagtgagcagcacctgggaatgccggcatgttcccggccaggcacgtttgcctccgtccccgccgggttttcccttggtggctgttgcgggtagcagctccgtggagttctgcatgatcagtctgcaggactgcagtgccaccccaccggagacctcggccgtcttgtaattctggtgaactgtgatcttgctaatggattttaactgtatttaattaaatgtgatttttaggaagtgaaattgcagatgatctaagtatcttatattcaaatagagcagcatgttacctaaaagaaggaaactgcagt

SEQ ID NO: 51104 - DNA, 1588 bp, Homo sapiens
gatcatggaggaattacactttaaagaagacaaaacctgttggtctatcctactagtgttttactcattcccctcccccatgtcaactacatcttaaaaagtatacaaagagcaaagaaggagcaagttaggagaagaaagaaacgatacaagcaaaataacaaaatgtatcttataagatataatcgattcctgttgagactggagggtattaaaacacttcctctgatatttctcagaattagaattctaacgaaagagctgtttagtctctgatcatcatagcacatgatataaaacaacgataattagagatttttggtttactgaagacttttgactgcatagtagtttcctggggctgctgtaacaaactaccacaaactggttggcttaagacaatggacatttctcttacagttctggaggccagaagtccaaaatccagctgggccgtgctcccactggggcttgaggggagaatgtgtcctttgactcttccagcttctggtgactataagcattcctcggcttgcggttacatcactccaatctccgcctccatgagcacactgcttcctccttttctgcgcgtcgtcttctctgtaatgggtctacttgtcccttacaaagacacttgtcacttgattttgaggctacctggataatccaggatgatcttatctcaagattcttaacttaattacatctgcaaaacccctttttccaaataacatttgcagattctggggattaggacatgaacatatcttttgtggggttaccatgcaacacactaaaatatggttctggaaatttttgctaaggacatcagtaaggtatgctaaattatgcaaaaatctaaaggatatttaacgtttgtgcataattttaaaaatgggccaggtgcagtggctcacgcctgtaatcccagcactttggaaggctgacgtgggcggatcacttgagtccaggagttcgaaatcagcctggccaacatggcaaaacctcgccgcttgtaaaaaaaaaaaaaaaaaaaaaaaatgattagctgggtgtggtggcaggtgcctgtaatcccagctactggcaggctgaggaatgagaatcgtttcagcctgggaggcggagggtgcagtaagccaagattgcgtcactgcactccagcctgggtgacagagtgaaactctgtctccaaaaaaaagtttttatttatttatttatttttatttttgagacacagatttgcttgtcaccctgcctggagtgcaatgtcgcaatctcggctcactataacctccacctctcaggttggagcaattctcctgcctcagcctcccaagtagctggaactgcaggtgcccaccaccatacctaggtaaatttttttttgtatttttagtagagacagggtttcaccatgttggccaggctggtctcgaactcctaacctcaggtgatttgcccaccttggcctcccaaagtgctggaattacaagcatgagtcaccatgcctgacaaaagttggttttatattaaagggtatggctataaggagaaatctatttgatatggctatgtatacaac

SEQ ID NO: 51105 - DNA, 3799 bp, Homo sapiens
tatctccagcttactctgcgcccagcacttgactagggacttttacatgttatcacaaatattttgccttcttttccctacttggaaattacagaaaactacatatctcaaccatctgtgccctgtagattaaaaacgacaacaacaacaaactatatgtgttggagaagggggagaaataatctgaaaccaaaaaatttctatataaatctaaataagtgttcaagatacaaactgccgcaacaaaaaaaaaaccgtggtggggagggggtgtcagaatcttccataatatacaagtgattatttcaaatagttaaaacaaaaagtttgcttttaattacccatatttaattctaaacaaccccataacaaatagtatccttcaatccaaccccaataaaatagaggtgacccaagtgtcttacatcctcaactgcaaacatactgctttacgacttcacttacattcaaatttgggaagtgcatttactttccaccaagatgctaagtattttatttattcatccattttcttgaatgaagtatctttaaaaataggaatcttagcacctctcgtgtgttaggcagaaaataagtttcagtcaagcaaaatacatcaaaaactcaagaaatcaccaaaatttgtttaaaaatcccaacactgtctggttgacagtatggacagttctttatattaagtctactgatcaactgaggcatcccctaaatgagaaaacaaaatttccagtggccactatttggtactaagaattgggttgtgcttcaactcctaaaatgatgctgcagttttaaaaattaatcttactggaatctcctggaagctaagatagtgaaaaaaatacactaacattagttgccaactgtaattttttcctcaaagacaccttgcgatgacattaaaatattttccatggacacgtaaaatttaaacttcagttaaattttatacagtaatttaaaaaaagagaacattaagcagggcattaaactaacaaattttaaaagtgtttttttagcataatttggtttattaagtcccaagacttaattctaaatttttaccatgaaactgtaacaaggaaagaacatttgaaaatacgatcatcgccattttctaaatagagaagtatttacattttaactcaattcagatagttcagtcagtgttaaagaagcaaaaacaggcaaacagggtaatggcttgcattataaacagaagtggtaaaatgtgtattaagacgggtaatggcaaaactgaaaataaaacttaaggcaaaccgtcagacttcaaacaaccaaaactcaatgaatctaggttaaaataagaaaagatattttaaaaaaatgaaaagaaccatgttctttaaaaaaaaaaaatgtggaatgtaaagatcacaatttaagacaaccgatcaaaggaaagggctgctttaagcctctactgtttactaacacttaaaattagcatttctagccaacatctaggtttgaaaattgcaacggcacttaaacgccgtcttttctaacgtcaccccaacagaacattctgcaacactgtggacagtaaacattaagcagagtaaagcatcgttcgtgtatttatatctccaagggtcaatgggaaaaaattaaacgtttctctctcccatatatagccttaaccactctcttccctctttttatttactgcccttgtcgcggggttaatgaaccctaaacttctttttcttcttcccattaatggaaatgggaaaaaaagagcaactgcagagtggaacccagataagaaaaactgaaaattcaaagtagtagtattacttgccgggcgagggctgggaacaccctaaaggcttagcacggggagacaatcccggaagacccccgttaacacatacttcaccccaaggctacaccattttggtgtgatgtgtaatttttgcttttgaaggaggtggtagcagtcccggactaaccttcctccgaacacagctcccctccctaaggccccaggcagcacggcttgcggggcgatgtcccggctccaaatttgcagcgaggcccggaaatcggtcccgttagagccgatttcacccgtcaggaatgcgttccgcccccgccgcctccccgcggcaaccgcccttgggtctcccccgctttaggggcaggagacagctcgaggggagcgccgcctcggcccgtcataatatcgccgggccggccgccggccgcacaggcaccaggaggacagggcttggggcggatcccacgctccacctcggcccccgcggcccgggagacgcccgcgcctgggccgggtaggggacccggagctgaccgaggcctgaccccctaagccggccacggccccgagcccacgctggacactggaggagacgcctttcccaccggacttccgaatccatttctgtcccgggcaggggcgctagggctgcggcccggccagagctccctgggtcgtaagcgagagccgccccttctctcccgctccggggcgcaagctcctccgggtgcccgcccgtacctttaactcctcagagcggcggcagcgcagggtggcgggcgagtaggcccatctcccagcagcggcgacagcagcctgaggaagcgcgggggagggtccctccgatgcgccgaggcgcctctcaaccggggcggagacgacggaggggaggagtcccgacggccgctttcccgaactcctcctccgcagttgtggctcgacggctgctcccgggaaccagcgccgcaactaccacctccccctcccgcagcccccgctttcccctcctcctcctcccacttcttcctcccgcccccggccgccccgccccagcgcgccgcccgcgtgctgtgcgtcatggcgtcacgcccaccgggcccgctgcgggcggctctggacgcggctgttcccttgcgcacgttcgttccgcgcccgcgcaggagccgccccgctgcacccgggtggccccgactgcggcccccacgcctgtccctggcggaggggacttcgcctcgagcgcgccgggcagtggggccggtgtctccctggccggttctccgtggcccagagagcgtctcctccaaggacaggtcggggtggctggagctgcgcccggttgaagggagttgccagactcggcgactctggctcttggcagtttgcccggcattattcattcctttgtgttctcagggttcacctgctagattggcaggccgagggagagaagtgccgggatgttgcagctctcggcgaggaaatgtcctttcccagaggacggcagcaccctgtgcgtctgcagccgccctcttagtgcacctgtctttgcagaggctgttaggaacagtacttagccacaatagcaagcctacgtgagggtttggagagtatcttccattcatctcttttatttcattttttttttactattttgcagtcaagtaatcagaattcctatttcatctctaatacattcctaattactttaatccagctttatttgttccttcgtctcatatcttttcagccagtcatatcccctttgaatgtttcaatctacactagtcttggtattcttagttgaataaacaaattccgtctgggcctggtgcatttcctcctggtttattctcttcaagatttagatcactctaacatagaatactgagaaacgaatgtgatagaggctggacagaatgtccatttgccatctgttacttaactaaatatatcactctcccagtccttgtttagtgt

SEQ ID NO: 51106 - DNA, 2770 bp, Homo sapiens
gaggcaggagaatcgcttgaacctgggaagtgcaggttgcaatgacctgggatcgcaccactgcactccagcctggacaacagagtgagactccgtttcaaaaaaaaaaaagaaagaaaaattttttataatttgaaaagctattgtgtaactaaacaacaaatgaaaacttgtattctcccccttttatcaataaggaaagcccactagggatgcaagatagatgcagggctattattacagttctccatgaagtcacaaggacttggacaagatgttgcaaaagagaactactggaattgggtaactaactacgtatgggggttgagggagggagaaagcaggaagaagagccatttaggggagaaaaataaggtttgtgttagacatgacacagtcaagctgatgctagctcatatatgtgggagcacccagcagacctggggagacatggagactgagctgcatatgagggtcattctgcttagaaactggtcactgaagttgtgagggtcagtgagaccatgaggggtactggggcaggcaagaggagaatgtaggtgagaagatcagagaataccacagttaggaggtggaagaaggaaggagggtaggcaaagggtgatgaggaagtgggcctgagaagtgggagaaaaatcacactattgctatattacagaagtggagggagaaaaatgcctcccatgaccagtaggctggcgagagaaaaaagtccttggacttggcaaattgagttcacaggtgatctttcaggataatacagcttcattagacttctgagaacagaagccggattgcagggggttgaggtatgactgattgcatagaaagtcagtgattattttcttttgtaaagtttgacttaaaattgtagtgccaaaaggcaaagattaaagtccgagtcattgatgtggaattagttttaggaaggctctttggggatttttgcaaagtgacaagtgaactagagaaaggcagaagagcctcctcaatttttttgtaagcctttgtagtttgttttgttttgttttgttttttttctggacagagtctcgctctgttgcccaggctgaagggcagtggtgcagtcttggctcacagcaacctccacctcccgggttgaagcgattctcctgcctcagcttcccgagtaactgggattacaggcactcaccaccactcccacctaatttttgtattttcagtagagacggggtttcaccatgttagccaggctggtctcgaacttctaacttcaggtgatctgctcacctcaatgcactttcttatacagtcccttatttcatcctcacaagagacttctgaaggcaccagcatttccatattacagatgaggacattaaacctccaagaagttatgacttgttcagcatgtcatagctgatctgtggcagcattgggactcaaatcctgtctccttgtccaccattctgaaatttcatttcagctcacagttgataagcagccttttaggcaatgcactagaatttggggtctgagggttcctgcttttggccaaaattgaatgggatatgtggttacttcttggagataaatattccatatctgttttggtgaggaggttgaaggaggggggaggatgagccaaaagtcagttggattcatgtggctcagaaatgtgagacaaaggacattcactttctcttaccatggactgtagctagaatagtcattcttggcagcagctcagtctctcagtaggttaacaagaatttactgagtatcagttgtatgcctgagtccagagtgcttaaggtacaaagatcaggaaagtcccattgagtaacagaacagagagtgaggcagagttatgatacaaatatacacaatcactattgtcattataaaagtgcttggaggaaatcaacagtcatttaaaggttgtttttaatgtagtttttcctctaaatgagtggatgctagttgaataagattattaaatgaatgaaagacagttaatggaaatatcctggaattaagcgggtttggtggggagttaaataaaaggcctagaatatatatgttgggagtggtgatggagagggaggcagggttcagcagaaaaaggaaggtgtctccaggaatgtggacaacatggaccaacgctcagaggtggtggagtgtagaacagatgtaggaaggcatcagaaggcagtgtggtggaaatgaggcctggggctggggtaagtgagacatggaagagagtgaggagagatcagtaaccagctagttaccacttttcttcttttccacatctctgacagacacacaccttgttcaggactaagattgtgatgactgttgtttgcaattgtacctaaattctaattcaggtacacctccaagccaattaacctagctcccctgatgaatttttactccaattccctgccctcttatcccatgaaaatcttgccgcagggtgagagagatgagaatgtgtccttgcatgtaggaaaattttagagtcaacatcaacatcattttttgaaaatatagtactttgtgcagccagtaagtcacaaaacattaggtttttgaatgtcagtcaagcaggaccctgtagtttaattttaaaacaaaagagcaaagaaatgtcacttctattataaagcactaattgttaccatcttatccttttgcaatctgtttaacagatatttgttgccttttattttgtgaagaaaagaaatgcttttgaaatctt

SEQ ID NO: 51107 - DNA, 452 bp, Homo sapiens
gggctaacactcctaccttaactatagccctggtggtgtgttccctgtaattttcagggtgtctgactctgtgtatgagaggcttcccatttcagtttgactctgatattagtggtccagccataattgctgttcaaatactaagaggcaggacagggatggaatgtttgacgtgggagtgacatccatttattcatttctgtgaatgtattagtgccaggtatttcctcaggcctgttatctctaatggtctttggactagttcaaccctcattgttaagattaggaaggaagtcatgttgcccaagttgattctgtggctggcagcagttgggtctctttccttctttggggagatcatcagtgcagcaggggctgggtatagaatattgtgaaggaggcctctgagcatataggaggctctgcaccagcttctgtagttggagcctcag

SEQ ID NO: 51108 - DNA, 5093 bp, Homo sapiens
cctcagaattcatatgttgaactcctatttcccagtacctcagaatgtgactgcatttggagataggacccttaaagagataattaaagtaaaatgcagtcataggggtagaacctaatcccatgtgactggtatcctcataagatgaggggataaggacgcagatacacacagaggaaagaccacatgaagatgcagggagaggccagccatccacaagtcacggagagaggcctcaaaagacaccaaccctgctgccacctcagtcttagacttctagcctctagcattctgaaaaacaaatttctgttgttgaagccaccttctctgtggtactctgttatggcaatcctaaaaaattgatactgatgaagagtctatttctaaattacatgttaaacagtgcaagataaggatgtttctgaaagttaccatgtttgttctgtttctataattttcttgcatggggaaataacatcaactgcatgttctgttctctggccctaagctgccgtctgtgggatttggccagcctgagttaggctgtggatggtatacagacacaaagatcaggcggccgtggtggtaaccaagatgccccagggcataaaatcaacagtgtaatgatttagcatttgttatgtcaataccgtgctggttagagcagctagcctgggataagcacatcagaggtaaatcagagtgagctcatatttaaacaccactcggttagaacaatttccgtttttctccaagcagagctaaagatgttgtttgttcacttagtgttattatgggaacaaaatcattaaactgtatagattttattttccttaaaccagatggaatcctgatttcattgggaccgaagataataatgtccacatgaactgctgattgctcttggtggataactcccctaactccacgtgactctttccttctccctggcaatttgcattctttctctttcctgcttccaagcctatccttggggctgctcatctgccctttgtgctgctttctttcccagctaggcaaggtgtgggcacagggacaaccctgacagccccggaatccaggccacttgaatccttttgtcctgctttcattcatcccgggttcaccaaccctagggacagggaacaaggacttccccatcctcactaccttcggacctttctgcagccatactgaagccctgacggctctcttgctgatgaaaagcaacttgtccattgtcacggaagggaaaaaagagacctaagtcattaaaacatttatccccgaagttttgggaggttggctctctgtaagtgacaccagggtctgtgtccgtaaattggagatggtaaaaggacagagtttagcatttccatgtggttgggcaactgcagggtccacacagagagtcagtgcctcctgacgtgctgcgtcccaggtgccctgcttgcttgcctctgcttgtcctgggacgtgccctgtgaccattccccgcttttggcaatcgtaacaaggagcagctggcagggggagcgtggtttgcagagtcccagctccagcatcccagagcagaggtggattagtgctgagaaacaatagcttaacagccagcacagtcacataggctctgtcgcttagtttgaacctcatgacaatcccgagaagtagagcaggtactgtcatccccatgactcagctcagagacttgctgaggtcttgggaggagatctggagctgggcgtcgagtcttctgagtgtcctgatgtttcatcacccctcagatcacgccaaggaggcagctgcctactcagctcatccacagcctggcctgatcccctccctccgtcaagaatattgtgctgtgccacgctcttaccaaacccagcctgcacagtcttactcaacccctggttgcatctttttcttgtatcctacaacatcaatttcatttacagataacttttcttattgctggatatctgagggctgcccgaaacgtcctgagcactttattttccagagtagggattagcaggaagtcttttatttctgccagcaggagccacctgaatctctctggcacaatgactgtcatgatctgtttcctactgtatcttgcatccagaaaaagaaatgcaaaaagtacaggttgcaagtacaaatgccaagcctggatttttcccaactgggaagggccaaacctgaaagtcatgcccagagtcctggtggccactataactttgcccgcctttgctttgtagaagtagtttggcctgatagaagctgccaattaaaaccataaaaattgagccaggcgcggtggctcacgcctgtcatcccagcactttgggaggccgaggcaggtggatcactggaggccaggagttcgagaccagcctggccaacatggtgaaaccccatctctactaaaaatacaaaaattagccaggcgtggtgcctgtaatcccagctactcgggaggctgaggcaggagaatcgcttgaacctgggaggcagaggttgcagtgagccaagatcatgccactgcactccagcctgggcgtcagagcaagactttgttaaaaaaaaaaaaaaaagacataaaaattgacctaaggcctgttaggtgattatacattgattttatactttgtgccaaaacctgtcagatcttggcctgcctgtctccagcttacacaattgggcgcattcctcagtactaggggttggctggggcaacggtgttggggaaagaaaatgaagaaaaccgaggcgttttgtgctgagcctctcaatctgtgtgccagcgttcttgagcaactgttagagaagccaagtccaggcggtaggcggtttatggggctcggaattccccctcgaggttcccatggagactcccctgagagagctgctcccagccgccccaggcgtggaaggaacaggcagagcttggtaaaggaggagagaaggtctcagggatggcagcgtgggagcccaggcaggtgacccccgcgcctgccttgttggggactgaccttgagaaaaattgttacttcaaattgttactcttgctgaaaggggcgtttctgtggtaccctctctctggacatcaagtcagtttccctgggaaggcctgggggatcctgagagggatagggtgttctctgaaagtgtgatttcccctgccggtcccagctgcttctgctccagccacactcttcaggactgtcagggtctgggctgaaggtggctgagaagcgggaaggtaggcacggctctgccacaagttctccttcaggccctgactagctattggtagtctagttgttggtagccattggccacccggctgccatcccagccacaagccccacagacccaagaagacaccccctgatccattcacatttggagtgggaaggaagaccaggttggttttcacagtaggacttaactgttgtgagaatggaaatgtgtggattagaggcaggaatattggtgcccagttaccctttgagcctatttgttcattcattcatttgagtagagctgctgaggcctactatgtgtcaggttggatgccaggccctggagacagaaaggtaagtaggccaaagttactgctgagcccaccgtgaagagacaaagcgagtttaagcgatgacagtccggtgtggtaggcgctgagatgggagcctggcccacatgctctgggatacattggaggatgggctcccaactcagtcacacaagacagggaagaattcctggaagaagcagcagtgaagctgaggccttgggcttggtttaaaccccagactcccacttggtctgtctctacagcccatttcttgtcctatccacatgtgctcctctgcctctttcgtctgctgatttccatccctgtccaccccccatatcaagcctcttttacttctaaatctttgttgagtgttgactctgtgcactgagctagaagcaaccattacctcccagcaaccctatgagatcatgaagtcagaccacctggcttcaaaccccagctcagccactgcaagccatgagatctgggtcaagttagtgaacctctctgtgtctgtttccctaactgtacagtgagcctaatgatagtacacactccacagtgttggtgtgaggtctaaatgagttaatatatgtaaaatgcacagagagacatcagggatatgttcagagctgcgtgtgtgttaactaatattgtggtagcctccactttatagatgaagaagttgaattcagagaagttaacaatttatccaaagccacacaactggtaaccggtcagaggcaggatttgaagtcagggtttctgacttcatgtccaaagttcccttttccatgacaccacagctgcctctgatacccttttccatgacaccacaactgcctctgataccatctctggttcagagtcctacctgcccctgtggccaaggtcgtgacctcctgccgtgctatctcagcgctgtcccaccaacctattgcagcagctgagcctggtcctgtccaccacagcccacgtctgagcactggaacacacaagagtttgggccctcaagaccactctcagcctgagccctgcctattcaaactggctgttcttgtgcagagaaggaagcgggtcacctcagtggcaggaagggagcatcaagaaggcaactgagaaagctgcagtgttgaaatgagggaagtgtcaaggtgtcatagtggaggcatggagtggagccaggcaggtggagtgaggctaataggtacacaaggatttcaaataaaggcaaactttccccttttggaggtggtttttttgttttgttttgttttggagacagggttttgctctgtggccagggctggagtgcagtggtatgatcacagctcactgtagcctcaacctcctgggctcaagcgaccctttggaggctttttaatgtgactttgtaatgctaactaaggcactgagcactaatttcaaatggaaattcctacaattatcctaaatgttctcataacaacccactagatccgtattaagtctatcctgtagtcctttc

SEQ ID NO: 51109 - DNA, 4384 bp, Homo sapiens
ctccaagttctgtgcttgccccgtgactttggagagatgtttctttttaagaatctgcttcctcatctggaaaccaagggaaattttacggttttcctctgaggggtatttttgagggtagttgtagaccatcttccaagtacaaagcctcagatatgcagaaagagagctggcatttcagaaaatgtggagctcaagtgttttcaaatccattattatttccatctaggagcatttttttaaagaggccaggttagttccaatggattcaatactgtgttcatccactcctgaataacaataatcaaagttctttatttatttgagtttcgtttgagatgtttcagcccattatccttcagctgggccactgaacctacactcagaaatgagaaccagctgactaaataaatagttgcatatggaaaagaagtaggaaacacctttccaaaactaataatattaacaaacttccaagagacacacaatccataattagtgactatttggggggaaaaaaagacacaaaccttggaatttgaaatgtgattctgagaacagcctggtgtgttttttcttgctcagaatctgtccaccctttttttttggcccctttcccttctgacagccacattaattcaaattctttctctacatgtctgtagattgcaaatttagatactgggattcaatacttcttgcctgaactcccagagtcgccagtcgacaaaggcttattaaaaacctcagtaagtcatgtgaccagacagaactgattctagctcagcccacaggaagggtagccttgctctcagaaaccaaatctctggcaaggctgcctttagggtcagattcagtgacattggactccatgctggggcagacccaatcggtgtgcctaggccaagattcagcaggccacagatgcctggggaatgagcttgacctcctggagtcactccttaagagaagcacccagcctatatccctgggttgtcccacttccaacacagcccatataatgctgaaattcatatgccatttactaacctgtgccagatcatcatatcaccctcccctctttctctcaagtgtggtagaaatggctagttgacccctgaaaagtcatgatctccttgactccttgatctgtatagtatgaacttgctgttgagaagcaggtgactaaccagggactccatttcccagcctctcaacccaccccatgtccttcactctggccagtgaaataagagcctgagagatgtgtcactttctggctgaggtggttaagtatccagtgtggctttcctcactctcttccccagcttgtatcactaaaggacagaggcctggatccctgagtagctgggtggaggaagagcccaggactgctgcctgaccaggaatgtctgattagagtttgtgtgagcccgaaatacacttttgtgttcagctgttaatactgtgggtttttcattgcagcggttcgctgtgttgactaagataatgcccatgcagcatttcctaagcagcgcatcctgtgatagtgggattttcccctgctcctatctttctttgtgcagagaacaccagtgctgcccacgtgccctgtggtcttgtttgagtctctgtatacctctctctccaccctcccgaatggaacctcgctttgtgaggaggcagtagagcatgggcagaagttacaagcgtagtttctgatcagattgcttaggttcaaatcctgaccccaccacttacaaacatgtgaggccttgagcaaatggcttaacttctctgagctttaaattctctctctaacagagggagagtaccttgcagagttgtcatgctgaataaacagaacagtgtaaagtacctggcacataatcaacatagtaaatattagtattgttagatggctgttacctactgagccagcttcagcataatagatatgcagattgactgcaaccaatcagcatcattgccactcttctttctcctcctttcttctattcatgtcagtaattcccaccagtaatgcacaacagttttctttcatgggtactggtgtttcttctagctctgtaccatggtaaccaccgaccttctattctgaggtgccacaacaaatttgaaatgtgtaagtattttttttcagaattagaaagtagggtggattccaaggaagtggcccctagtgtgtgctggatgaacgcttacctgctttggtagatatctggtcctgctcaggaacagctgtcctgatgggtcagcgctgccctccctgcctcccctcagggttctgtgtttccagctcagctcttgggagctttggtaatgcagaaagccaagtgggtaaaaggataagaagcacccagactagtattagagagggtttccccaagatttcagaggcaagagaagctagggcatttgtgggttaagaaggaagcagaaggaagagacaaggagggctgagaactgtattgcctgacatccatcttctttaggatggccgagaagtacaaataaaggccttatgtgatttctaattgctttttggtggctagactgtctttcatgtatcatggtcttattctgagactggactgtgaagccacagcttcaatagggttataacgcttttttgcatagattgacattcatccatcctataagcagatgataaaccttatttgagaaattaaatgaacacagcagcctttgttcagctgagtaacaggattgaggggttccatcgggggcaacaggtgtggcagagcagtgaaaaaggctggcacattcccagaggaggcagcagccccaaccttgcttctagctttctgaatattgaacaggcaaaggccagcacagacagcatgagacagacatctctgaccccatagagtctcgggcattcacctcctaatgctatgagtaaaccagcgctgccatcagaacgtcttggctattggcaccagagccgtgactgtcgccccatttcagattctggttagaatgcagataagttcacagtttacaggctttgaagccctaactgaacctttctccaggacctgtttgcaagtggctcttccatgataagtcctcctccactgggattcttatggatttgggcccagaaggactttaaaggtcatatagcacaactcctttatttgagagaggagggcacttgaaatcctgtggcttctcctctaacacatgctttgctaactgagatggtaacagaagctgaacttggccagcatgcccaaggggctagcatttccgtgggtgttagtagtgaaagagaaacatgttcactggggtctggggtgctgagacttcacagccgtgggctgggatggcctggaaaatgggctcccttcctctaggctgatggtctgaattgcctctgaatggagggcatcaggggtccatttggtgctggtgtcacagagctgcatttctgttcactctatcgtgacctgccggtggcttcctggaaaaggctgagctaatcctcagcaatccttagcatgagagctcaaaggtgactgatgtttcacaacaggagactcggtcctttggcttaagtcttcatcctctattacaatgcaaatatccttgaacaagaggtgctatagtgggagagtagagaactggatgctagtgccaattctgctattggctcctgggtaaccgtgggcagcattctcacacttggagcctcagcctgtgggtcacaggacactatctctggggtacctgaaagtgctgctaggattctaacgtaactagagaagaatgaatgacccctcacacttgactgtggtccttttccagagagcagcttaggagaaaacggatgtggagagtcattgggagactttgggctctgaaagggaacttcacaacctggctcagggctgcacaacacaggaaaggcagtgctcatggctcagagcccaccagtgctgctggtctggacagtgacatcttgagcccttatgagggggcagctctgttcccagacgtgtgtcacccagagtccaaagcctctgtcacttcagaggaagctggagagatgattctggaatagctcctctctcctgtgtgaggcaaggaataagtgagctcttaaaaggaaaggtgcccagcctgtaatcccagcactttgggaggctgatggggatgggtcacttgaggtcaggagtttgagaccagcctggccaatatggcgaaaatccatctctacaaaaaatacaaaaatcagccaggcatgatggtgtgcacctataatcccagctacttgggaggctgaggcacaagaatctcttgaatccgggaggtggaggttgcagtgagccgagat

SEQ ID NO: 51110 - DNA, 2483 bp, Homo sapiens
aacaaataaataaataaaaataaacaaaaggagaggtccccatcggtttttgtttgtttgttttaagacaaggtctctgtcgcccaggctggagtgcagtggtgcaagcatagctcacggcagccttgaacttctgggctcaagcgatcctcctgccttccgagtagcctgtagtcttggctgggactggacatggaccaccaagctgagctaatttttcaattttttgcagaggcgggggtctccctatgttgcccaagctggtttgaactcttgggctcaactgatccttccaccttggcctcccaaaacattgggattacaggtgtgagccatcaggcctggccccattgggttcttgataattctttaatcaagcaattgctccccaaaagttttataccataaatactcttgctagttttctccaataaaagatgaaatggcttctcttttgcttgacttcggagggcccattactgtttgaatttgaatttgagctacccccacttcaggcagaagaggagtctttttagtctgcatgagggagagctgaactgtgttaggcaagagaattttgttgtagttgatgttgtgcttaatattggtggatggtggatattggccttggggccccttaagcaattgaatgaagcagacacctgccacgtttcctggctgtccagcaactttttaaactcacctttgctctacttgggaaatgtcctgctttgtaagtcctactttcaccaggaacaacccagaaaattcagtctgcaaactcctctgccattacagcacaagtaatatgagctgggttctcccaatcaaattacctgtgggggacctggacttggaagtgaggaccttacagaacccattttgctggcaaggcaggtaacagaggtttctttgggaagaaatgtggttaagatggcatcagtggagttgcctggctgggagcttttgcccgggtggcagctgcttcctcatcaggacagggctgtagcatggatttggacatcgttctatggaattgcttctccaggctcccgctaagtctgtgagctagccaattcccttcccataaactcctttatttttgattaccagagccggcctttgtggctttctgttgaaagcttcgaaggattcaacaatcaaccactaactggacgactcctcctcacaggcactctgtgccctgaggttgccacagcagcaggaggctcagccatacctccaggagttccccttctcaaacctcattcctcaccatttctttcctgcctattcactccaggcctcccacatggtcctgttgagtttatcccctcctgttgccacactaacggccactctgtgggaaatgcagtggttttttaaaaccacctgagtcgcctggttttaaagaatgaacctggcctaagggaggcacatatcctccattccagagatagagaccaggtgctcttccaggatggcagccccccaagaatctgcttgggggtttcaactcagtttccaaatacctgggccatcattccttacacagagcctttgatatcttcttgcttagataattcaccactagcccatgctagaatccaaagaaatgtccagttaggtaatttttgtttgtctccagtgagaagtatttccagaaagtaaacactacaaggacagggatgtgtttactgatgcagtcatcctagtgtctagaactgttcctggcacctaatgaggtactcagtaaatcactgttgaataaatgtaggaatttatttaaactgcaatctgccagataatggtctaaaacagcggtccccaaacttcttggcaccagggactggtttagtggaagacaatttttccacaaacagcagcagggcaggggtgggtggaggggggatggtttcgacatgaaactgttccacctcagatcatcaggcattagattctcataaggagtgagcagcctagatcccgtgcatgcacagttcacaatagggtttgcattcctacgaaaatctaatgccactgctgatctgacaggatgtggtgctcaggtggtaatgcttgctcacctgccactcacctcctgctgtgcagcccagttcctaataggccacagacctgtaccagtcagtgacccaggggttgaggacccctggtctaaaacagactgaaatagaaatgaacatcacattgaaaatttggtatgccttaagagcttcacacacacaaaaaaactacagtgtatctatccatctgttctagaagtctatagccatggagggggaggcccagtgtatggtctttgtggagaagatgggctctttttttttttttgagacagggtgtcactctgttgaccaggcttgagtgcagtggtgcacttatagcttgttgcaaccttgaactcctgggctcaagggatcttcccgcctcagcctggtagctgggattacaggtatatacca

SEQ ID NO: 51111 - DNA, 6159 bp, Homo sapiens
ttttcacaagaatgacacttatggacagtttccttcttaggacgctatgctgagagcatctcccaggagaggagtaaatgttgtccctagctgattctgtatggaagctcttgacctggtctgcttgtgttccattctgctacccaaagtcaaacctaaaaatacaaatctgaaattatagccagcaccagtgtataaaaaaaccaagaaccaataaaaccatttccacttctttgccagaagagaaagtcatccccaaatagaggatatggatgcttaggtttcaaagaaaggccaagaaagggtaacccagcacagctgaggcaggtttttttttgtttgttttgtttgtggtggggggggtaaggggggtgtggggtgtggagtactgacttctcacactcctaagaggttgctaagcagggcatcttattaaatgcccggcaatggaaatcagccaagtgttcccagggagggggccctctcccagtcctgggctcccctaggaaaacagatcttaacaaagctcttgattattttgccatgtccatgatttagcactttttcctggcgttggaaaacagctgagaacattgagcaagtcctttttgctcatagataattcctttagtttggttcttaccacttgtttgaaacagggactggctccagcccgttccttatacggatggcgcctctaatttggtttcagtttgatttatgccaggatctaactcactatggagttcaactaagaattttacaaacactttttgatgctaatgatatgtgtctcacaatctagacatctggacttaatgtcaaacaaatattacccaccacaaaaaccagttggatctgtttgtggttacttcagccctgagcagttccttctttaaaggctctgacctgataaagtagcttttggccccatcagcctgctggctaggtgagataaagcgatccctgaaccatttgctcctttttctcagacctacactctgaagctggatggcccagcccctccccagcacaaaaacattgtgtgatcctgtctgttgagatgcttttctctgggccagattctccacataagcaatgcaggattaggatatgatgcttgtttgcttggagatccaggtggtatttggaagtggcttgcacaatcacatccctatgggaacttacctcccatgtgcttttgggaaagtttcccactcaactccatccaccctgaatataaaatagaggtcacagtggttgattcaccagcattttctaaccaaagtttctttacgctgtttttatattacccacaatcctattacggcaatcacactcactatgcatagaaagaatcattaaacctttttcatgcaagatctcgtttccttctcataactgccctgtgagctgggtatcactgttacttaagtgggaatgggtagggaaaccgaggaagatagggtgggttagcttcctcaagagcacacagtttataaataacagagctaccactaacccaggtctgtctgatccccaaattcatgttcttaatcatgaccctaggctgcctgtcaagtcagggttaatgatagagaaaagaaacccaagttttatagaactgatacgagttatgtgacatgagaagctcaaatgaatagttcttattcattccgagatccctctcttggggtcatctttctccttttcccaggatgccggagggcatgggactccagttggaggaggtaacagagtgaaggtgtagctaaaagatgcagagcagtgggaagggaggaggaaagtagagggtggaagggtgcttcttcgggaaattcagggagtgaaggcctctgaactgcataaaaggggtcaaagatcatcagctgagggatcatcttggagtgaagctattggtgctgccaatacgaccagtgcttttactgtgagttccagaatgtccagccaccagcacccagacacctgcgggggttgtgacagcagagtggcctggtgggcttcatggagggggtttttcagtcctatattgccctggccttagcagtctctgagaggtttatgctttttgagtgtagattagactccctagctctgtttccacccatactcctccaacagaaactcacagaaacctctcccaccctttctgccttgaccacacagcaaaggactccccagaaacagcccgagcttgttgccagtgaggcttaagagcagagctcctgctgcagcagggtctcagattaccaagacttctttcccttgtatcctcattctgcaggacatttttagtggcttataagttttagtataaataattaaaactaggttagccttgtcagaaaaaaacagatgcagcatgagctatcattcagccttggagggcatgtgtgttttgtgtttcttgctgattcacaaacgttggtgatgcacaggcccccattccaagggtcacattcctgtatctgttgcacatgactgtgagtttcattcccttcaaccaagcagctacctggacctggggcaagctggtaccgccagtgtgcccaggggcagctgtgagctgtaaacccatgggtctgggttaatgtttgctgatgtttatatctttcctgataggtggatggaatttgcctaatgattgtgtttccttgaaaagttaatcaatgtctaagtgagccagtcacagaccacctcagaagtacaatgacgttggactcccagcacttttcccccaaggccatgtccctggggtcagagtgacaggaaagttgcagtgagcaatagatgtgaccagagggacctgggggctctcttagtggttgtctcttgcacaccttatgcaaagctctggagtccagatgtaaggggcacacccacaaggcaaaatgtggcctggtccaccagcactcccagccatagccctgctttcttcgggcccccttatcactttaaataggggacctctgtgcccacgtcatcaggccttttcatcctggggttgtcagccagaagggaccccttccttcctgcaaacatatctcaagcatgtatgctgtgccggatctttatgatactgagaggaagaaagtggatgagatcccagccctcaagctgctaatagttgcgagaagggaggcgaaaaggcagttacaatccagggcactgggagcttcattagggagccaggggctgtggagagcaaaggtgcagccccgaacacaaccttggggattggggaagccactcagaggagaatgatgaagtctgagcagaacctggaaggcagatagggagttaccagcttggtgaatgtggtaatctccaaaacatctgcatcctaatcactggaacctatcaatgtcaccgtatggggcacacagaacattgcagatctgactgaattaagggttttgaggtaagaggttgtcctggattatctgggcagccctgaatgtatcaccggggtccttagaagagggaggtagaagaagatttgaccacagaggaagagaaggccttgtgacctcactgacagagattggaggggtgtgctttgaagcaggaagggcccacaagtcttggaacacaggtggtccctagaaactgatgaaggcaagaaaacaggcttcaccctcagagcctccagaaggagccagcctggccagcaccttgactttggctctgtgaaactggtttcaggcttctggcttccagaactctgacctactaaattgttatttgtttttgtttttgtttttgagatggagtctcactctgttgcctaggctggagtgcactggcatgatctcagctcattgcaacctccgcctccccagttcaagtgtttctcctacctcagcttcccaagtagctgggattaaaggtgcctgccaccacgccccactaatttttgtatttttagtaaagatgaggtttcaccatgtttggccaggctggtttcgaactctgacctcaagtgatccaccagcctcggcctcccaaagtgctgggattacaggtgtgaggcaccacacctggcctgttttgttttaagccacaaagtctgtggaaatttgtaacagcagcaacaggaaactgatccagtggggtggggccagggggatgggcgtgacccaggaggagggaaaaacagggccacaggctgggcatgacacatcttgttacccatgcaatgttggggtcagagagtgtagagagtggtgtggggagagtgcaggctgaagagttacctaaggtcaaaatcctgacctatgagccaagccatcgatttgggatttctactgaggacactggaagtcactaagagcatctgaatggtgagtgaggaagatgccaccactgtggggccccagttgaggagtggggaagtgggatcacgctagtcagagaggccacaggggaggctgtcgccaccattcaaccccagatctgtggctctagagctccactagagttccaggctctcctctgaagttccgaggacctagggcaactccatttcattccataaactcgagtcattcttgacttgtatagggttatcccagtttgttctttatgatccttgcccacaaatgctgctggttaagcctgaatttttgagttagaaaattaggctgttcaggtggatttttccagctgtagcttgtgtggccagaaagaggaacctaaataacttgtgagagcagctgggcctgggactggcaggctgaaactcggggtctatgaagtgagttcccatgtctttactggccccactcagatacgaatctatggctgctcaggctgtctggtttttggatcctttattcaggtgccaagggcccagccagcatgcaagttttcttgtactcttctagatgcctgtaaacagaacttgccacaagggctaccaacctaaatacttactggggccagtcaaaacacactagagagtggctggacctgagaatcactggagagttctcctcctgcccaaaagcatttaaatccaaatgttcaaaaaatatatttgaggaacccattcagctttcagccaattttgtaatcctggtgagactacacccttgtcaaaatcatccttctctcacagtctcatcaggaggcaggtattttaaaaaggaaaccccaccactgtaggttttttttttaaaaaaaaaaaagttgatttgtggtatagggatggttggagaaggagcatctggttggggcaggtgttagcattttcctgatgtacaggccagagcattctgatatcagctctcactcctccagctgcaccagccaaggtttaggccatgtttaaaggacactttaataataagctaaaccacttagaaatcattggttcaatacatgaacttaaggctgggatatgtgaccaaggagaaaagcatttgagaaaacaggctttttctctgaggtaatggtattgtggtagcccttcaatcattaataaaagacagggaaagcttcataacaggatgtccttatttaacaaaatgtctgggggtgctctcagcctagtgattggaactcatgataaaattttaggcaagctcacttacaggagtaagggaaataggtggtgagggaaggtgatgacaatgaagtaaattagcaaagaacgagaggcttgaagaccacaatttatggcttctgtttatagttttggcatcttcagtctggcaaaaagtcagtagataaattaaaacgtaattttaaaagcaaaatccgttaaaactgtaaagaaagcaggaaggaagagcagggggaaaagaaaagattagacaaactaagaacaaataataaataactatatcaacaattacattaaatgtaaattgactaaaacactacaaagtcaaggattttcagattggaaaaaaaatcaagacccaattttatgctatctacaagcacagaacaaatataaagtcagaaatgggttgtaaatataagggtggaaaaagagatattacctaaattattttataaaatggaataggagagaatacttcccaatgcactttatgagatcatccaaacccaaagaagactgatacctgatacctaaaccaaagaaggctattataataaaagtaaattaca

SEQ ID NO: 51112 - DNA, 1880 bp, Homo sapiens
aaattgaatatttaggattcaaagtaaggctcagaatctgagcctttgaggccaggggctgttgtgcataccttttgtatcccagcagagaggctggcctgtagtgaatgcttggtaaatgcttgttgattgattgattttcacgagcatgaatgagcatgatcctcatggcccagtcattcccacttcttcccatgcttgtgttatgtgcatttcccagatacagcaagagtcccttcatttttggttgttagtgcattgtctgagggctatttcagccttttctgatttccttttggactttgacttatgagaaaattatatccagaggatttaagttttctccaggacacattcaaatacctgctcttcttttaaactgagtgatcccaggccccagtcagaccctgcaagaggctcaaaaatctaggagtccagaggacaaaggtcagctcatttccagcaagttccttggttaggcatgcccccctcaccttgagtaggtgagaaaggccatcccagtcactgattcccacaccattccactggaaactgggaggactttaggggcagctgtagacagaagccacacatgatgcctccaagcaggccaacagggcattgccaaataggctgtttgttgagtaagacttggccatgacctttgccatgggatagcctctccccgtgacatttatgaggaccagatcccctctgggagtttaccagccacaccggaagcataccaagggcagctgacataactctaattctagagaacaaaagccaaaattgcccacagaagttctgtctggccatgtcattgttaaaggccctcaaggttaactccattcgcttgccagtgttggctctttcttagcaaaaactcatctgtgctgacgtctgcctttcctgagtcatgccaagggtgtctctgcccagccgagaatctatgaacaatgagcatgaatgaaacagcttcttctgcctccagaaaccactggaggagccatgccatgtggctgggtgataactaaagtgtctgtctcctcttctttttctttttgttgatacagcctggacccacgccttcatcaatctactgtcagggatagattgtgcattttctgtgtcccagtgggtgccccccccccaaaatagagcagacaaagcctggcctgcgagggtactggtttagttcaacaaatatccatagaatgcccacttaggcaaaatggcatagggcagattgccaaaatcagggttgactcggcctggagccatgaagtgggtccaacaggtctctgaactgaggcaggaggccccaggatcccgaggtgtgctgtaaagcctttgatgacagcatcttgtgcctaacacctgaccacatctgagccactagagacagtacctgataaggatgcagatgcctgggccctaccttccaaagttctggctcagtaggtctgggggaagaccagtaatcttcattttaacaaagaccactgacggttctgatgcaggtggtccaaggaccacacctggagaaacttccacctctaggagcatctggggtaaaaacttcacccaaacttcctaaggtcacaacatatcccccccaacagaggaagcagtaacttttggccacagcccctagagaggggatttgcctggcgtttctatactgtcctctgtccaaggacaaagtgtgccttaccccacaactgctttgtggttaaaagcttctattgagggatagtttatttacttctagcactatgaagcaatatagtgaggtttttgtttcctttgaatcccagtcattttatgctgcagaaaatctagagtttttgccacagtggaggactctgcttaaggac

SEQ ID NO: 51113 - DNA, 2312 bp, Homo sapiens
ccagtgctgggatatgatgtgtgttacaagagagtaatgattactcttggtgagcagattctattatctgcttcttaggagcaataggtggctgcctcttgattgtattagtcctggagttataaaatcctcagtcctttacaatgcaaaagtgacacatggggcgagtaagcaggtaagagaaggagcaattggaggaagagaaatgagatctgtggcaggggctattggctttccactaaaacccattctctacttcttgctgggcaagaactaggcagtatttaccagcccctcttgcatttggggtggccacaaacgaattctggccagtggagtgaggggcttctcagacagcagcctgccccttccacactcctgttccccttgcagtggctcaaagcccttgggtgatgatggagccatagctggaagaagcctgggtccctgggtcccccgtggagcctccacgcgggaaggtggtctagaaatacacttccatatttcagccagcatgccttgggatctttttttaatggtggttcagcctaccctaactaaagctgggcccactcagcacgccccacacagggattctgaaatgggagcagggtccaccaaaactctgcttttcagagagctcacaccctaggggagtataaaagtgacgaggacactggagctggcaggcaagacccaggatgccaaaattagggcccctaaacacagcagggagggtgagctatcctcttgtgaggtgggaggagggtctccgtgagcagggctcttcttgggccaaacctggatcatgaggaggagggagagatgctgaatatgacatgtcattcaaagtgctgtctggaaatttgagttcgtttcttcagtagaggcagcacaggttaatcagacaaaccagccatcaacaggcttcctttgaggagcttggtaagaatggaaaacccagggctgaggggcttacagagcttacagagcagcacagtatcaggggcccaaggcaccaggagctcctctggaaattggcgggaacagctggagcaaagccgaggtgatggtacccctggtggcgggacggcagcgaccctccatggtataaggagtggtgagaccccaagggacagtgtgcaaggactctgatggcagcaacactcctctaggagctgatgagaaaggcctggaatcccaagatgcacccctgaggttcaactcctaccctgatcatctcctccaagattctgtgacctggggaagtcaacagtacatttcaacacctatgatgtcagcatgtgaatgacattccaatgctgctcatggggtcacccctgcaaaggtgaactcagtggaaagaccttgccaaaccggaaggaaaacaggatacttttctccaaaatactcattcaataaatatttgcttaggcattacaaagacaaataagacttgcccctacctgttagaggtatgtatgtcgagaaaaggaaggagtgattcaataagagaaacagcattcagggaagagaaagaaggaagacataaaaattcaggtcatattagaataatatatataacaatgagtttggctatatttcagaattttcccaaaatatttctttcaaatttgattgacattctaaactatttagcttgatataaatgagatctttgtgtaccctcagcaggaactgcattttagctggttttaaatctcaacaatcactttcctgccttggagaaggtatgaaccaggctgtttatgtagaatccaggtgggtttgagagcagcttcagctgaatggagagtgacagggaggctgaggaagggagggaggggacccatgggctgtcatacccggggacttaggaaggctcttgctcttgctggaagggttgcaaatccctaaaccaagtaatcccatccctaaaccaagtaatcccattaaaacatgaaacatccagagtaaaattaagtttagaatactatttgcaaagccaaacatagtcttaccataggatccaggcatcacactccttggtatttacccaaatgggttggaaacttccatataaaaatctgcacacaggccgggtacggtggctcacgcctgtaatctcagcactttgggaggctgaggcggatggatcacctgaggtcgggagttcaagaccagcctgaccaacatggagaaaccctatctctgctaaaaatacaaaattagccaggcgtggtggcacatgcctgtaataccagctactcaaggggctgatgcaggagaattgcttgaacccaggaggcaga

SEQ ID NO: 51114 - DNA, 3581 bp, Homo sapiens
atattatttggtgattaaaaaaaaagaaatgagttaaaatcttggatttcttttttttaaatgagttataaagccacagaaagaccttaaatacatattgttaagtgaaagaagccagcctgcaaagctacatctatacatgactgtatgacattctagaaaaggcaaaactatagagacagtgaaaacatcagggattgccaggggttaagagggaaggaaggatgaaaaggcagaggacagaggattttaaggccggtgaaacaattctatatcataccagaatggtggatatatgggctggggctcagaaaacaatacccccaaatgaatgcctcagaagcaaaagtttctcctgccctcccatccctgacctcattctcccccaaggttagccatagaaaccagaagtcctctttcccaaggtgggtcatagaaacttccaaaccccttttccccaaagccagtcataaaacctaaaaatatgactctaacttccacccccaccccaccacctttctgtgtaaaaatgtgtcataaggaaatcatctaacctgccttgtttggttgtcggtcgtaagacccccattcgagagagggccctgccccgtacccagcaggaagcaatgctgcccagagaggccacgaggaatctagacagggcttgctggggggccccactcactctatgagcattagctcattcccttttttgtccaatcacatttctaaatattttgttgcacctaagcttaaaagtgggcagagtcccctgcatctctgggtcttcgttctgaaggctcccctgtcatgtaacactatgaccaaatagatgtgtgtgccttttctcctattcatctgccttttgtctgttaattttcagtgaaacttcagagggtgaaggggaagttttccttggcccctacacgtgtcattacaaacccatagaatgtacaatgccaagagtggaccttagtgcaagccagggacattagtcagtaataatgttccacgctgacgcacaaatgaaagttattttatttgtgtgaacaggagagctgacatggtctgtattgatatctcctgggcagggaggtggtgagcacggccccagaattctgaactgccaggagccaggcagctttgcatcctggagcttggccaattcagccgcccaagttctggccatgggtctgcagccccctggcccttgcctgcataagcaggagatgaatgagaggaagcagaactcacacaggaggcaggaggaagccaccaggaagctcactggctccaggggcagcagatctgggatggggtcccagttctctccttcctcattcatgaaatggggcaataacagtacttacttcattggaggttcttggagggaataaaagagatattagttaaaggcatggagcacagtccctggcacactgaaaaagtttcataaatgttaccaattaattgtttgtattatataatgtcttcctgataggtttttgggaaggaataaatcaaaggtgagaaaatatatacaaaaacctgactgagcgagaacatagcttacacacaagaagtggcagcttggtgagcacactgctatgtcatgttgtgcctagtcatgacatagccaaggactgatacaggcgctcccataacccatggatggattcctgctggactctattcatgaaggttctgattctaatttttttaaatccatggataaaacagctaccagaaaatcccatttgggtttgcatgttgttctttggcttcggtggacagcaatcatatcagttgcatttcccgagctagagctctgaggcttagtcatccccctccctggctggcttccatgctgtctgcagtgggagcatcttttatgagatgacaggaggggacttcatggatgtgcagcctgggctgctggtactgccggggctgctggtactgctgggactgcaggagagggatggtttctattaatcctcacaatgggagggtccagtgggctgtcacagcacaggcagggaatcacaggcctccctgggtgaccagctgtcctggctgctaccagattcggactccagcaggctttccctgggggcagagatgaccttgatctctgggcagctaggcttcatgtccttgatatttgtggccctgcattgttggggcacaggatgcagagctggggatgactgagcttaaactcctgctgctatggagggctgcctccttgccctgaatgccctgggagcccttttaaaaacacaggtccaaggagtgataacatgaggggcagcacctctggcccctgagagagaaacttgtccagtgatatgtgcacaagcaacatctccaggcattccttccagacaaggcaagaggccccccaggtgtgatatgttagctacacatgggcttggtctgtactgcaaatgtgtactcagtgatggggccattagatatttggtttctacattgctgcgatgaaaatttacaaagaacgttcatggggaaaccagctcccatccatgggcagcagaggaatgttgtccaagacttacatggacaggtaagactaaggtctcatcccatactcagcagttctgtgaccttttacagaacatagggaggcaagaagggaaatgagccttagttagcctcagggagaaccaagccaggtctgtttagggtcaccaccttcactgaactgccctccactggaggctaggaactgcaggacatgagttcaacatcaaaatagtaaaaatagtggcaaatgtttagcagtgtttgcaacatatcaggtgtcacagcaacctctgcaggagaggtgagcagggctaatatttagcaggtgcacccttgtactggctgcctgccatttaataggttagtgcctcagctggttattgaatattttcaacatcggccctgggtactaagattagttcccattttactgattaggaaatcgaggttaagagagggtaggcgatttgcctgagatcacacagcctcgtgtgtggcagagccttagattccaagccaggctgtccgatgccagaccttcacagctatcctatgcttccacggcaccccggacttccccttggagcacttgccagtgaaacaaacatgccctggagaaatgcctgggtgagtgtgccttcttccttgcacagagacgggcctcttgcaccctctactttcctactgtggctggggtgaggtggcgggtagaagggcgtgggttgtagctcactgtcttcttcaggagtcccacagtgggtaggagcaccagctgttcaacaagagaagaccattaggcttcaggagggagaggaagtttttttgggaatgagaggaccaagagaaatgaggcacaggggagatcggccccaaggcttgtcctgaaaaaagaacatcatcttcttctaaggtcccgagcgtgggatttatctgacacattcttccacatgcttattgcaggaggagcgttgtgttaagtgctttgcatgcattaattatctcatttaaaccaaaaccaacccagtgtggctgag

SEQ ID NO: 51115 - DNA, 691 bp, Homo sapiens
caaactttcaggtttatggtagctattaaatttaccactaatatatctgcatgtcttcttcagtgatactatcaaaataaatctattccaaatacatctaaatatttttattcaaatagtgtcctttcataccatgtctctctggcccaaatttttctttttaattatattttattggatggtttcaggagtgtaattgaaatcatttaaagattaacccaagagttcttaatgtcaaagacctttatgtccacatcacttccatcacttagttggactttgcacacttagaacttaactccactgcccagatcttgacctacaactaccttttatattgccttacactttaggaaatatttctcatttattctctcaatctctccctcaccctccttttggctaccccaagcagcaagaaatctgcccatacaaccatccctaactctcttcagtcagcttctggttccttctaaggctcaaagcagatcacttccacttccaccaggaaagaaaataccttactcatccatgggacccggacataaagaagcaaggacaaagaacataagcctaaagttggggaggggcctagcaattggagaaaagactataatcaacatctagaaagaagtgagcattggatcaaatctcagtgtcaggattctgctaaccccaaagtacaacttgc

SEQ ID NO: 51116 - DNA, 1619 bp, Homo sapiens
gcatataaccatgaaaactaagcctgagagaaatcagttcaggctacaaatctaattgataaaactcttagacagcgctacatgtttggctagataacagacgcagggatactgaagtaagggagatgagaccaaatctcgctcagcctttgctagctttctgaccttggagaagtcagactctcggtgcctcagtttccttatctgtataatggaaatggtacctgatagggttgcttcaaggattaaaggtaccaggtatttaaagcaatggcaccgtgtctgacataaaataagcactgaaaatagctattactagaacataaaaataatccccacaccactcatattacagctctttaagaggctcctaggtaccaccgtcattttttaaagattgagaagcgctactattcaatggcatatttttaccttattatgttctgtagccaattccgaataccgtggaacgttacaaaaaacagatgttattttcttgaggtactgttgggaaaacctcagagagaacgatctgctttttagcactgcaagccaattaagggaggaagtttgcgattacccgagccctaagtggaaggtgtgcaaatccttccttttaacccgggcaccccggagccatgtgccattctggagagctcactcacaccccaacagcttgtcccggcgcctgaactgtgcgctcctgcaagcacacgccgcgaaagcaccgtctcgccccggccgagcagctggacctgcggcgtggcttccgcgctccaccccccgattaaccgcgagccagggctgcccgcgctgcccaggggttccccggaccacagccctaacccgcaagcgcaaacgagaaccctcgcaggcctctgcccggccctcgtgaacacacagaccgcgaagaagccatcacggacccgcggtcgcttcctcggcccggctccctccagtcgccgcggaaggtgtgggaagcccgggcaccctcgcccctcagggccccggccaggcctactggacctccagtgctacagggacggtgcaggagatatcaagtggctctagcccaggcgctgcccacaggccccgggccaagtacctgcgactcgaacgagcagcagcgacagcggcagcttcaaggaggcggtgacgggcggaggggaggggccagacaggggtagtcggagtccccgctgggccagagcggtctcgcgctgcagcccccggcgcgccccctgcaggtgggcggtcctcacggtggctcgggctgctctgagtcagagactccgggaaagcctgctctgaattagggaaagcatcaaaactgtggcttcagaagagaaagacagcctagaagaggtttatccgatctgagtccgggagcattttgcacttttcacgtcctattctaaattcacatcccatccccttagctaaatgggggcttcaaaggcaagggcagtttcattaggtgctataagcatcaattaatagttgctggcctctaggtaggtcttctatagacccgaaattgacatattaggaatagccactaatgattggctgcactatttctaaaatataaccctgcatttttacttttttcaaaagca

SEQ ID NO: 51117 - DNA, 1251 bp, Homo sapiens
aaatacatatttttgacttttgaaaataaatcagtgctctactattaaaaaaacaagaagaaaatcgtgctccttgcaacaacatggatgtagctggaagccgttatcctaagcaaattaatgcaggaacagaaaacaaactaccacatgttctcacttgtagatgggaggtaaacatcaggtccacacagacacaaagctgggaacaacaaacactggaggctccaaaaggagcgggggttggaaacctacctttcgcgcagcgcgtttgctacttgaacgacgggaccatcagaagcccagacctcagcaccatgcaatatactccgtctaacagagctgcgcagataccccccccaatccaaaattaaaatgaaaagataaataaatgaaaattaggaatgtttgattcccactgagcagtatctttgtatttgagagttaaaagacagaaatagctcttttctcgacagtacaactggaaataacccaaccaagccttttttgaatgcacagggcttttgaggaatgctttttcagagttgttttgtttctgcttttggtgctttttggctcctcttcctcagttgcgaggataccatgtgaattaagacggcgatgtcccccagctctgaagcagtcacagtggagccctctggaaaccctatcggagtaaaaggtcctataaagaagattttgtttcttcaacagaaatgagaaccgtagctccatggccggagaataaaggaaaggcgttttcagccatgccagtgtgcactgtaaataagaatgtggctgggtacgtcctgcctgctgagcttgtcttactattcaactatcggactttgattttggttaagtaaacatgaacttggggacaaccagcttttctgcatctctagtcagggagttgtaggcgcaaggttgagctggtggctctggcagtgagctggccaagcgaggtggcctggttttcagccaagaaaggagagaatgaatatatagtggatacctatggcggatctggcactgtggatgggctgtgggtcccacagtagatgtctctgtgctcacacagtcttacagggaagccagacattcaggaagaaagaacacaagtggattcgattccaagcgtgatccactctaggaagggcaagcacagagaaaaaggttgcctcttgaaagggagacaatggagtgaggcctgagtctgctgtttccacataaatcttatggaactagttgatt

SEQ ID NO: 51118 - DNA, 2977 bp, Homo sapiens
tgggccacttttaaaaataaaagagaaacttgaacttcttgcatgctacagataagactggtccagttggaattacactaaagtaacattttatagccaaagttgactattttataaagaaaagcccctcaaaacgacaggaactatttcagaaggtaacataatatactcgaaaaccaccagtactgtgaatctaagataaaatttgactaaaaatggtctaagttgcctgagaaaactggccttcaaagtggtcggctgccacatcccctcctcccactctgcccttttaatgttagagaaatgcttgatctaggggaaaccccaaatgcatgtctccggtaaattccattcctagatccatcagtcactgatgagttctgggaagtggactcacaagcctgaggaccaccaccacaccacacatcgccacaggaactttatcctaaggcctggtggctcccccaggcgactgggccaggagcaggagcagaagcaggcctcgggcctgcgaggttacagggttcaacacgtggtatttttcgagcacagaactgcacttcctccccaggctggggcgccggcaggagctccgggtggtgggagcgcctccacctcttacccacggaaggagctcagcgttcaacgccccagaatcccggggccactggcgggagcgccgcggaggaaccgaatctcacccaccctcccggcgcgtcatcaccctaaagtttgagagcgtctgaggccgagaaaatggtcgcaaaggaggaagtagccgggcgtgtggctgccggcagcgcgggtccccgccggctcgggaaacgcggctccagggaccccggcgccttcccgccggccgtcgcggggtgacatgccctcccgcccccctccccgggcccgccggcctaccccgcccgccgccgccgcccgagcctcatggccgcccgcccgcccggccgaccgcggagcccggcgctcaccgtccgccggctgctggaagttcacatacgcgtagcccaaggagcggcgggtgatcatgtccctgcagacccggatggagaggatgggcccggccgggctgaacttctcgtagagcatcgcctcggtcacgtcggggtggaggtcccccacgtagagcgaggccatggggtagctgggggcactggggttcatctcggcacggctgcccgcagggccacaggccgcgacctttccgtgagaggaggagagcgagtgccggggctgggggccggagccggggggaggggagcggggagcaagcgcagagggacaaaaatcaaccggaattgaaaactactcaacggccgcagaacggggtcgatccactgccgctggctgccggctgccggcggggagcgagggtggcggtgtcgggtccgggcagcgggaaggcctcggtctcttggttccttcttggagctgctgcggggccgcgggcgggcgggtcggtctcggctgcttcaccgggttattttataaaagaggaagaaaaaaaataaaagtctccggcgggggagacgcggattttttgtaaatttttttggggttttttaaaagatttttttagattttttttggattttttaataataaatgtgtgttccgagcccggagcacacactccgcactctcagcactaaccgccggggagaaggggaagcaccgcctcctgcaccctctacttataccccgcgccgcactcgccccgcccccgcgcgtctgacgccagggcccctacgcgagcgtcagcgccggagtaggaggagacgcggaggccagggggaggagggaagagaaaacaggaggaaagagcagagaggaagggagaggtggcggcggtggaggctgcggtgtgggggtggggctcgggcgaaggggcggggcttttgcgcaggcgccgcggccggggaagcggagcccgcgctgcgtcgcgtccgtgggggtggggaggacggctcgcgggcggtcctcgggggtgttggctgaggcgtccccgccttccgccccgcccgcccctgcctccaccaggaggagcgttaacccgtcaccgcggcggtgggcggtgcaaagggcttccgggttcctccgcgctaaccaccccccacgtgcgcggccgcctgtggcctcttcccgctgcggccggcccggctcctctagccccagctccgggggacgccgggcacgggtgagcgggcgtggtcccctccgggcccggtttccgaaacgtgcgtagatggagccagcgtggccccctgctctctcctacccggaccgcactacgagtcccagccggcaccgccgccacgcgcgtcggccgcagaagcggtgcctgctgggagctggagtccccaacggccgcggcgctcgctgacaccaactggctgcgcgggtcctggccgcccgctccgggaccccccaaccgtcctgcgcgctggaccccggcaccgctggagctcccggcgcggggttggggggcagggagagagaggggagggcccctcgggttcctcgtcctcttcttttccagcccgaccctcctccgtgtcttcactggacgttgtcgttggtcaaagtggctttaatttgggatagctgtgttgggggtctttggtcacttcttaccttaaggtgctaggctggaatcattgatttgtgctgcttctgccagacatttcttggcgatagaaaccaggagtggagaaaagtgaatgtttttcctgaaagtacgggtttgtcacaatcactactatatggcaccacagccctgcaaccagacaaaattaggaatagtctaaaacaacgtccttataaataactaaaacaattctgcacattagtagtgggttttaataggaatgctaaatttaacgaattgatagtaataaaaaccggctctaggaatgacattaaatcaacatacaaattccactcgaaagtagtaaagtgcttttac

SEQ ID NO: 51119 - DNA, 1063 bp, Homo sapiens
gattgcgtcattgcactttagcctgggcaacgagagtgaaactctgtctcaaaaacaaaacaaaacaaaacaaaacaaaacaaaacaaaaaacaaccaaaccaaaacaaaacaaaacaaagtctactatcactttgggatgacagggtatactttactgccatttagtgaacaattgagctttatcactatgtatttacttaaacagaaaccagctaaaccagaatgaaatcagctaccggaatccctcccacttcactttccacctgggctccctctgacaacaggtaacctttgggtgaagttggcacagaactttgagagacaggactcccaactggatgacatttttaacataaagcagctatggtagcgtcgccaagagctttctcatcaggggggccggcactctgccttgctctctccttcatccttccccttccaccttccattctatttctgcctctttgaccagctaaagtgattagttctggtgactctcattcatcacctaccattggcagactggggtttccctctaagggcagtggctcttgggaatggtctcggggactccccagaggtctcaggtcaggtcaatacggtcattcccttggctcttagctgggctaactgatagccttggtggcctttagcaatgacagaggtgtttttgtttgcatgatcagacagcatccgccttggcaatgctgaagcacctctgagcaaaccactcagaatggcctgatgtgaccttccagagggcagatgctaagtctgccttctctctccaccgtggttgatggaataaattaatggttgatagaattatagcagagtacacataactaacttaattttagcccctgaccagcacaagaacacaagagtcatctaagcaaagtggtgagaaggaaggaatccaggggctctccagaagaggaagggttttgtagtgagtggctaaggagtataaacactggactctagacatagggtccggctctactacttagctattaatttgggcaaaattacttatgttctctgagccttatctgtaa

SEQ ID NO: 51120 - DNA, 1838 bp, Homo sapiens
tttgcgaactggaataggagcagcctggagaattcatgcctcactgtctatgggggtgagtatggacatgcaggtatagaaagagaaaatgcaccatctggaaccattgagaagcaggaggaaaagttacagccgcaagcaccacaaccgtctgtgaacagatacaattttgtgtttcatctggagtgtgagtcatttcccactttcttctcctcatcctccctaaagtccaagtcaaccaaggaggagctccagatggctcacccacaattaggtcttctttgattgttctaggaggattaattagtcaccaccatgagtataaagaccaaatcaagaggcaatatggcagagggagagagagggagggagagacctgcctgctgctgaggcgagcacagaagggcctgtggattacacagatggtgtgtcattcaaactctcttttggagaatgccaacgtagggatgggccaggtgtgttaaacagtcctattcaatgattcatagtcctggctacaccctagaatcacctggggaactttaaaaaatactgatgcccaggccctgccctgagattctggtataagtggtgcattggagcctggggatgaatatttcctttttaaaagctccctggctggatcaatgtgcacttagtgaagaacaatgttgcagtgcttgcaatttatttgaactgcggtcagtttattgcatttcccaaagtatttgtcatctatctgcccagtcctgtgtttggcactacagagaaaacaaagcaatggaaaccagaaatagcaaaggatgtggaggagtccaaaggtttgggttcaaagtccaagtctgccattttcctgctgtgtgactttggggaagccaagtccttgagggggtggcatgattgtgaggttgaaagagaacaggactagggccaagggctctaatccttccacctttgcggttaactcgtggtgtcacttcaaagccagtcacaccacctctctagacttctgtttttctgtggataaaaggaaagaatgagactaggtcagtggtttccagatttgggtttgagagacagaaccttcatggtgcaggtgtttcttggttgaagggtgggagggcaatgagacccatcttagggactcctgcttctccttccaggaaatccctgctgttactcgaggggaactatttgaaacccattggactagaagatgtgctcccaggccccttgctgtgaagtcctgtggtcttgtctctcacttgctctggacaaacaccctgagcagtactttctgcacttaggtacttatgaatactttcacatgatgagcgggaatgggtcctggagcttgtccactgggcacattttccttctaagtgcattgctacttcctcctccctgacttcctcttgcatcctattattgattagttcgacttggcaagtttgtcgtaatttccaattctctctgccaagttcctcattccttgaaggatgagctggctttgaagacaatgatgcatatgttcactgtggattctagaaaaggggggacttcccagaatatgtgtttctgtgatttccatgacacttctctaccaagggccgtgggccgcctccctcagctctgatctgggagagcaatatctattcctatagtcaagcttgctccagactgcattaaagaaggaggagacagggtgtttcctaatcgatgatgcccctattaaaattgtatatgttgcaagctgttacagggcctgaatcagaaccaggagactatggccacagggggccatcagagttgttttcaacccctccgtgccagtttaa

SEQ ID NO: 51121 - DNA, 1962 bp, Homo sapiens
caggaaatgagttatggagcccagggtcactgagccgcaaagggacactgagaagtctagaatcttctccctccacagtcgggccttccccctcccctcccgcagccccgcactctgtgactgtctgctgtttcagtctctgtacatcagccccttccatgcactcatcagcttgtaaatgatcccgaaacggtggccatagcccccaagcctacaattcagataaacttctaatgcccttcgctttgtttttgtctgtttgatcactccctggccacttgtagagttaattcaaattctagagagaaacagcgctcggattgatccagctcagttcttcaatccaggccacccagtcactagtcagccaatgcgcattgccgtctttggctcaggcgaccgttccctgtcaggccagcagagtgagagagtctaacggggtccctcttccaagggcgcgggccaggcgagttatagaggaaggttgttttgctttgtttttgttttctaatctggtggagaagagacaaaaggagaaatgggaaggaaaacaggggcctctctggcaagcaagtcgcaggtgtgaggcccagaagcctgaacagtaatagcgcattggaggcacctgagaggctcagtgacggcgtcttcacccagaggcactattcaaatagcaactcgtgtggcatgggcaccggccactcagaacgggcagcggcagggacagcgggatggcaggaagtcctgaccatccgacctgccctgatgtgtcatgatgtttccttgtgcatgtgcatttttcatgaggcgtgtggccatctcttatcagcctttgtgacctcatttcctcctttttcaaatgagcacttccaggagcccaggggaagggttggctttggagggtttggccagggttggggggcacctccaggcccctgcggagtggacagcgcagttgtgccttccagctgctgcttaggtcttagggaaactcatctgctcaagggggcttagggaatctgatttgcttttccttttctcagcctttctgagcatagggagaaggaggaagcagttcgaatcccattgcgggctgcagagagttctggatgagtaagcaccaaaaacgtgggaagtttctgaaaagggtttctcagccagcagtgctttcaccccttgctgggcgagtcgctgccgtgcagtgcagatgactcatctgggtaactcccttgacagaaggagccagccaagctgcagcaaatgtgcgttggggggatggggaagaaaggaatgaacacagagcattccctgtcaccagacgctatgctagacactatgtgtatcatcttattaaatgatcccaaataccctgtgacgattccatcccagatactctggccccaccgcacaccttgggatccactacatgaacacttcctttcctgacgtccccagggcccacctatttcacatgaagctctggatactgtcagaaaaaaacatccaacacctggagataaggccaagaaggtggccggcacatcctttcaatatcgtaggtggtaacaggccacctttatgaatctcgcagtctaatacaatagccactagccaagtgtggttacagagctcctgacatacgccagtgtgaattgagatgtgctgtaagtgtatgatctacactgggtttcaaagacttagtatgacaaaaattataatgtaccttattaacatttttaatgttgagttcatgttgaaatagtatttttgatatattgggttaaagaaaacatcatttaaattaatttcaggttaggtgaggtggctcatgcctgtaatcctagcactttgggaggccaaggcaggaggattgcttgagcccaggagtttgagaccagccttggcaacatagagagaccctgtctctacaaacaaaaaacaaaacaaatagccaggtgtggt

SEQ ID NO: 51122 - DNA, 4590 bp, Homo sapiens
ttgaaatgcagaagtgctgcattttgcttctagccatcataatgtaattggatgttaccactcaagctgtcctttaccatgactacccatctaattctctttccctcgcattttagtttcctggaccttttcgatttacctcagctacatttttctggaaagatacccttttgcaagttgccgaacagcacaaagatactaatccacacagtgacaccacagaataaatgacttcagaggaaaatacacaccctgaatgaagtgcacttttaagttagaaggtgaacagaagagtccaccttggcagctggctcccgaatattaatcatcttttaccttcccagggaaatcccacaatatttttttaaccaaatgagagaacaggtcgccacattttaaacaaataattaaccactttggatgcaaggtactggctcaatacgtaaactatttaacctttatgacggcattattttcgtcaggtctctaaattactgatttttcccttaggatctcagaaacgctctctggttatttctgcttctaacaaaaaatgatttaagccagtacaaaggattctctccccaatcacttcggtacaagaggaagtggataaggtttctcacacagtaacgagtgctccaaggcctcgcctctacactgcgggcaggactcaccgcacccatttaacccttacctgacttgagacgtcggttactgtgaaacgaaaacgggcagacccggactttaaagtgcaaattctccggtccgcgtatcgcaaccacccccctccaggctccgcccaagtcggagccacggctcaagtccccgactctcctcctttgtcatggcggatctgtgtcagggagcccaacctactgcagagtgttaattcctccccccgaccggagccagagggaggagcagcccgcgcccccgcccaagccgtgggggggggggagagatggggagcgaagccgcccgaccccggggcagagacgccacagcagcccgcagaagcggaaccactaccagccccgccgcggacacaccccgctctcccacccagcgccttccccgccaccgatcagcgccggtgaccgtgtacagcgtctctaagggaccgacagctgcaggtgggggaggggacgagagccacacccagccgagcgggccaccagcggctatgctcaggctcacccgcccccaaagcaggatatgcgtccccaaaccgagcgcagggaccctccagttctagtccatcaagcacgggagccgactgcgggctcaccaccctgttctctaccccgacctggacttgcagcccccgtccacacctcccccgcccgttcacaaggagcaaaaaaagtcagacccatcccccacccccaccaggaaaattcaagtccttcctcccaccgcggagcccaggaaattcagctctaggtcccaggcgagccccaccccaaaacctcaccccgcagtggactcccctcccgccggcgcgcagcctcgccccggtctacctggcgggcgccgccgcgccaggcctgggctccggcccgctctcggccaggcctttccctcgcgcttgggtccccgaggcccccggcccctccccgccgcgccaccgcctcccggggtgggggagggccgggtcccgccgccgcagcgcccagcgcggaggctgcgcgagggggagggaaaggagggggcggccgagggagaggggagggggcggcctcacctgcgccactgcgatgcccgccgccgccgccgccgagtcattatctcgggcggaagcgagaagggcggcgagggagggggtggaagcccgcagagacaagggtggggatggatcgcggccggcggcgccccggccatgcctcgtccaccttcgggagccggcgacagggagatccccagggatctcgcgtgtgggcgccctacccacccccgggggcaggacgggggagcgagcaccgatcggcgccggggcgtcgatgcggaagcaaggagccggaggcggccgctagccgccctcccgagcccagcggaagaggagccgccgcccgtgtccgctgaggagactccgcctcagcccggcgccgccaccgcggggcgagtggggatgaggggacggagcgaggacggctcccacgcgttcggaaggctggcctgggacaggaagcgaggcgcggcggcggccgggttcctcacctgtgtccggagtgggtggtggcggcggacggacgggctcagcagtctctgggcggcggcggcggcagcagcggcgaggctgagactctgtccctggatctcgctgctcacaggctacagccgctccgcagacacggggtttcctccaatcaccagccccggcagcaggggcaccacacgcacgatgacgtcaaacgctgctatggcaaccgttgattggtgcccacagcgatcggggccccgcgtaaccgccgctccccggcgctcgtcctgcccgcccgcgctggagggcgagcggaggcgcgcgcgtcctcgcccgcagccgccactcctcccaccccgctcggcttccagctcctctacgcttgtcccgagtgcacctagggcaggaggctgcttttttccttttcctccccaacgcaaatcccccactcctcgccttccctttgggtccccaacgccctctctctccctctcccctgcagcctctgccggcccactcttcctctcagccggcgggaaggcgttctctccctacccccaccttagctttcgctcagcccgtctgcgcttgccccagtcactccctctggaaggggctcccgttcagcaacatccgggacctttcacatccccccacccctccccgaggcccggcccgccccaccctccgtgcttcgcggtagtaactgccccagggccgtccccgggcaggatgacaagggtggctcggcggctccggcattgtgatcaggacttgcggggcgggggccccggggcgggggcagggcgcggtcgcacggcaagggagggttgtgtgtggtgcgctgccccccgccccgcccgccgctccccttccccggctgggccgaccggggcgcgcggcccctcccggcctccctcccgccgccgcggctttacctgctggctcgggggaagcggtcctagaccttttatggctcggaaacgggagtgaggcgtccagcccctgagtgtggctgagtgatggggaggcgttccaatcgagagcgcgggatctgcgctcggtgactgcgcgaggggacaatgggtgggcgccgaggtgggggcgaggtgggccgggccgggcggagccggcaggaggtgaggcctggaaggaggcgcggccgctttagggaagccagagttccgaggggaaaggacagccttctcgggcggagggctggagctggtcctggcagccttgacccggagacaggcagtcaggcgtgaccgcacggacccgtttctcgtaggctaggttttcctacccaaataaagctttcacgtgaagacctcatactgcacatgacgatcattacctttttatctcctagaagcaaggtttgagggacgtcgtagtccccagggttccagctggcggtgggagtgggccacaggccgggtgatgagccgggacgggagcccggaagaaggggaaggagaaaggcggaaattgcaggtgcctgaaccggtagggcctccgcccagttgacttcaggaagttcagagagaaacattcacagtgtgaatgatctctgccccttccctctttaaatgtgttcgggctaagaaaagattagtgcttggatgacctgcaaaaccacttgcaacagccatggagagtgtacggttagcaatgagagagcttggaactcttcattttactcttgtgtaaactccccattgattcttccaacgtatctttattgagctgaccagagcctccgtttagcctcatgttctctacagaatttagtttctcagtagtagacacgaaatgattgagtcctcgctcttccagtacattgtctttcctacataatacagtggaccacaaggctgctctacaaattactttttgcctgacatgacagctggcatttagatagtacagaccagaaagagggtttccagtgaccagttatattttagtgggtttttttgttgttgcttttcacaagttgccaaatcacagactcatggtaggttaaatggataaacaaattggagttttatttctgagatgttagggtcaactagctttgactcccaagtaaattcttttagggcgtgactcacttaaaatgagtaatatttcaaaagctattttttttacagttttttcgtaggcaccagaaatttgacagaggatactaagttaaacgtttttttaaaatggaaattgatgtttctttaatgtctcaaatatatgtctatgtagagtatatgccttttgttttagaggaagttaaggggtttttctgtataaatatggatttacttcaggaaacagctaagttaggcttttgcctcatgctttaatagcaaggcattttttagtgcaacaat

SEQ ID NO: 51123 - DNA, 1209 bp, Homo sapiens
ggatagtgaggatagggaggattgaatgtaactgattaatatcttagaggcgcaatagacaaaacttggagactgtgcacatgttgcagggttaagggtgaggccaaggcaggggcttgggcagctgaacagattgtgacaccagtggtgaaaatagagaaaacaggtgaaggagccagctgggtgttaacgaatgattttggttttagataccttaagatatgatcccttcagaacaatagcttggagatcaccgtcatcaaaatatccacttgcccaaatctgtagtccccaggcccctggagcaaggcctgctgccctgggtgtcttggcagttgttcaagcacgactggaatctggcttagcattaggccaagtgagcacagagacttgcactgctgcatatttaaaattacttgtcaggaaaaggagctacagagaagaggggctgtgacaggggaaggcaaacatccgcaccgttcaataattcagcgcagagccggtcttggctgctaagttaccaccacaaggagcatttttaaagtcaaaccgaatttccatgagaagtcatgcctgagcaagctggatcgttgccaaaagacaagagaagactccagacctttctgtaaacaggccctgagagatacggggtactgcatgataaagctgtcagtctggtcgcagcagcctggcatgtgactcatttgcatatgtcacttcctttagcgtaatccagtccatgggcctctaacttccaatcctgtgggcaaataaagctgtccagcacaacctgtgacgatcagattcaggctgtatttagtgggggagggatctggcctcatatccttcatctttatgctgctccactccagctcacagcccctccaactggatggagctcttcgaagggaggggcatttcagaggagggtctcagggatagcccctttgtggggctgggccaccaggttggggagagtggagctgctggaactctggagggactggctgagccagctttcccagtgcacccctctgggagggcaggctctcggtgtaggctgcccatctcctcgctctcctctggcactgctcctatgcccccttggttagcctgggagcccatactacccagacttggggtcaataagcagaggacctgtaaggagtccttgatgggatgtacagcactgcccaaccctgcacaagg

SEQ ID NO: 51124 - DNA, 454 bp, Homo sapiens
ctctcgttccttggtcccctctcccacctagatcctagaccttcctgttactgagaactgcaaaaccttcataacttcttcactcacctcccaacttctcagctctgcccactccttccagaaccccagttcccgctattcctcaactggattgtgacctaaagtcaccaatcctaccacattttaagtgtctctcatcactctcatgttccccatttcccgcttacccaacataaattccatggtcaaccacccttacaatgactcatattacacatgagtcattggaatggtgagtgcaatgtaactgcatatcaaatctgtaacctcacaggcacattaactccccaaccctctctcgccttgtggtgctcacaaaattgcagtcctggttgaatccaaccctctgtttatttcatagctgtctgactcccccatctcagcaatccaaccc

SEQ ID NO: 51125 - DNA, 2211 bp, Homo sapiens
tgctgcttatttcgggtggtactggataacacaaaagtacaaaggaagagtttagaagctcctaggggactgctgtagaggtttggcctgtgcttagaaacacagacttgggggactggtgactctgggttgactcccacctttgccaactgctagctgtgtcttcttgggcaaattcctcaacttactgtcattcagtggtacccatatgtggttaacacttctgtgttcatgcgatcttctacaaaatcaaagtgaagtgtaccaacctcctgctgaaaaaaaccccaggggcacttattaaatgtaggtttcatggctttacccagttctgctgaatctcatcctctgggaacagcactgcagaatctgcatttctgacaaggcttccagatgactccaggtcagccgactcagcctgaacccccgtacctcaggcaggtatgggactggggcagcagaggaactttttgggccatgctgctacaggtctgtcttggagctttgcctcaagcccctggacgggtgattagagcaatgagccctttgggggcggcatcctcagggctggcggctgcaagctggctttctgcgtgagtgctctgggtgaccatcgtgacggacctgcactgggtgagggcggcctgactccccccttccctaaagggctttgtagaatagaagccaccttcccctggcttttgtccctgccaccgcatcggactcgccagcttcaggaaggggcctcatccttccgggcggggccgtatggccgccctcgggctctgcagccgtgactcagctcgggaaggttggcgctcaggcctggagcccggggctgtgcgggcaccaaacaaagcagcgctcgcacgcgccctcccagggccgcgccacacctgcggggccgccttgctcgtttccctccaggagccgcgctggctgttgcggggcaggctgggcccgctgctgctgcagttggctccgcggccgcccctagccgcccccagccgcccccgcccggtgagtcacccgctcccggccgcgccgccgcccggcccgctctcacgcctccgagcctgcgcgcaccgctcgccgagccaggttccctcggcaaggggcgctcgatacgggcggggatccccagaggccgcggccttccttggctgccagacagacagcgttcccaaggaggaaacccctgcccctccgtcccgtcgcgcgcacgggcggaaaggacacccaaactgtcaccgtcctgtcactgtgtctccccgcctccctgatgctggtcacaccctcctgcgctggctctgtctcgggagggggtggcaagtcgctggtggccacctccccccactgccttcaggatttccccttctcgggctgcctaacgcttctcagaggtggctgtccattagaatcattgggagctgtaaaaattcctgatgcccagaccaatgaactcagagccacgggggtggagcccgggcaccacttgcattttgtgaagttccccaggtgactccactgttcagccagagtggcgaactacggacccagacctaggcttcccaaactctgatgggtttgaaatcccctgggatcttgttaaaatgcaggcctccattcagtaggtctagggaggggcctgagagtgcgtatttctaacaagctccccggtgatgctaccgctgctgggctgaaggtgacatttggagccactcaacacccgctggccctttacctctcctcttgtgtggaaatagagagggcgtgggcgctgcagcagatggacaggggtttgaatcccccctctgccactcgctagttaggcggaattgggcacagctctttgtgtataaaatggggtgggggtggggagcaacactcactgcacgtttctagtgaggaggaggcgagatcttgcctggaagattcctggtgccctgagtccttggtgaaggtcagctgtattggatgctttcgctctctagtggccctcttggctgagttggccagggaatgacagaagcagaggaaggaaccttccaggccccctcctttcccctctcataggaaaactaggctgaaaaccatcacactccactgcctccccgggggctggaagggaagggcagtattgctgtgtgtgggagcagagggatgggggaccaagagccctgagcgtccctgaggaggttagtgggattc

SEQ ID NO: 51126 - DNA, 1907 bp, Homo sapiens
aacctcaggtgatctgcccgccttggcctcccaaagtgctgggctgggtgtcagcccttgctctgtggtgcccaatagggttaatgacatttgtgtggctgtgcgtctcctctcctccgaatacactgtgctctctgaggcaggagccctgaaggaagttctctgaatcacctagcacatctagggcagaagccccctcagtccttgtcttttgcttactcttctgggtctttttctgtcatccagatcttgcttttgctgtggaggaagaagacaagaaactctaaaggaattgaaaagatgagatacgatctgaacctgaagaagtgggcaatttgtaattgtcagagaaacagatgtgcacttccagcccgtgctgctgctgctaaggtgcacccactcacaaacccacttctctgagcacatgactctgctagctccatggggctctgcagggaaggagtgagggagggggaagaggcagagagctgggttgtctgaaagctttctccaggtcttgcctttctcttccctggaagccaatgcccgtgaggtcatatccatcacattacctcagagattgtcaggatggacccagttccatcactctgaggctgagggtctgccaaaccccattgaggctgtacctgggaaaccagaccctgcctgtctctttaggatctgggcgagtccatcctccctcccttctcccccatgaggcaccagtgtcctgattgtatcacagcttcaaaattccctgactcatgccatcctcgattttagaaaagagcttattcaagtggtgtaggctgcacactccaccccctcccactcaattcagcgattgaattacagcacctgtgtgtggcagaggggccagggaaggaaggggctggggaggcggagaggggctcctggaacaagagggagaggcccttgaggcaaacttgtgatgatctcgttatgaaaggaatctcttggtgcccaaagaatggctggcctttaaccccacgtgtgggctggttggaaatgaggaagacctctgaggtcatccaagtctgctagggaaatgcagccgagctgggaaggaaggtatcccctacccccatcacattctgatctgggctgttctcccacacttttaggtagccaggctatcatgtgatttgctagtaaccatagcaacaaaccttgtttcatgaagtatatggagagcaatcccacagaaagagatccgtgttgtgctttacccaagggcagcttgcctccaactcagtctgttctccattactgctgtggcaattgttgttgttgaggaaatggcagtgatttgctctttctgagctggagacattgtggatattgttttgttcccctcctgctactcgtctccctattttggagcacagtctgtgaagacgaaagacaaaaatagctctctccaagggaggggatgctaatgcattttctgtgctttcaaagactggctttttgattgtaaaaacctccacctccagtaacttaaacctggtagcaagttctgctctctgaccacaagagaaagcactcgtgacagccactggggttcacacactgctgtctgccatgagaagccacagagaagtggtctgtgctaggaagactgaacagcagtgagcgggggtgcacgcccacccaactgcaggcaccgccactctacggctctcaggcagagctagaggaagtggctcagatattctttgttgcaagcgaagggcataattataatttggcgaaacacccgttgttaagtgatccagcagccagcagacaaatgactgctgcggaataatgtctgagcacgcacagcgggccctccgagctgcccatcaatctgccttcacagagacaagccagtcaggtgctgc

SEQ ID NO: 51127 - DNA, 2902 bp, Homo sapiens
tagtgtggccagcaaacactgtgtttggcggggtagtttgtccagtagccccacctccattctctccccagttttggctggcttccaaagggaaacgagcacattcaataatgaagtcgtgatttgtatactgggaaaaagagaaaaaaatccattaagttcactgaaggtgcaaatgaagggtgaagaagcatacacagaagtatgtatatatttatttatcctaagaaaatatattaagcacctgccatgtgcaaatgatttggcaatgaataatatagatgtggccccatgctctcatagagctccaagaggaaagactcacagtgaaacagaggatactgagcaatcttttcccttgggtagatgaggtgtccactgagtttgaaaggtgagttggtaacagccagattggggataggatggtagagaggcaggggagcctcttgggctgaggggatcccatagcaaagaagaacgtagctgcagaacaaccagcagagcacggagtgtgactgtgagttgcacacagaggctggaccctggcagaatttgtctcttgtatcaagaaacctggactgcagtgaggactttacacaggggagaaacacagtcagatttgggttttagatggattcctccagctattatgtgaaggacaaatttaaagtaggcaaaactcccaacttctggggaggcttaatagtcatcaaactgttgacaagaaagtccccaacaaggtcaagggtccaagtgatagggaagaggcaactgtttgaagaaatactctgaggggtaaaatctcaggacttaataactgattggctttgggatatgaaagaaagagaataatactccttgcccgccccctgtgtatgcagatgatggatggatggtaggctaccaactgagatggagaacgtagaagaaaaagcagatttgggaggtgtggtggctcttgtcttgtctatctgggaccttgtgcacttctggccccactttgataatggaccccaagaagtggggtcatgatccaagccaggcctgtcaaattcactcctgggagcttgaatctatacagtgacctggttctcacccaacagtcaccaggttattcagtgatccccttgattctaggaaccaccctgcagtccttccaattaataagctagttgggatcagtgcctgttgcttgcaaccaaagactcctagtggacagatgaagagttcagttctggatctgatgagtttcaggcccatgtgacatccctgtgatgaccagcagctccaggaagtatgaatcacagaggaaaggtctgggctggagttatcagcatatgaatcatggttgaaactaggaaagcatcagaccaccaagagagagaatagcagtgggcagagggtggagtccaggagaacaagtaaaagctgaggggaagaaaacaggagaaacgggaaattaaatggtcagagaggccaaggagaaccaggagagcaggatttcctagaaaccaagaaagtaagagtttgaagaatgaatagttgaagattttacatatagccgagaggctaaagtaaactaggggctgaactttggacttgaaaagtagtttgttgatgactcatggggcaatctcaccaaagggaggaagatggaagccaggctgtgtgaggtggcaacgtgcatgggaggtgggaggcgaggaattggagggagtgggtttgggcagttttaaatgagagatgaaagagacaagacagtcctggggggaggtgggatcaagggagggcttgtgttagtaactgcagtaaggattagccagatgcagaagccttccacccaaaacctactaccgtgtggtttgagtgaatcaggacttgaatggtaatgataaccccaaccacacagagcactctttcccaggtgggaattttgcctgctgtcagatgcatcatgactaagtgctggggggtgggaggggctgatgagaattttggaagtatatcagctggtagatttcttgtgctactcatgcctgacctagtttctagacaggacaaaagcaaaacaataacaataactaagtgaagaaaaagaggacaaattgtgtttgttcttttgtattcaagttaaaaatccgctccccaccccaaaattcaggaaaaaacaaatgtctcagaaattagtattaaaaaggacaataactgctcttaggttagagtatgagaatatattcctggccaggcatggtagctcacgcctgtaatcccagcactttgggattatgggcggggcagattgcttgagtccatgagtttgagaccagcctgggcaacatggcgagaccctgtcttgacaaaaacataaaaaattagccgggcatggtggctcgtggttgtagtctcagctaatcgggaggctgaggtgggaggatcacctgagcccaggatgttgaggctgcagtgagccgtgaacgcaccactgcactccagcctgggcgatggagcaagatcctgtctccaaaaaaggaaggcttagcttggctgcttccttgtgctgattaatgtttcatagatatatttattggcaaaggatggatgaaaatacagttgaactaagacaagtttttaaaaaaattattaaacatttattgatattataaaatttatatttgctcattgcagaaagtttggaaaacacaggaagacataaaaatagcctgaagtcccactactagtaataacattttggaatatttccttctaggcttttcgtcaagtagcacatccaattttgacagctgttttcatggcagcaccactaaggtcaattgcaaggctggcctcaggagatactgtacaacaggggcctcatatactgtgcgaagggaagggcagaggg

SEQ ID NO: 51128 - DNA, 500 bp, Homo sapiens
ttctcccgtttttctgcctgggagatgatgagaactggagcggtcatcctgagcttacaaggggaagccttgtgttgaggagggctgattaactggacttggaccacctgcctacctcgaccgttgtgagaaaaattaactgcattgtggtaaatcctttgcattttggactctttcttacagcagcttagcctgtacctcacctccacttatgagcctactcattctgcaaatatttcaccagcctagaaagagcttctccatcctctgaatccaaagccctttgacctgcctcttgtgtttggcctcactatttacctggtactacatttgtctgtgcatgaatcttacctgctctttgcaggccaaagaggacaggggtaaaagcttaatcgctttctattacacaatgcctagcatattgccttggacaatgattggttcccaataaatgtgttgaatgaagaaagatgattcttcattgtctgtatacatgaatg

SEQ ID NO: 51129 - DNA, 4422 bp, Homo sapiens
ttgctttaaaaaaaattattaattctaagccaaatggcacattttttttaaaagtgtatttaagtccgatgttaccgcaagcttacaaacctattcccatggaaacaggtttggatacttatgtattatttggacgacagtagtcacgtgatcagcctttatgtataccaatgttttgcaaggttttttgtctcaatgtcttactatcaggaccttgtaacaaaatagccagtcttctcacacatcttaactcttcgacacaatgtattttatgtatcttaatacactgattttgtgggaaatcttgttttatgttaaaaaaaatcttcaaaaatggtaagccactaatttcagaagttcctttgctttctagaagttactagctattttgatatttccatgttgtgactcgtacaaagcaatgtcattagacacacaaaattatttttaacttttgcacttaggactttccctaaaatataacattacacaatagattcaacccattttccattgtcaccaaacagcaaccaaaaagaccgaagagacttaataaagacagtagtcacttgttcttattctgaagacagaaaacttaacaccaggtaaaggaaatggaataaaataagctaaatgcatgaggtaggcccctaacttctgacaacacgccccatcgatttcctttctgaaagcagaaattcaaacgaaccaaccacctgcttttggacagctcaacttaggacttgctctcaagccaacacaattttctacaaaatcgtaggcagctacaaccgctccttgattaaatgcgacaaactggagggaaaaagtcacttacaaatacctacatgctggtttttaatgcaactctcagtgtggttttccgagggggctgcaaagagggaagtagtggaagaaacgagttctaaaatgaggcgctctcgtaggaggcaacaagtaagctctgccccaaagctccttttaaaaccaacataaatgagtaacagaagaaaaggattttgggtccaggaagtaggctcattctccataaccatcggaaaggaagaggcccaggcagcgctccacatcctgaccctagcttttaacaccatcgttttggggagaggagaggaggaacgcacccacagtgaggtctccacccaacacttctccgaccccagcttcagcctggcgcaccttccttcccaaacccgcctctcccgcctcggagaccccctcctcctccctgccaccaaaggccacgcagcccccatctagccagtcctcacggaccctggaccaagacgcgcctcctggaggccgagactgcccgaaacccggcccctgcgtccaccgggagcgccacactctggcagctgaccggcggctgtcgccgggggtaaggttaccgctccgcttccgcggctggcctgcgacccggccacctgcagggcctggcaggcgcccgaactcatccccttcccgcggcccgccccgggccgggccctgccgccccccgcgacccctcgcgacccgcggcgagtcccacggtccccaccgccccccgctggccggcccccgccccgtttcccgggcgtcccgcggcgtcagcaccgcccccgctgccgctcacccgggccgggacagtcttgcgtcggagagacagtgcagcgcgagagggccgggagaggacgccggagggaaaggaagggggagcgcgcccagcaccgcttgggcctcctccacccgctcaggaggggaaacacgagagccgggagcacaacagcctcgcacgcccgccgccgccgcgcgcccgccgccgcctcagccttaggggagaccactacgcctcgtgcccgcgcacgccgcgccgctctcctcggcgcccccgccccgcctgctcctcgcagccccgcccatgtgcctttctgcggctgcctccttctggcccccaccccgctcgcacgcctgcgccctggctggtcgcgcgggccaatggcagcgcgcccctattacataagcgcgagggggcgggccctggctgacacaaacttcaggggacgtcgccttctgtccccaggcgcccctcctctccggcgcgctcggtccgggcggcttcttcacccagccctgggagccacgtgatcccggtcctggttggtgaccgggccgcggcgtgtttcacaagtcgctcgctcgctcatccactcgggcggcggccgggcctcaggcgctgcgacccttttcccgctcctcccaggctgacgcgcccgtctcggcgccgccctcctcggcaccgactgaggcgctggcccgggagcggatcgcggggccgcggtggctgagtcacattcccggagccccgccacccaggacaccgcggccccggcccccagcgagcccggcggacccagcggctctgaacgcggacgcacagcctttgttctttcacagccgccctttacctcactcccatggaaaccccaggtgttttcccaagctgggggcttttagtgagttcaagattcaagcctaagtcgtattaaaaattgctggctaggccgggcgcggtggctcacgcctgtaatctcagcgctttgggagcccaaggcaggaggatcacttgagcccaggagttccagaccagcctgagtacatagcgagacccacgtctccacaaaaataaaataaaataaaataaatagtggagcatggtggcccgcgcctgtagtcccagctactcgggaggctgaggtgggagaatcgcttgaggccgggaggtgaaggttgcggtaagccgagatcgcgccattgcactccatcctgggcgactgagtgagaccctgcctaaaaaaaaaaaaaaacaaaaaaagaaaaaaaaattgctggccaggcttcccggaggggtttagtttgactgctaacaatatacggtactgagttgctaatccttcggggaatggttaaagttctttgcgcgcgctctctctccatttacaggcagtggcagcaaactttcaatatctgacaagagcaatggcgattataaccatgattaaaattgctgaatatctggaaacagtactttagacatcagctttattgtgcatacttacccccgacccccgccacattcgtttctaattagaactactagtgacaaaggagaaaaaaaaaaagtgtttgcattggctgttctcaccttgcctgtagtgccgtttcccaagtttgcgtggcagtgcccaggaaatgttggctgaatattagtatatcccaaatgacttggactgggctatagataccacagaattgtttaaactagccaggaaggagttagctgcctattgcatttgagtggagaaaaatacgaaatgaaacatggcatgcagtgatccgggtgttcagttctccctcttcatcctcatttcagcttctctcaccttcactttttatgctctgacttccttcttgcagttttaaattactctctagtcctagattgtaagattattttcatcagggaatacgcagtatgttaaacatagtagacgttgaataaatggatattgatcaaatgaaccgagtatgtctgaagaaagcagcttttaaattgacatagcatgaagctctagcttagtcactaatagtcactgtaaccttaatggttgtgttaatctggctgatagagggatgggtacttgttggccctagaaatgggaacttcaaagatctgtgtttatctagccgtgaatgacagtagacagtggaaagggacagtgaaatttgtgtggcagagatatgtcttcttaactaaagaggtgactcctattgtgaagtaggttaatatgtcactctttaccatggcctagatgaaatatgtattcaagctagtgtttcttaagtttttgagtcataactcctttgagaatttggtgaaagctattgactttgcccccagaaagttcatgtacttatcatgtaacttatcctcataggtagtgtttcttaatctcagcaccgttgaaatttgggctggatgattctttattatggggctctgtgagacctggggattgtaggatgtttagcaacatccctgtctcctacctgcttatccaagtagcacctcatctccagttgtgacaactaaaaatgtctccagacattgtgaaatgttctcagggggtcaaagtctcccctgattcagaaccactgcctagaggatatggcataatggtaactttatgtgatggttagggaatttgaaaaaaaaaaaaaaaaaaagaaacaaggaatggataagattcaacatctgtgaagtgacactcagtaaatgaaaggcggatgaattagcattactaccagctggtgtcctacttatgttatagaaatgtgacagcaaatgtgatatgaactccttag

SEQ ID NO: 51130 - DNA, 1124 bp, Homo sapiens
agttcttcctcactctgctatcttgccacaccatggcttttttggctttttttcttctccctcaaggacctctgctttggtgaattcttgccaaaatgaacctcagagacatacatctaaggaccttgcgtgcaccaaagagggtgggtggagggggcagagcttcctgggggtccactctagggcctgcaggaggcctgaccttgggcagacagccctagcctcagctcttcttatagctcccctgctctttcctcttcttgaactgctgggtgccagcatcagttcagctctttccccccaccctctgctcaaggcctaggaggacagcagctgtccctacttgctgcactgtggggaggcgcctgtgctcactgctctgctgttgaagagctcagtgaagcatatgatgtgactgtggatatccaactgctttagctgacatcttggtaagtggcttcccactccagttccgtggaggcctttccccgttctgatgtagacccgtggggtgaagactggtgggtcagtgggcatgcggggtgtgctggcatgtatgccgcagggggtccaagcaagtttgctaggtaggtctcatttctccctctcgttctctgtttctctgtccagcaaactggatggatgttatttcacagacacaaaagtgttacaaaatccagcccccctcctttgttttttaagcaagatggcgtctccttttcaggcttgctgtggtgggctgagccgtaaccttacatgggcggatccaggcttcatttcacataattcacattcttggcttcctgagtcactgtcatcatctaacctttcctgacagccaggagtgtgtgggcgtggatggacagggaatcagataagccccatccatctgtgcacacatctgctcgggacccctttacctgattctagagaaagcctttcacatttaaaataacgtgactaaaaaattcttgtgtgaatttcttaatcccttgctggagtcagtggacatttttggaccaggagacatatggctgccaagaaaggctgaatcagaaggcaggcagcatctctttaaatccaaaacctctttaactgttgagtagaaaatcagagttcagcat

SEQ ID NO: 51131 - DNA, 814 bp, Homo sapiens
aatacagctgggatatcagaacatgaaagcagggttttccagcccagtactgttgatgttttgggcttgataattctttgatgtgggaagctgtcctgtgcattgtaagacatttagcaacatctctggcctccaaccactagagatgtcaggagcactccaccctcagttgtaatcactaaaaatgtctccagacatagtcaaatgtttccttattgatggaagaaaagaggaagaagaaatgttgcaacacagaaaatttagaggcagttgggcctggaaaagattgatatcctcttacttctcatgatccacttgtgtctcagccccagaaaaccctccttcctgttatgggaatgagagacaggtgcaccatgggaaataaggcactaaagacaaagtccaagtgttacaaaagagtgtcttgcgcctacatggaagctgtgtaatttggcactgattgctctcctcccagcttccttactgcctccaaaatgtgaaatgttgtgaggttaggacttattatggaaaccattctgccccaccccgtccccacaaaaatattaccagcttttcatgatgacaaagctacctcttgtgaatgccataaatgtgggtaattcattgacacacatcttgtcatttatcacatttaaaatcatattacatatttccagagttttaaaatttaaatttgcagctgggcacagtggctcatgcctgtagtcccagctctttaggaggctgaagcaggaggatcgtttgagcccaggagttcaaaactgggcaacttggtgagcctgcatatctacaa

SEQ ID NO: 51132 - DNA, 1420 bp, Homo sapiens
tttcaggggagaccctgaacctctgacccagacttccagccactctcttcctctcggactctttttttttttttttttttttaccttggagcaggaatcttaaaggcagccacatgcagtggctcacgcctgtaatcccagcactttgggaggccgaggcgggtggattgcctgagatcaggagtttgagatcagcctgggcaacatggtgaaattccgtctctactaaaaacacaaaaaattaggggggcatggtggtacatgactgtagtcctagctacttgggaggctaaggtaggacgatcgcttgagcccgggatgtcgaggctgcagtgagcggagattgtgccactgcactccagcctgggtgacagacggagtccctgtcgggggaaaaaaaaaaaaaaaagaatcttaaaagctactttccaggaccgtctctaactgacagagcctgtttcacgcctttttcttcttccattctgtcctcttcacctgcggcttctgctttattagggttatggggccctaagcccctcttttgtgaggaacattcagccaacactttgttgcaggcaggggagtcggctggcctgaaggtgcagacaccaccccaagctccagtgtcctctggccgctgctccgccagctcagctcatgaccctcacgggcagccgtcttgcaaagaaaggcgatgagtaaacaaagcatttgccacaggagtttggctcagatttaatagaggacgtgtgcagtctttcagtgttcctcggcccacaagctttaaccactgtacaaactgatttagaacactaaagctccactgtttgtttagtgactttattgactcaattcccgcctctcaggcaggtggccccggcaggcagccccgtcattgttctgactgggttctcctcagtgacaccgtggccttcctgctgagagttcctttctttatttcattttttctggtccttaaaaagttgggcaatcaagtcacagttacaggtgtagtgtttcattttgaaagaggtttaattcactccagtcagcatttgcagcggtcaaattgggtttgtggtgtaatacggacttttccactttccccttggctaaagcgaagggctgatttcctgggtgaccgtgaggagtgccgttactattgtggcgtattaactctttctgaacctcgggcctcatttgtcagtggctttcaaggtgccctaatgtataattaagatatacagtaagacagatgcaaagcgtttgcaaacttcctgtggtgcctggctccactattgatttggcccaaaacaaaaaatattttcattgttcattgcaagaacaacatcatttattaaacatacactgtgcaaagtacattgtctagtgaggtttttccttagatgcattggcttct

SEQ ID NO: 51133 - DNA, 1570 bp, Homo sapiens
cacagtccctctgtttatctcttcaccttgatctccgtgtccccactcctaactccaattatgctattgtcttgggtggtggccacattcctattgtggcctccgccccaccacatccctgcaccacatccccctttcacatcctcatcccacccgtttcctggtcttggtccctgtggtaaactgttagattgagggccccaataaaccacagcgcaaaagagtcacagcttgtgtagcacctcctgcattgactctggaatgggcgatgtgacttgctttgtccaaagaaacattagcaaataggatgcaagcaggaaccccactggtgcccatgcatgaagtcatctgccatattgtaatattgctcaggtggtttcttgagtattgataggctgcacggagagaggcactgaagcatgagatgccaccttggactatcagccggagccaagctccagatgaaggcagccgtgtgactgcatgtgtactgcagcacgtgaagcaggaaggctgcccagtggagcgggttcagccctcagactcatgaaaaattaagaaattctgtatgtctgtatttgttttaagccgctaagttttgtgggttttttgttcgtttgtttgtttgttttttaaacatagcaatagataaacaaagcaatccccatctcatctggaccaaacctcttactcccaggcctggcagaccatctccacatctgtgacagcctgagttgctgcatgtctatgcaatttcactaagacctgctgatccagcttcacctgaacttggggttaccacaacatctggctttggacagattggcatttgaactttctgagcaggaaacaaattgagagaaaactgggtgtacaaatattcattactttcatgctgtgttatgacctgtgtatgactctcctcgttcaatcctgggcctacattatatctgtgattctgctgagtcattgttgggaaatgaattcctacttgcgttgtctatcagccagtgagcacagtccttctggttccctttcataaatacactctttcctcacatccttgagggtgagagagtgttggcagcttcatttatttacttttcttaactctttcaagacaagactcaaatttttaaaatttagttccagaaatagttgagaaaagctgatattttacttttcaggaagagagtgacttcctcatttctgaaggactgcttgcacacttctgctaatacatttgcttctggtgcactcagtgtgtgctgaagggctcaggaatttgggcggagtggtctccatttgaaaattgcccacactgtggcctgagtgttggatcgtcaagtgtgacgcatctgataggagagaccctggaccttgagccccacaagggcagtggtggctggtctagtccatcactgtattctcagtctttagcacagggccgaacacagaaatatgcctaataaatatttattgcatgagtgaatagattacctttatgagaaatgtcgtgccttggaaatgatgttcagtatcctgtaggaaaccacttatcttgataagc

SEQ ID NO: 51134 - DNA, 5626 bp, Homo sapiens
aggagacagcaagtcaactacgtagcaggaaagtagctattcaggcctggagtttggaagggcatggtactgggaaataccagtttgtatagctcgatgtgtttcatcctgtggtctgagaactgagagcagcctgcatctgatcatcctaatgcagcctccctgcctgacccaacaaatcagtagtcaggattattgcccaatcatcctcatgcccactaacattgagaaactctggatgaagatgacataaaagccaagggggagtagataaggcatccaagggaaactacataggatgaaaagagaaccccagagacaccaccatttgggaagaagatagaagttgcaaaggagatggggtgagagtgaggaacagatgtggcttccagggggggcagtcaatagtagcaagtgcagagaagagatcaagtagggtgagaatgctggagtgtctgtgggatttggcaacaaggaggttattgttggctctagccagggcagttggggtgactgttgtaatttcatggtgcagccttggtgatatttatcctgagccttttggctggggcctctggtgcagaggaagggactagagctgagaaggaccccagaggacttgatgggattgtttaggatgggcactctgctcagagtaaaaagaaagggactgactaagcagaggcaatgcaaagtaagatacaagaaagtaaacgagtgataagttaaaaggaaaggaaacagcccatcaggggagactaaggactagctaaaggagctaaacccagaagactgtttattaagcaagtacccatgaaggtttacacaaccaaaacaaggcaacccagtggaggcccttactagaatagtcactttagtagccaggagagcaaatgtgtttggaatcaaccaactgggatgtagttcccagcaccacaaggcagtatctcctaggaagccatctcattttgagcatccatttccttatctgtaaaatggagatgatcatgcctaacttgctactctgctgcaaggactgtagctcattcatttgttcaatgagcgtttactaagcaatgccacatgccagacactacactagacacagactatataacggcaaacagcagagaccaggcccacaccctcctggagtttgtcatctagtgagcaaggtaaacatgaaatagattgtgacaatagtaatgatgtcatgacatttgtgattagtgctatacggaagaagaaagacaaagtatattagatgccaaatagtgcttgggacatggtaggtgctcagaaaatggaatttacaatcatccttaccattgggaggatgtttaatgggaccatgttcagcagaattgtgaaaagagatactttatctttatcttgtctctgcagattctctttctctgctgtttttctcttctgaggcagtatgaaatttcatttttgtcttattaaaatttgtgggttttttttaacaccattaaatacttgcaggaagaagtgaacataaaggtgcttttcttgtgagggtaatcggtatagtatattggtgcctctttttttaaaaaaaattttggagcaaggttgacacaaaactgactcatttggcaggaaagtttgccaatatgagttaagagtgagtcagagagacattttacaacttatcagccagaagaatcactgataatgacctttgttgccatagcaagttcctgtcagccatgggatttgatactctctccaactccataacatatattagctccattctacagctgaggaaatcaagactcagaagttttcagcagcttatccaaggtcccagaaccgtggcttgccccaggccttatttttcccaaagccctgtccacctcatcaaactgtctccggaagaagaaagagccagaggggtgcgagatgccagtagcccctgtgagaggccagctatggggcctgcattttaccccggtgaccacacagtcagaacagtcacacttacttgcagtggcttcgggtctctcacacagtcatcatttgaagtgcaggacagtgtgaccaggctctgagggaaaggtgaagacagcatggcagcccggtgagccaggcctgaggatgcacaggctggggctgggcccagaaagagaactgggcaggtataatagccacaggcttgccaggagcatgcatgtgcagacaagagagagtaggagtgtgtgtatgtgtgtgagggagagaaaatgcgtgcctgtgaatgtgtaaatgtgtgagtgtaacgtgagcttgtgtttttgcacatggatatgtctgggggtgaatgtgtaagagagcatgcatgtgtatgtgcgggtacgtgtctgagagtgcctacatgtgtgcatgtgaagagtccacctgaagaggttcagagttaaggtgatttgctgccctgggtcactctgaagtatatctgttccctgttgactaggatgctacaaccgcttataatgttttttagggggagtccgaagaaacacagtcccagagttaccccgagtctctaatcccccaggaatgaaatccctgcaccccagcagctatcatttagagcctttctcaattagcaatcataacgcctaaagctttgaacagttgttgtatgtttatctttctcttcaagttcactctgttggctctcataaccagccaagttcaaacaaccttctgtctggcagccacgaagacagctcccccagcccccaccccaaagcagttataaccagacagaggttggagcagatttccatgatctctgtgtgtgttctgctgcttttttaaaaaactgagctttgtgatgtgcctatcttcatcaaggatttgcggtggcttacaatattaaaaatacacatccagcagaaatacttcaaaaactcagatcaaaactcaattctaaagaagagaaagaggttccattgtgtgtgttctgttgcttcccttatggtaaaataaagccatgagaggtgcaacattgggtaatggttaagaatatgccttgtctgagcaaggtggctcatgcctgtaatcccagcactttgggaggctaaggtgggtggatcactgaggttaggggttcgagaccagcctggccaatgtggcgaaatcctacctctccaaaaaaaaaaagagagaggaaaatatgcctttaggagttacacactctggcttttaattattgtactgtttgttttctctaagcctaagtttactcatcaataaaacaaagacaatgatagccctaccctgtatgactgaagaatggaataagataatgtatataaagtgcttaacacagtgcctggaatacagtgagcagtcaatttagctaggtggttgttattttcactgccatggtaggatttgaatgatatccacgttgcatctctttttggtggtatgcagagatccaggtggaaattccccctctcttctggtccgctgggaagagaggtgaaatgaatacggtactagagccccatcatccagtagccaagagcagatgtgtggcctgactttgtgtatggcagcagggttgtttaggctgcatgagagagtacgtgatgggatttcctttaattttctgtttttcagttttggttttgtttgcaagctctgctgggcatttgcatgggctggattggcttgcaggctctgtgatcactaggaatagggctgagctgagccaaggtgatggcttgtgttcaactgcaggtcaggtgtggctccctggggcatagtcctggaagacctgtgggcctccttctaaggcctccttgagttctgttgatctttgaggaacaacagatcttaagggcaactaatctcagagaacatggtagcctcttcaacagacccagcctatagcataaacacctccatgtgggttttttactcaacccgaaatatctagacacacagtcatcacatgcatacattcctgatgtctccatcaggtgggtgagaggtgatctgtgatctctttaaatgtagtgaagtgctcaggacagtcccactgagccttcctacccactcaagaacactgctaccttctatcttccccttggcattacctcagtttcccagatttctgaggcaagcaccctctgtacaggcctgtgtggggagttaccccaggagctatcaatcagatcccacccagtagtattatccatgtagatgtctgtctcgcattctcaccctccacccaacaagttggattcaagggttggagccgcccattgtctatctatgcatccccatccccacctccaactccaggtctcctttgtgcctggcactgagcaggtgctgtataaatatttgttgaatcagggcatgagtatgaaagtaagtgagcaaaggaagggcgcatttcacagaatgagaaaatagtaaagcagaagtcaaccctgccagtctttagattaagcacccatataatacagtcacggacacagaggccaggactcccctaagcggtggaagatctcagtggcaggaccagagtccagatgtcccattcttgctgtgaccctgggctgctgcgtgttccctctctcagtcttcatctgtcattctcagagagagactccagaaaatgcctgagaaacagcggagtccacttgggtctctgtcagccccacctctcattgaagtcagtagttcattaaccaggatataacttgggctggcctcattacaaaaccaaatcaataaatattgattgagtgccccctatgtggacaaccaggtgagaatgagggaagacaggaaacaagagaagagagaagccttgtgcatatctgccttacaaatggttggtctgacaccgcaagtcatgtccctaacacagtccagaggacatagcaggcatgcctgtgggctttcagcactaaagataaggggagatggtgtctcttctggctccagagaaagcccctttccccctcaggtgagagggagaggaaagaaaaatgttatgtaaataatgagtccacaactacaccctgttcatgcacaaaattccaggaatgattaaacctgactgtggctccaggataaatgaaatttagcgttccaattgccctgtgcacttacacgcacactttctctttctctctctatgtcacactgacacacacacagtatgttggtgcgtgtctatcagcttgtaactggcccacaaggaaggcagttcttctgatgagaaggtgatactgggagccctcaaagacgcccactgtccctcctcagccactctttcattgtgtcctgggcacatcggttagctgctccaggcttctacttgtccattttaaaaaagggaatactaccagccagtcgtggtggctcacacctgtaatcccagcactttgagaggccaaggcaggaggatcactggatcacttgaggtcaggagttcaagaccagcctgaccaacatggtgaaactccatctctactgaaaaaaatacacacacacacacacacacacacacacacacacacacacacacacacaattagccaacatggtggtgctcacctctgtaatcctagctactcgggagtctgaggtggga

SEQ ID NO: 51135 - DNA, 1464 bp, Homo sapiens
ttgctttgttaaacctggctctaaaagcaaggcgtcaaaacagactgttgaacgctcactgaggtagaaaaccaaagcccacagcagtgtcccacattaggagccaatgggtgaaaatgagggattggaaaggtgaaacagcaaacggaggaaggctgactggcgcgctgcctgactggacagcctgacacagccaccagcctcaacccgggtcagggagacctgtggggccctgtctctttccctgaagccaacaataaagtgacaggcacccaagagaatatactgcctgtctgaacccagatgaagcaccgtcaagggggattgccagaaaaacgtactctgtccaaatgtaagttccttccacaaaaattgggcagcttctagaatttaactctattagcatctcaatacctccaaacatttgattaccagagctcatcaatagctgctctcaagggcaattatctatcattatcaatgtattgccttacccttttaattaggatgttaatgtccagtgtaaacaaagccttctttgctaatttcagctgtgcacaatgaaaagcccttttttcttttccatcccctagggttctgtggactgaatttactctagttcctgaagtgtggaaaaagtaaacaaggttttgtttggattccaaccttaagtttctctggactaaaacccagcaaagtggcagaaagttatcccaaagaaaaaaaaattgtccctgaggtatgaaaataatttcagagaatgttacgaaaacaagcaagaaaatccccacaaatccagaggtttttttaatagttaaagagatgagaggggaaatgtttggcatattttcaattgctttgtattaccacagaaaggtaaacaattttaaaatcatgttaaattttagctaaacaggtattcaggtcattaacaaagggttcctatccagattaactatttcatacggttatatcaatttctgacacagggacttaaaacaatcaatacaaaatttctgaaagaaagatgagatgaaacaaatatcagaaatttaaaaatacatgcacataaagaaacaaaaatcatctacataagtgatcttaatatttctttgttgtcctagcgatccatggagtggtctggttagtgaaaattgccttatctctggggaatgtgctaagcgttcccaaggtactggtgtccctcactggacacagccagcttgactctggaagaaccgcctggcacaaagcaatcaggcagtgggcgttccctttgacaggctggctgtctttacatagaacctactggaaacatcacatctgcctggcctattttgaacattgttttgaggctaaaatggggcaagactcattcaatggtttgaaagtttaggggagaaaataatttgaaacaaaaatgtcacagttcagtggttagattgagtgactgttgtatccttt

SEQ ID NO: 51136 - DNA, 2685 bp, Homo sapiens
gttagggaaatgctatttgagttcctctgcgaccacccacctcagcgtctttgcagaggaacgtcactaagccagaagtggagctcagagtttcttgctctttgttgctttaacagtatcttggctccacaaagtcttgttttacagttttattggggagatattcaagtgtgtgtgtgtatgtgtgtgtatttatacttttttatactgaggtttaacatgaatatcttgtttagccatgtttttctgttgttgaatgaagcagattttagagatccaagatgtgtaagagagggtaataatagaaattgtacctgcaaattgccattcatccaagtggctgtgttacatttgctcatcagccctcccagaactttaataaggacagacagtggagaatgtgcggaagtaataatcaaatagaatactgtgacaaaatgaactttctcttgaatgagttgcagtgcttgatgttggaggctttagataaccactggggatttttggcaggtttgtaatgggatatctgtatttcagggaggtaattctgagccagcatgtgggatggatgcagtgagggatggactggcaatggaaaaccagcaatagccaggtgaaagactgggattgaaggcatgaattgcaaaggagaaatacaaagttaacccaggagtgagagacaaactgtcaagctgatagagccttgatgactgattggctgtgggggatacaggggaacaaaaggatcatgaagaaaagcacagctttgctaactggttggatgccctccccagaggcaggtgagacagaaggagcagcaaggccaagtgttgagggagtggaggttggccaggtactgagttcagccaggggcatgttgattttgaggcaccgtctacacatagaacaggctgggagtttcccaggacttatttgcacagtggagttatccagttttgcacagtgtgtgagccatttaaaaaatatttaaaatggatcacaaataaaaaaagttaactagactagatatcagtccaaatctcctcaaatagtggataattccaaaaccacgttctcgggaaggcatatttttctatttgttacctttcaaacagggaaggaaaattagaagaggttcaacaaccaacattaacttcatagagtgaaagccagaagctacaacagttaattggtagcacactcatatataacttctccctacagaagagaactaagaattcctttactactttctggtgcagatgttccaaaataatgcacataacagctcttgtgctttcagaacgggcagtacaggttgtgatgtagtgagcctgattccacaaacacatccaaataaacatcattatagtcacatccagtgtaagcattattgacacaaggttgtagttaattgtgaaataaactgtatgctctttattcaatctctgtcttcaatgttggttcacagtaatctttcctgtatcaggatttattagttacattattaatattaatcctgtagatttccatggtaattagcaggcaattatagtacaatttcagttattagcatatgattataggatttttgtctgtgtcctaatagaaatctatttcttaagagtcaatgtttaaattgtgctctgctgaaagtagttttatattaaagtcacacttttttgaaaacttaagttttcaaaatgaaatcaaagcatttcttcacgtttgattctccatagttctctttgagggcaaaggaagcctcttaagagactcttgatcacagactttagttgacctctgtggatgattcagcatggctatcctgttaaggtctagaagctctttttaatctggagtcatgctccactttcaaacaagaatcataattaaacagtttatttaaactgttaaaaaaaaagagttttttttatttgagttttttagaggaagctggctttggatgagccctacaagcatgctttctcagtttttatagccagtcctgggctgggctactctgagagctatgcagaaaagtgggagggtggagatttaaggtggtgtgtaggaagaggtgacgtccacatgttgggaagtcaggtagccaggtggctaggtggtcaggtggctaggtggtcaggtggctagctggtcaggtggctaggtggtcaaatggccaggtggtcaggtggctaggtggtcagatggtcaggtggtcaagtggccaggtagctaggtgaccaggtagccaagtggtcaggtagtcaggtggtcagttggccaggtagccaagtggtcaggtagtcaggtagccaggtgatcaggtagccaggtggtcaggtggctagctggccaggtagctaggtggtcaggcagccaggtggtcaggtagccaagtggccaggtggccaggtgatcacgtagtgtgaatttgtggcccaaacaggcctgggagacaagagcaccagcaactccccactttcttcagcagggcttcccaccatcccacctagtttagttctctggttctctggagggctgtccttttccccaaattatacagatttgctctctccctacagtctggaaaatgtaggtcttccctcctttaaaaataactcaagtaaataggatttcattttttgatgtttttctaggctgtttccatacttctgaata

SEQ ID NO: 51137 - DNA, 2245 bp, Homo sapiens
cttgttccctgtccccacttgggtaagatcttcttaatcttcccaggtagagtccactgttccctctgcaggctttggtttagatctaaacaatagcacttggcagtgtttcacttggtttattcattcattcatttattcatcctactagacgctgaactttttgaatgaagagaggatttttttaaccttgaatctttgtatgcttagcagctggtacagaacctggcagagaacagatgctcaaccgatgttgcataatcgatgagcacactgccatgtgtggttttgtgcgtttaggtgacagtgacagtaagcaggcctgtgcctggttcactgagaaatctgactggggttggactctcctctttcatgctgaaagaatcatttctggtagtatttttctgatactagaagactaaatatgcctttagtacttccatttcttatatttaaatatattttattgtactataaacattttgatataacttaaatacctctgagacttaattgctagcctacaaacataatatatatactcataaacaaaggtaaatgtctccttttaaacttaactagaaattatttctgttttcctgaaacagacgtggaaaattgttgaagggcaaattttttaaaacaagtaggtagatgtggaattaaaacttacaacgaatgtgtcccttcgtcattttccttcactgctcctcggaactcagtttatctggttccagcacattattgtttaataagccttttctgatatttctcctactcctggaaatgttaaagccatgagcagttaaccagaaggaatgttacagagaagataaaagcagacgatggatgcttgaagagacctctgagagtctgttttaatgacagggtaaagctgtcctatagagatactggtttagatgatgagatttcaaaatcaaaacacacacacatactcacacgcacagataactgaaaccactgatagacctgctgtgtttagtgctatacaatgctatatttcctatctgtcatttttttaaatacacatttactggacattgagttgtttttcccctaaccggtgggacttttgttatatccatagctataacatcattctttcatctccaatgtggaatttatacttttatttgatttcatgttttctgtttgggacctcattattttctttttcagatgtgcatttaaggaaacttcaggcactctcatagtattatagtttttaatattattggattggcttaaaaatgaccaaaaaaaaacctagagatacaattagatagttcatgaaatcatatgtttcatgaacaaaactatagagccggtctattcagccaccctctagcatttgctagaagtttctctccctgtggccttcaatagaaacaaatatatgtctttgtaacatccacaagagtgaaattaggcaaatttaaagtttttcttccttgtttacaaaacctaaaacttgccaagttttttcaaaattaaattaaactctttgaggttgtagaagccaaaataaggtaaagctaatctgaagaaaactctttgaacaggcttcaggaatgtggaccaccactagtttctctgcttttggaaagacatgtgttgaaataattgagtgcttaataaatgagagtctcgtcattgtttaacaatcctgtgccataggtgctgtagtgtctccatttcgcagataaggcagccagcttaatgaggtcatgtagttctccaaaggttgctgtggactcaagtccactcacacatacagtctggggtcagcattagaacagtaaactgtaacggcaacagcagtttccctccctaagagaactcaaaatcctattttgacataatatcaaaatcctctaataatttcagaattgatgaaaaataagtaaaagtacacaggactagcaacatgagtcattcaagtagcagttaatgcaaaaatcattcctgcaacaaactagaatagtgcatgagccacttcccagtggctccccacccccttaacacaggtaagaggtttaccttcctacgtcacttaactcattctgtgtatgtgatttgggcagccaggggtaagtgggaagcttgaaaatgaacatttatcttactgtattttgagttgcttaagtaattgggcttgtagttcaaatttagtgaaagataatccacttgaagatttatagtctttcttctgcactgccaatta

SEQ ID NO: 51138 - DNA, 991 bp, Homo sapiens
tgagttaaaattccccaagtaagttccaggaatttttatttatgataaagtctccagatatttctatgcactctaaagtttgaaaaacatgctctaaaaattaagttagtgcaatgggcccaacagctgacatggaagaaatagtgggtctttatgggcaaggaggagaaatgacaaagaagggacagtgataggacagtgatgtagaggccattcaggagggtgggaaaacacctaacagaaggctgcttccatcttttagtcaccaaccaactttgtagaggccagcagtcaggccagatagatacactatgccatgtttaaagaaagcagcaaaacacaagccaacatggggaactttatcaaaataatccagttgcatggccagtggaatgccccagcctccttcacttaggtgggttactctatattcattaaattaggcagtcctattcctagtacatcccaatgacagttgctctgaatgccacactgagacttgttgtggggagaaaaaacttacctccactgttttctgtttaagaagaaactaaataaacaatacaacaacagccattaaaaaattaagaggaaaaattcctgtagaaatctgagctaatgactagaatgactcattcccagagagttccaggtaaccagtcttgttttgtaactaggtctaggcttggcagcatcccaggaactgccaagagcctttgagagagtttgcagggaggttgtctatctagacacagctgtttctcacccaggcaggggcagggacagtgactaatatactaggatcagaggctacttttgagttaatatgtaaatgtctgatactaactcaggtattattcttcactcaaaggcaacagtcctgacacacacagataaagatgacaaaagacccacaattagtgtttacagataattgggtcaagaggacatatatgcacagcagatgccctctgggtttctcccatggttc

SEQ ID NO: 51139 - DNA, 983 bp, Homo sapiens
gcaattattaaatttatcctattagaatctctactatgcagtacataaggaattgactgactttttcacctggcaatgaataatgccacagtaccatgaccacctttccaacatgggtgtggctgagaacttctggaaggatgaacacaatcaaagacaatactggctcccttcttagtctcttatgtctctgtcttttctttaagatttattattctttaggaacaacatttttccaataagcaaaaactatttcatgccataatccttttttcttcctcttgcttcctcctgagttccatgtcaatatttacacatcgctgctcactcctactgtttacccaccatggccttcagatcctgtcctcaacctctcatcaaataacctcacattttccattattcactagaacctctcataacatttccatttcaacagaaaacaactttctaaggtcaagtactagtttctcttttaaaaagaaaagtaactgaacattcaaggtgctatggcaagccatgagaatactaggtaaagctatgtgttactttccaactgttcgctccattgtccttatctctccggaacttaaaacagagcatgtcctgacctctgagggctgcagagacaactactcatagagggccagtcatctctagtttctgtgactttccccaatgaataagaaggaggtagagaagagcaagaagaaaaatggctgtcattctttttattcccaggtctaatgaagtattttgaattccaatgttccaaaaatatttcatttttttcatgaatttgtgaaataatttttcacttggccttcttcatcaccccagttctagatggtagggtttttttttaatatcaattttacctaaaaatttattatagtgtttcccctttctctatccctgtattaattaaccttgcctccactctaccttcatttatacctagcaaagtgcctgggacacagtag

SEQ ID NO: 51140 - DNA, 547 bp, Homo sapiens
aagtgtcccatactctgccactgagacaactacagttttgctgctaaaagcagaacacagacttccagtgccagggcctgccaactagcaggcgtctcagaacccaaggcctaatgggttatcaatgccagcaagagttctgggaaccaaggccccacactgccaccagcaaggcagcagagggtgaggattcttctctcccggcctcactctcttggactctctaccccagagtaggcctacgttcccagcatcagagcagcttgttgacacagctcttaaaattgacacacacacacacacacacacacacatgcactcaccctcagtcatttcatgccagatgctctgccaaggcacgttagccagaggagtttcaacatcagcaacctcccctctgacaaccccagtgtagtgtgacacccagatcactagccatgagaacaagtcagagcctcaaagagaaacagaatatgattggttgccccttaagaggtgttaagcaaatctgcccatcactttcagctttgtataataataagttttg

SEQ ID NO: 51141 - DNA, 4275 bp, Homo sapiens
gaaaagataatgaattcagtttcaagatgtccagtaagcagttaaaaatataacactgcagaacacgagtgatggagatcccattagtggttgccaagggaatggatgtgattatccagagagaacatatagagcagcaagacaactgaggatacagtcttagagaatgctgatatttaaagggcagatgaaagaagagaagccagctgagattaaaacaggctgaaatggatgcaggacaaggaaaagcaaaagtaggaatgatgtgatttggctaaagcaaaggatctagactcttaagataaatcagactaagaggttaggaatcaattttgtggccaaagatcttcaaacatcggaggtctagaaggctcatactccaattctccccatttgcccccaaccccaggtgctggcgttcatagcagggtacagtttgaaaatctgtaccccacagatttgggggtacaaatagtcatggagagtttctgaatgggaattaacatgaatagaggtggcattaggaagactaatcagaaaaccacgtataggattaattgataaaaaactagattttgcaagcaactaaggaaccaatttcaaagatggaaatgaggacttgaattaagatgtggcagttagcatgaaaaaagcagcttcaacaagacttcaccagcctgaggtgttggccaggctttttggtaggaattgagactcttttgggagttttttgggggacacagggtcagtgacactgaggcactggtctaatgaaggattaacttggcaatggtaattaggattgaatggcaggtaagataggagatagagaaacaacaaaattattatagccgcacaggtgtaaagtgatgagaatttgaaataaagtttagcagtaggcattccttagtgacattctgctgttttttccagaatggtacttccagtttccgactgactcaatttctggtcacccagttggaagacatgcctgggcatgtcaggacaacaatttaggtcaagatttcccagcaagcacttacgatgccccaatctaggctggcatcataccaggctcttacctcctatccagccccaattccaccacttccgtttctttgcctttatgtctcttctacttctgtaaaatagctgtatgttgtcatagtcatacactacttgtaagtattattttcacttctattcccacaaagtctgacggaaccaatgggatacccgcccaggtgcaagaacttggttttaaatttagctcctctactgagtcctgggcatgccatttaatgttttctggcctaaactttaccttgacaatagactatgaattagattagcaatagttaactctgagaaattgacaataactatggacccctttctcagaagattcacatctgcacatacaaaatctacatatcacttcaggagatttataaagccccttctagtctatctatggaccctttaagacagtggggggttttttgtttttgttttaatatgtgtaccaggatcacctgaagtacttgttaaaaatgcagatctcaagagattttgattcactatgtttggggtgttggtccagcaatttacattttttacaaaatactccaagtgactctgatgcaggtctcctattatgcactctggcatctagaaaaacaaagtgcttcaggcaacccagcatctcaagttaaaaacttttggaccactaaaattcattctgaatctaaaattctgtctgtccttgcgggtctgtatcattgagataggagtaataaataaaatgtaatatccaggtgttaagcctgaatcactgctggtgccattagcataaacagcagtctgaattttcccctttgagtagggaagttggtactaaacgcatttgtttcaaaacaggaagaaaaagcttgagggatatttacagttagttactaaatgcttacaaaaatcaagttaaataaaataaaatctcaaacctggaatctacaactttctaaagaaatgtagggccaagcatgaatctcttggggtggaaacgtttgtttcccccaaatcttcacagtattaaatcaaagataccacagcaacaggttccagtagtacaaaaagcatttctcttgtccacaaagggcttagaagtatttgcaaaatgacagtgtttgaaaattatacagcaacagtttaaactaccatacaatcctacagtctaacaaattctggtttatttattttaggtacttttatcagcataaacaacttggatgaacaacttgggcttattaagcacctacaattttcgtggcactttgcataaagcattttacttaattctctctgaagtatcacttccattgtataaaggaagaaagtgacaccccgaagattcagttagttaaggagccgggcctgagcaaaactggcctcctaccctgattttttcactgggaggaggtcatgaggatttcgtgtccccttctacctgtcatcttcaccccagccacctgtgtcaatttccacacgcgttctccaactccttgtcaccatcccaaatggtatgcacctctccagcagagccgccacagtcctctttccttgcctcggtttccctggccagggctccaaaacagggaaggagggtgggagagcgtgaggcggataaacgcaggggtaagtctcaccccggcctgaggcctccaagcgtcgtccttggctggccccggggcagagcagcgagcgggacgcaaacccaaagtcagctccttcctccgccctccccggggacggcctccccggcgctcgcaacgacgaagccaggctgcggcgagggcgggcggacaggcctgtcctgaccgcggcgaataacatttcctacagcggtcctgcaacttgcaatctaacgggctggcgtgactgcggtgagggggaagacgcaacagcaacatttacctcatcctgatccagcccggccgcttccggcctttccgggtcgcccatcgcgcagactccgccgaagctacgggcgctgagggaactgagctcctcaggccacctccaactacgacagcacccaggtggtccgctggtccgctgggtccgccccgcccccagctctagggactcggccggccccgccccgccgcgccggtcctgctttctcgcctgtccattgagtgactctccctgcgccggcccggccccgcctcccccgcctcggggctccgcctaacttcggccagccccgcctccccgcctgcggcctaagggtttctccccgcctcggccgacccgcctcccctactgcggcctaagggatcctccccgcctcggcctgccctgcctcccagcctgtggcctaagggattatccctgtctcggcaagccccgcctgccttggggcaccgcctacctctgccagccacgcctcccctgcctcggggctccgcctaccccggccagccccatttccccgcctgcggcctaaggaaatctccctgcttccgctggccccgccttactctgttgcaccgcccagtcgcccggctttccactgagggacgccccctgctctggactgcttagcctactccagctggccccacctcacctcatcggccccgcctcctccgctcgcccactccgggcgcccactcctgaggagctatcccagagtccgcgcggcctcgccttcccggcccgctcaccaccccgcctcgtcccacctcgcctcgccctccccgggctctagccacttggtgcggcaggtgtcctgcaggccggctcgagattcccgagctcgccctcgtggtgttccaggaacacggtactttgcgctagcctggcctgtcctgagagactgcgggaggcgaagagaacgcgctgttgctgtgggaagcgccggggacgggacagctacaccgccaaacacttcgctagggaaagggctggctggtttcgtgcgtaaacaaccgaaaaggggaagtgtctgggggaaagtgtgtgtgtgtgtgtgtgaatgcgggtgagtgagggggagagggacacgttactaaagtcaggcaaatattttgaaaaaaatatattttgaaaaaaatagtttggtctaacaaaaataaaatggaagagagatttgtttaagtagtttgaagctgaaagattgacgggatcttgccatgacctgaacagcatgcacctgttttgtggctggctgaaggatggtaaataggatcaagatctcactttaagcgttgaaaa

SEQ ID NO: 51142 - DNA, 618 bp, Homo sapiens
atactaaatgtatgttcttttccttatgattttcttaataacattttctctaatttactttattgtataaatacagtatatactacatataacatacaaaatatgttgttaatcaactttatgttgttgctaaggctcccagtgaacaggaggctataataagttttgggggagtcaaagttatgtggattttcaactgcatgaggagtgggtgcccctaaccccttcatagttcaagggtcagctggataaagtacacagcacagagcccagtgcaaataagcactcaatcaaattcgactatgactaatctcctcccctgacttcatctctgactcacccagaaaatgatagctctcaggcaggggcttcctcaatattcctagctctagatttgcttaatgaaagcaccattctcacctcctcccttctccccatctcagagaaagaagtgttttcctcccctcctatttaaagataacccacagacacactggatgcaactccttcccatatcccccaacaaccatccaaacaaatctctccttcagtcctaacatggtaaagtgaattactgcctggcatatgtttcaccttaccagttttcagtgatggaca

SEQ ID NO: 51143 - DNA, 402 bp, Homo sapiens
tctcaaaaaaaattaaaataataaataaacaagaaaaaaataaagactagagaatagctagaaagagtaaactacccaaatttatatcagctagaaagcagatttaaaaactgtggtacagtcatgaaataagtactactttttttgtttgttttgagacagagtctcactctgttgcccaggctggaattcaatgacacaatcttgattcactgcaacctccaccttcccaggtcaagcaatgaaaatactacttttaatataaaagaagaaactactacatgctgcaacacagatctgttgcaaaagcactgttctaagcaaaagaaaacagacacatgattccatttctatgaaattcaaaaaggaaaagcattacagtgagagaaagcagaacaatgg

SEQ ID NO: 51144 - DNA, 2824 bp, Homo sapiens
ctggatttaaaagctgtctgctccacttgaggcggttagatacactgacacaagaggccagtatctcagcagcaagttaggcctcttcctccctctgggaagcgcatgacaaacagggcatcatgcaacttaagtcacccggtcacttagcaaaaattctatgtaacttctaaacttgggaccagatggccttctatacgcaaaagaaatgtagagagcagtgaagtactgggagagaggaagacttaaaatgctccactttgtgatcctgtaaacatttagcccatcattagatctgagtcttagattctaagacatgctttaatggaggcctccctcaacctcctgagtctgttttccaacagtgaaggaacttttcctgccttatctcagttccctgagagcatgcggcactgcaattcaatatcctaaactggcaaggaacggtggcggaagaaaaggagaaatccaaaccaaaacagcctataaaagacaaaacataaaataaaatcataattcatcctccgcccatagcaaacccaacccagaaatttacagcgtgttaagaaaagcagcattgcgaactgcaaacgtaagagttttcctttgacactctacgcacggttttcagctgtcaaattacaactcaggaaaacactatcattagaatagaaaaggaaacaaaaaagctcgcaccacaggggctagtagcaggagctgccagcaccatttcaggaggagagtaaagggaatccaatgcacttccccacccccgcttgaatccatcccctcccggggcaggcaaacctcactgcaggggctcaaatttaataataataacaataatcatggcgcttcctccctcactccctcccccaactatcaccttccccccaccccccgcccgctcccagcaatctgccgggaatcggcttctctccccaacccgaccccgggatccccaggtccagaccaccccaccggacacagctgccgggggcccgggacaagcccagcccagcccaccccggggcccctggccccgcttctcctcttccctctctttttacctccaccatcccccatccgcattgtctgtctcaattcaactttgactaatatggattcctcgggccttggccgggcagtaattaccgcctgccccccgggagccagaaaccacccccccatctccgccgagttcaacgccgctccttgcgggagggggaagggggtttacagagcgctctccagtctacaccgcgagtcccgtctacaccgcgctccccccgcggccccctgcccccgggatgagaagtttgccccggaaggagcctagcaggaggcagtaaggacccccgcaccccaccccagctggccggccggcgcgtaaacacccgcacccgcccggcacggcccgtgggggaggggagggagggaagggcgcccctccccccgcgcccgccgacccgccagccctattacctgtcattgagctggtcctcggtgcccggcagcgggtgaaccacgaaatggatggacgtcatggtgctttccttctcgtcctccactcgagggcggccccctcccgctctcgcccgccccccagccctctacccctccccaaaacccacagccgccgccgcctcccagtccccaaatggagggaagcaaatacgcaggggccgccgccgcctccctgccgggcgtgtgtccgcggcccggaggggcgggcaggagggcgaatccacacgccacccgctcccccggcgacagcgcggagtgcgaggcaggcggccgggaccaggggcgcgccgccggccagcggcagacgggcgttgggagaggggcggccgggggaggagaggggcggctgctggctgcgggctacggggacggtctggtcccggcggcggacggggtccggactaggggaggtgaggaaggaggggaaggagatgagcccgcaccgcgcgtcactagcgagaagctgccgccgccatcttcacttctgccccagtttctccgtctcgcaggctccgctccggagcggcgggggaggggcaaacgggaggaggaggagggaggagaccggcgggcgggggcgcggcggcgagaggcggggctccgggaaacgggcggcaaggccccctcgattgggctgctcaacgttgtcgggccacgacgctgtaaggcgcgtgccgattggtccgttcggctcccgagcccagccccgccgggggtgggatgtctccagagtgagtgttccggagagcacgtgttagggaaggaggaggctgcgggctaacctgccgggagggagggtaagtgtgtgtcccagaggaggcgaggaggaagaggggctcttgtgttctttcgctcggattcccctggggcagccctaattatttggcggatccttaggggtttcttgttgcttctcatccttcatccgcagttgtatttatggtgaagttggtaaaatcagttaaggggcaagacatatacagccttttattggaaaagtaaggaaattatgtaagggcctttccagaaggagatagtaggatcctggagttggctttgcagcaacttctattacctcggtctccccagtttcctcaccaccatcacatgcccaaagacaaaatgtggaaatttccactaatttcctgatataaatgattcgtgattttttattacttttaaatgaaagatgataaacctgttctacaaaggagttcaatttatgatcagtggaatcagaacggaaaattattattttttttttttttttccccgagacggagtttcgctcttgttg

SEQ ID NO: 51145 - DNA, 2300 bp, Homo sapiens
tatttaaaattgggaaatatgtttataaagggggctaaaaaaagattttcttgctccttggatgaataacaaacatctctgaggcttccttttcttaactatagcaaaggatgtggtcttgctgtgttttgagagcatgaaataaaataattctgtcaacctccacagacaaaagtaggcatgtactcagtcatacctacgatgatatatcatatcctggtaagtccctggatcaccttctcctccctccctgctcccaccgtgtctcagctccttgtaggcttcaatctctgggactgggcctgagctaagaattgcaaagtaaaaatgttattgagccaatgggcttgctgcccgatgctcatggtagccagtactgtggccacagcttttaagaaaagaaaggctttatcgtgtagccaggcagcaaagagataggctcaagtctgtctccttgatttggggtctggggcaagttttaaggggtcagagggcaaaggaaaagattcgggaatgatggattggcagggtctgattggagggcttcagattggcccatttatggtaaggtatgttggggtggattatagtcctggatcttccttccaacggaccccttgcttctgaaagagttcctgtggtcaagttccactcatgtcccagtcttcttggttccacaggcaggagtcatgtgttccaggtgtcattagaggtcaaagctttttcttttgtgcatgcctgggctgcatgacttgcagtcttggctctgttatgcctacaaggtaacttgacattctgttatcaacagagtaggcccaatttgggctggtcctgcagttacaaaatcagcagtcaaaagggcagtaatgatcccatagaccatgaattctatccaccagcccgcagtgcactcacagggctctggtgatttctagatctttctccctgtttccatatggtcacaccctcttctttcagactctgcaggttctgagggctttgatgtgccagccaggtgctgtggggttttagagacttacccaacaccttcctgccctcaggagttcaccagagggaagagcaacgcaatccagacttcacccgggaatagttgtgtggctttggccgagatgtttctcctccctgagtgcccatttcttcatctacaaaatagggagaataataaatactttgcaggactgttgtgaaaatgtcacggtgaaacctagctactgggattcacacaacacagaaattgttttgttttgcctgttgattaaaaatggatcaacgtcataaaaagaaatggaatttacttctctctaaagacacgtaaacacgttggagatgaaaaataatgtataggaacacacagtaacagcagagaggctggcaggaaagcagttgggggatgcttcagttctgttgataagtaaaccccaacttgccatgtgaaagctgaaaggttacgtcaacctttcagctttggtgccaccgctagggagcgtcggtttgcatgactctagcttgactgcaaagtgattctgctttccctgcggaagggcagagacaacatagataattgtcaagaactaagctcaggcaggaattgcattttcattttcatttcatttctaaatttagttcttaatccatgtgacaaatataataaaagagactgctgagtgccaagggagcaagagaaacctgcattttggtctttcctttgtaaaatacctcctcaagaacaaacagtattacatcacaatgttaattagattgccggggctctggagagcacattattagaggaatttattaatataaatctcacgataataaagggacactgaatatcttgctttgagaggtttcttgtttgatttcctgggggatttcttttgattcatatctatctggaaatgaatgtaaaacatgaaaatatagtttgtgttaatttctctctgaaatgttttctgttttgtttttgcttctgcggggatggggtgcagcaagcgccctcggagctgtacttctcacacactttattcaggattagaaggagggtgttcgctaccctctagtggctgtctctggtctccttgccaggtagaaactgctgggccaacaccccacagaacaggcatccacccacctccagggtcagcagaagaggcgagaagtctccaggccaggcaggagagggagacaggaaaattacttcccatggggcagttccttctgctccccaaccccactcccaggcaggagaacaggcaggttaccagcagctgcaggag

SEQ ID NO: 51146 - DNA, 1695 bp, Homo sapiens
aaattataactcggttcacattactccctgttcaaaaacctttgactgggtttgctatggtggaagatctgaactccttgctgtgcaggtacagtttaccctccctgcattttctcctgtactcttgtaaactctgggtacaggaacatctccccatcgcccagtatgcccggttgctcttatttctggctcaggttttttcagctgttctctcctctcaccccccatgtgcctggcaaatcctgcccatcctccaaggtccccctctggtgccacctcttcccgtctctcagccactgccccagcagccccgccctgccgtccctgccacagacacccaggcttctctgctttcgcagccttttgcttggaaactcttttagtcctgacccagtctgcctagctgtgcccagatgccccctcctggagggcccggcctaagcctcctcccgacgcgttcactccctgccccaccctaaaggggctggcgctgtctctccgtcctagaaggggctcaatgcctctcggtgttgccgcaaatctaaccctaggatgcctttcttattaaagcgggaaacttctgcaggggccacgggacagcgtggagggctctgcgcgcagggcagagactgcagttcactgccctgcggttttgcacttcgccccggccctgctcttggctgcgctccgatgtcagcgtgacctggagtcagctgccgcgccctcccacacccgctcctgccagcacccccgtctgctttccggagctgttcagactgcagggtaaatgctgtctggaacccgatccagggtttaaaaataatccaaaggtctgacccactgagatccttctctagatcttccagttgggaagctcttccaggcagcacatgtgcatgatttcaaagaacccaggatgcagacccccgccccaacacaggccacccaagctgtggcctgtgagctgcctggggccgttcctctttcagtagagccacccttggcccaagtttggggaagagccctggctttctccctccctgtgaggctgctggtgcggtaggtcccgcccctccctcctcatcccaggctgagaacttttgaggttacagccagatgctgctaactgggcagagacatcagttccttcaagctcgcctggctgatcgccccctctcaccctactcccctagccggccagcctgccccaggccctcagccagcagccaccacagggtgagctgaggcaaccatttctgtcactatctttgcttcccaagccctgtttcgcccaaagtgaaggtcaggtggaaggttccagctcatgtttttctttgggaggctgccgttggaagtagtgccatatggggactgggcttttacttccttcccagggcaagagcctcatctttagcaaaagagaatcttcaaggctctgccatttggaacatgcttccaggcagcagatgacacctgcagctgtgactaaggccagagcgagccaagtgccccgggactctgaggtggagggcgggagatggaagaaccatagaagtaaaaagcagaaacccatttaaaacttggtcataaaaactcatgactcctttgggtggcttaattccagaattgtaccctctggtggaatcctaaagaattctgtgcttttcttttttttttttgacaggatctcactct

SEQ ID NO: 51147 - DNA, 668 bp, Homo sapiens
caaagttctgtataagtaaatatagtcttctgcttggatgtccatagtagtaacaataattaacatattctgttccagacaccctgctgggcacttcatatgcagcatctcacttaaccctcacactatctcaatggggtaatattattcctgttttacagatatggggaatgcagctaaagaggtcaaataacttgctcaagtttacacagtgacaacactggaatttgaacccagcaagactgacttgtcactgccatccaatactaatcctcatcagcatcaggttcgcagggttggagcccctttcttggaagaccttctgtggtaggctcttccctagtggcctctttaggaacaatgcctctgacccctggccactagctgaagttctggtccaaaacagatgaacaccctcccaatgatgtcccaagcattgccacttcctggaaactcatactgccatgttccactcatctgattggatttccgtgatgtggattcttgcctggactagtaatcatactaagctgtaactacttaccactcagtgtgaaagcacatgaggcatattgctactgatccttacaagagtctgcatgaagagagtgtatctcccattttagaagtagctcagaggagtgcaaatgatggcccaaaaccacacg

SEQ ID NO: 51148 - DNA, 791 bp, Homo sapiens
cgccccaattaaaccacacaaagctgccatccagccttttcaggagtaacgtttgcccttcctgggctggctgtagtttgtcaaagcaaggacagcctgtggctacaccctcacaccccctggcttccagacttgtaggcctttcctacttctcccacagttttacctgacccgcccccagaacattgacttcagagccttccaagctgatgaagttatccaatgtggccccgctgcctcacatttgcagagatcagtttactttcaacacgccttcatttctgttatctctattatctcattttcttctcccagccgccttgcaggaaaggacagggtattattaccccatctgatggtacaaagaagcagagccagggctcaaggtcacatgcctgagtggcagagccaaacccgggaccaaagtctaagctggcacctttgctcagaccttggacagacctgggggaaggcagcaggctacatggctttcaaacttgattgtgtttaccactcacccaggagtgcgtttttataaagcaggtccccagacactcaccagagcattctgtagatttagtgtgcctgggaatctgcgttttaataggcacctctgattgaagtgaagagaacattttaacttactcctggagatctcacccctttatgtggtttgcaaaaatgagtaattttattgctgagaagtccttagaaaggaaaattatacctgaatccctcaggccctagacctcagctgcactgcggcccccttcagagtgattaacctgctg

SEQ ID NO: 51149 - DNA, 4494 bp, Homo sapiens
cttggaatttgcaaaaaccgactttaaaaagtcagcataatcaaagtagaatctattttaattccttaaagaactgcttgatgacaaaataacagcacaggttttgcacttatttgtagaactacctaatgttttatagtaaagttctttgaactacgctaaaaaaaaatggtactactcaccatttctcctattttccattaaaagaaaactgtccagactcgtttggtcaaagtagagattgtgtaaaaataccaaaaaacattctttacgttgcaaggtattattctcaatactagtttttcaaaaatgcatgatgccttcgtgttgaaatcctaagaaaacgagccattgctcttgaaatatcgctaacaatataattgcataatcgcgcccgcctttatgtaagctgcaatggacagcgcgcgtgtgtgtaacagccccaagacgccaatgcaaaaaaaggaaaaaagaaaggcaggcggcagggaaagagagcgtgagctgggaaggacaggaagggaaacagggaggggaggaaagggagtggggcgcgaggcaggaaagggaagcgcgggcggaggcgcgggcgggggaggcagacgaggggcgggggcggacggcgggggagatcctagctggcggagaccgacggatggggccgccctaacctcaatgaggctcacgggtgagtcactgggaacattcctcgccgctcgcacgtccccgcgcccctgcccccgccattggccggccggctcggcggcccgagcccggattggctgtgcggcccggggcgggggcgtgggcgaggagggggcgaggcatgtgaacaaagcgtgatcagcggctgctccgggaggcgcaggaaacgtgaactgggaattgccgcgccgtcacctttcccctacttcctgagcttgcgggcccccgcccgcgcccgacccgggggaggggccgcgggcgccgccgccaaccgcccggccgtgcgcgccgggcccgcggggaggggcggggctgcgggcgccaggctccgggaggcgcccgccccttccagctccccgcgagccgccgttcccttaggaaccgacagcggggccgggcctcgctcccgcccctggcggaggccggggctgggtcactcggggacgagaagctccccgggcgcacccgctcccggcccacccccggcctccgcctcagatgcgggaggaggagccaggtccccgcggaaacccggccgccgccctcctcccgccggcagcccccgggaacccggccgagccctcggcacttcccgcccacgcggcccacgggacctcagaccaccccgtctctccctgtagacgcggcgccccctccccgtggcttccggcagctccaggcccctcccgccgcgcgtctccacgggttcccagacgtgcagcccccacaggccccggctccagacgcgcggcccccgcgtctcgcggcccagctccccccgcccaccttcccgccccagctgctgggtcccgcttcccaccctcctgccccagaggcggctccccgcctcttccaaggagtcgtcagaaggcggccacctgcccctggggtaagagtccccctccagacgtctgggggagcaactcgtcccccagggctgtcggcgggccctcgtgtcatccccccgctccgacgacaggcgccccttcccccagccccgagctatctgctgagcagcccccgtcttccaagcgtgggttcagacccccaggatgggtagcccactcgcctctcctgtggacaccccgcctcccgagtgcttgcgagcagccccttcctcccctggctcgcgttcctgagccagaccgggcatctctcctcggtaccaggtgagggtagcccccttgtccctcccgcgactctcgttccacactgtaccccaacctcgctgcagggcaacggccccctccccactcctcccccgctcgtcatcctcctcctcaccagccctctcgggtctccatgcggagttgtcccttcccctcagtacatctagagcaagacccctgtccctgtctgaagatcccagccccctggttcgaccccctcccgaacacacacgccctcactaatgcccatagtctgcaggcaggaagccctttccttccccacgactccgctgcagccccaattctcaggcatggctgatgtccggggctcggggttcgcgccccctttggccccccagacaagaccaggcgaggaagcacaggggcatccccaaatgacttaccgcagtctgctggagagaggcaccgaagttgagcatggttggctgcttggccgccggcggcaagctgactggctgctaggctgctggctgcttggccacagacgggcgcacggagacactcgacgccgctcccgccgccgccgcgctcagcgccgtctgccccctccccattcaggtagccgctcagcctgccccgcgccgcgggcgggggtgggggcggagcctgaggccggccaatcaacggcaaaggtgtgtgaggcgccggccaatgggctcgcggggccacgcgtgatcggcgactgcccggcagcgtgaagctggtgtcagtggagcgtgtacacaatccccggcagcgtgttccctctgccctgccccggggaactccagaggccacctgattgagtgacgccccccgcccctcgcccacccctcgcccactccttgcccctcgtcccccgcccctgcctagagaggcggtgccgcggccggggaggcgcggcgactgcagcgcgcccaggcactgcggagggccagccccacgtggggggtggggagggatgcccgctccgccccgtcccctccgcgccgggcctcgtctcagcccgccacggagtgggcgggacgccaggcaggcgggggacgcggcggctgccagccaaggggccggagccaagagatttgcattggaagcgccatcctcttgcgcgtctgatgaggaagcagaacccggtgaccgactgagctgcatttctgaagcatttgctgggttttgcctcactaagcctcggggagcactggggcgcgggatgggggaccctgtcacggagccgacacctgctcgcgcgcctctcccccgctcacgccgtgccgcgggctcgccctccccatctgcagcgcccgcagcgcctgcccgccccgcccatccttcctcctgggcaacccagaggatggcgtgaggactcctggaagcccagaggaccggaccaggggcgtggtggggagccgtagacccgagtttttatccttctctggcgccgacactcggctgcggaatcgagtttgagctcggtgtagctgaagtttaaattgtagctgtttcaaaggtagaccccacctcacccccacccctggaccaagacctctggaagcgtcctgcctggaagccgcttgtggggagggctctcctagggtctccaggctcccgctggagcacgcctggaggtgggtttgccggccgttccctgaaactggcaccactaccgccccacccacccactccagctggtgggaggcaggctgggtttctgaaaggaagccgcccgtgtgctgcgcctgggggctggggctaggccttctgatcaggaaagcccatggccctgctttggcacggatttgcccccgtttggccgtttgtgcgtgatcacagcagctgttgttggagaggaaggcagtgataacggggcttaaagcaaatcggagatcttatccgatttggacaggctgaatttaaggcaaaaatcactgtctctccttcgagcactcacgtctctgtaactgaatgaaaggctggtaatgcaaatagcatttctatcccagtaatcacagaatgaacacaggaagggaattaattcttttagaaactgccaatgctatgcgtatcttccgatggtttttttctaatgtatctaaggcccaggctagcgaacaacagcaataataatgatagtaatactgttggccaggaccagagaggcccagggctgcggggatgaggagggaatggcctcctgtcaccgcccctcctgagtctgctggagaggcgccagctcagcagcccggcagctcttcctgcctctccccaccccatgtccctgcttctgtctgcggggtgtccctccccacaggtttccttccgcctgggctgtcccatcctgttgacccagcctgagggctggagcagttggccctggacactgtggcgggagaggaagctcctgtatgcccctccggcaggcctaccttccttcctgtcgggccctcccctggggtggcttctgctagaccctccaggccagaaccctgtcccttcctcaggaatgtggggcctgctggcctggctccccagcgggctaagaagcagggagcggtcttgacttgtgagagtgattcaaaacaggaaagaaaagagaaaaggggtaggaggaacagtgtggtgg

SEQ ID NO: 51150 - DNA, 1071 bp, Homo sapiens
atgcaaagaccatgtattttcttccctgacatcacacttcttaggagagtgtcttgcatttataaggccttagtaaatttttcttgactagggttcaggtaactatcggtattgcaagttggtttttattattgtgagtgcacttttacccccagaaactctgaagaacagtgttatacaggcacaaaatttgtagtgttttcctagtagcaacgggtacaagaaaacacagtcccctaataccacccaaagccacagcctgtcaggggagccatcatggaaagtgtcaggagctaaaggtccagggcatagctggtggccatctgggaggtcagctgcccctggcggtgtcaggcagccccatgcacacctggccatgagccttggccacttactcacctcgtgttctgcagcaggtggtggaagacaaacagctcagagctggactcagaacttggcagagtcctgctttcaactacatgcagccagaaaactctggaaaactgaactgtttattggggtcaaactttggtaagtccgataaagtctggctccaggtgtcaatctagtctcttgaaagaattgcccagaagctcactgctgactggctggatgttaccagtggcatacagcctctgcttgtgggtggaatccggcagctcggacaccgccccacggttcctgatgcaagcctgggcaggagctagagctaggggcttgcagccaaggaggagataagtccaggggagccctgcaggctatcaaaccatctgccagctggactcgctccaggccactggtgacccttgccatgacaccggacaccagtagcaagaaagcctgcaatccagtatgcttctcttttcctttctacaggactcctagagtggagctagctcccgtccttccaaatgcagcaatgacattaaggacattcgttcacatggttcacagttggtgttgggaagttgtcctacctggacattgctgtcagagccatggactaaaatactcaattctggcctaaataaagcaagctctcggtgttaaagacttttttttttttttttt

SEQ ID NO: 51151 - DNA, 806 bp, Homo sapiens
gatctttgtcacttcacttcaagggagttgaatccgtccccgacttgggcattgagcctccttctctgaccttgctgggtgctggcacagagggtcaagggaacagtttccccatctcagagactggtgtttctgggccacagtcaataggcctcatctgagcctttccagaggagtgaactcagtcctgttagtcaatagaggcccctctaactgggcaccttaattcaaacaggcccttccaggcctgtttgacactgggtggctctttgctgatctgcccccagctttatctgtttgtgctgaaaccaaataaacaatctcaccactcgggaagggttaggagtaaattgggaaatcactatcagaggcacaacttgattgggaacaactccagatgagtaattatgacttcaaggggaattctctgagttgctgcagctttggaagagggactcttcacgtgtaaattgggccatctcacagctttgagcctaataatttaattagctccatagatagttagacgttatcaaagccaatgcagcatgtcaaatagacagttttacgatcgccgtgcgggcgccttcatgatccgtgtttgtgaataccagacatcccgagctgtctgcagaggctgcagtgctgatcagggctccccagggctgcaccagaaaccctcttagcatctcaccaggtacctgttttccatctgatctgaactgggaaaactctgcagttcagctctcaaattttaaaaattagttttattcatttgaccgtttttggaacattttaaacataca

SEQ ID NO: 51152 - DNA, 1196 bp, Homo sapiens
cccatctctactaaaaatacaaaaaattatccagccgtggtggcgcatgcccctggtcccagctactcaggaggttgaggcaggagaatcccttgggcctgggaggtggaggttgcagtgagccgagatcacagcactacactccagcctgggtaagaaagcaaaaccctgtctcaaacaaacaaactaacaaacaaaaatagaggccaagtaacaagataagctagggttagaaaggaactagaacaaacatcctgagagattgtattttcttctcactcctccataaaccagcctcacatctggtttcctgtaggtacagagaccgaggcagggccaggtgctgcccaggaaggagcgggtctggtttccaaatcagagggccggagcgtgagaacagcctaagtgggccgaagggcagggagagagctgtacggctgtaccctttctgcatggaaacaggacagcccagcagtgggtggtagatgccagggcctggcatggggaaagcgcttctgattggcacttcctggcatacctgagtggcttggtaatttcccgttcctgggacatgtgggtgcttaggaacattttaacccagaggcaaccaaggaaggttttgtcttgatcttgcagttgaagtaacagaaaatccaactcaagtaaaagtaacaataggaaatatcatacagcatttactgtatgtcaggccccatcccaaccctctctacattaattactcactcctgtcaacaatcgtatgaggaaggaatcctattatcatccctattttacagacatagtcactgagtaacctgcccaacgtcatggagcttggcaagccaggattaaaaccctgcaacttcgctcctgctaactcttcccccctccagccttttgagatcaaacaggcaaaacatcaggtgtgctgggcttgtgtaaccacgtcatagaaaggagatgcaggtgggtcttggaagacagggatcaggaattttctctttttgtttttcactttttatttttgagacagggtcttgctctgtggcccaggccagagtgcagtggggtgatcacagcttactgcagtcccaacctcccaggctcaagtgattctcccgcctcagccttctgagtagccgaaactacagttgcacatcaccacacctggctaatttttattttatagattgggg

SEQ ID NO: 51153 - DNA, 913 bp, Homo sapiens
ggacacattggggaaggagcccatcctgagtccttgaactatgggaacctgtaaatattgggtgggaatactaatcccacggagcattccgggctatcaggtgaaccaggtgaagtgccctggcagcttcagaataaacatctacaaaggccagggtgttcacagctgttgaagaggagcctgtggatttttggaactgacacccctgccagagaactactagttttaactgcagttgtgacaattaagcaagagacctacaaacatattgcttaacacttgtctgtcaacacccgggctgtccacagacctgtggctgccttctcatggaacctgacatctctatttggacagtctcccctgcaaagtgtttccatccagagaaagttcaccagggaagcaaaaggcattagggtttgcagtcccactgcccactagggcaaaagccactaggacgggcatctaaccacgtggggctttggagagtcgaagccagcctggggtgggggtggggtgctcctcctgcaggtcccctctccgcccccccctttctggcacaaagagatatgttctctgcatggctgtttgccctgagaagctggaaccaggccatgggatgctcaggctgacacagggaacatgatcctgcccgctcagccctccactggcgggaagctgttgtccttacaactccagtttggtgattctcaaacttcagtgtgcatcagaccacctggggggcaggggaggaagcttgttaagaaggcagattcccagacacacccccataaattcttacccgatggatgagactctgcaactgagaaatatcatccccgtcagaatcacaagttaaactgtcccccaagcaatgtttaaaaaatgtctgtgccatcattgaaaacttgggaga

SEQ ID NO: 51154 - DNA, 1200 bp, Homo sapiens
tgggtgtgtggagggacagaggtgatttggaggagagctgtgaggatccagaagatgatgggagtggaaaagaggaggtagagactcagaagcagaataaataagggagctgggtaaaggcagaacaagaaaagctggaggaatcacctggggagctaaaggaatgctgggaatgagctccccaccaccagggatccctatttgatcggtacaggtagctgagcactggggaaagacattcaaaacagccaggtgatttcaataggctgcaaagctgagagccggagctccaggccatgccatggcctcttatctgggagcctcaccacgcaggtgtccaggtggcctccacccagtgtagacaagccagccatgcttctcgccacctggaccctggggtgaggtcttgagcaacatcaatttccatccaatctaaacttaaatatgggcacgcccagcctccctcctgggaaagcgtctgagtggagctgttctgcatgacctgggtggccttttgtgacatgttctcaggggactctgtgctgggctgtctgctcctcctgcctaactgtattggcacatggtttatcctgttcagcattttcttatataggtaatctttttctaaaaaagaaattgcttgttttctaaaggcaaatgtaacacactattttccccaaaaaaaacatgaagtagaaaatgaaaatcgcccttaatctcaacacccaaaggtgacgccagttgagaactggagaaccagcagctgacctggttgtcacagctggggcttgatgtcccattgagcacaatcagcgtctcagagcaccagcaccagccaaggccactgtgactgtgaagatcgaaacaaaaacaagagcacagtccaaaccacaaaaataacccaccatccccctatcctggctaatgggtgactattttctttgtttttgtgtgtggttgttgtttctaccaatttatagcctcagtcaattcatctccataagaactattagacactcatctcatccaatccagagcaaagatctgcttccttgcaccatccccaagcttccagctacctaccccaggcccacatcttattatgagtcctttcctgctcctcttactgggacaccccacggttcccatggtgtgcgtgcttccaaactgcaataagctggtaaacccaactccacgtgt

SEQ ID NO: 51155 - DNA, 3758 bp, Homo sapiens
ctcttatcttctttttcctggggggggggggggggggggcgggattttgcagttgttccttgtattagtttcctgtggcctttgaaacaaatgaccacaaactgggtggcttaaaacaatagaagtgtattctcacaattttggaggcaggagtctaaagtcaaggtggcctgcaatctctccaaagcctcccttccttacctcttccagctcctggtggttctaggccttccttgtcttgaggctgcataactccaatctctgtctctgtcttcagcaggccttctcctcctatatcacctcatccagccaatatatgtgcattatcaagtaaatgaagacatgattgaagttaaaggttagaagaaacagagctgtctctcttccctcccagctctccttcctcaagccttcccaaaccctacccccaactcactaattctctccccaccccacacagaattgaaagtttcttggcattttactgctgtaaggcgatgatgagggggaaacacagtgacccaatatgatgggagtgtcagaaagtatgagaaatagccaaggccaaaaggggaagataaggaaggcttgactccctctgtgtggagagatctgaggaggactaaagggcagggccaacacctggaatcccttgtagggtgggaggttcttcatgagagccaatatccctaagtttcaccaaactcaattaaacacacaggtcagatttatgaggctggtcaccagggagtgtggttttcagtctgtcagaattaccaaatgagacatccaaggacaggaaccggcaacggttcccaacatgctcaggccactatggcctggcccacaccgcatgcactcaattctgtgggaggaagcttgagggcctgggagctggagttcctggcgtggacacagagaagtacagctgtttcctttcagctttattttctagtggaaatttcacaagccaagttttggaggtggggagaggtggggaaagatgggaatctgacaatgtagaataacagagttgacagtggatgtttcctcctgagctaaaccagaattttcctgggcagcaaagaataatagaatgggcccaggttttagagcccaagtggtctaggtgggatctttgaccccgccacttgctaacggtgtgccctaagggtagttccataacctctctgagcttcgattttgtcttctgtgcaaaatagggctgaagcacctcacaagattatcacagagatactctgctactggactgtcttccttcccttctcagctctctaatgaacgctctggcccacattttgggttgaggcctcccaggcaggcccacccgctttgttcctgccctcttccctccctgttcacctagaagggacccaagagcagctcccaggaaggcctgccccatcagagctggctagcaaggggcctgcggggttgctgagaagacaccactgcattctcacccagtgacctttccccagggctcctagggagtgggtgctcacatctccccttcccagggtacctttgggtggtgcacaaataaccagttactcagctcatgtccctgaattggcaggacagccttgtaggccccagggacattcagtgacctcagtctcagagaatgtgggggaattccatgagaggcaggactgcacagcccagcctgaagggaaggtcagggcaggctggggagttgacagagccagctgaggtgtggggtggtgtactgtacccctgggtgtcagggtggcccccacaagcccagggaagacagccagctgcgtggtctgcaggccaggcgcacttgcggatgttgccacactgagcctgcctctcccgcactggggactgcccccagaagcctgaattgttttcaaggcttcctactgcagctgctgggccccgcctgtttcctcccgggagacattgctcaaagagaggcccagggccttttcccagccccggggggccgccctggagccaggcctcagaggtctcagctctggagtccctgccagctgcttctccagaatttgcttctctgccttctcctactggggtggagatgaagagtatctaggatggccagttggagcagataacaatacaggatgaccagttaaatgtgaatttcaagtaaaccgtaaacaattctttatgatcagtatgtcccatgcaatattcgagacatacgaaaaagtatttgttgtttatctagaattcaaatttaataggccacctggcaatcctggcctcacctcattttttaaattctaagaatatccctcttctcagcttcttatctgtggggagacacttagaaataagggcaactgggcgtggtggctcatgcctgcaagcccagcacttcaggaggccaacatgggaaatcgcttttgcccagcagttcaagaccagcctgggcaacataccaagaccttgcctctactttaaaaaatttttattttaattaaaattgtaaaagaaataagagtacacataaggcattagtgttttccatgtgattacaagtattaatctggttttaaaactctgggacactgttgatctttgcaaacatttcctttctttctttctttttcttttttttttaagacagagtctcactctgttgcccaggctggagtacagtggcacaatctcagttcactgcaacctccaccttccaggttcaagcgattcccctgccgcagcctcccgagtagctgggattagtcacccaccaccacgcccagctaatttttttatttttagtagagacagggtttcaccatgttggccaggctggtctcaaactcctggcctcaagtgatccgcctgcctcagcctcccaaagtgttgggattacaggcatgagccacctcacccagccgcaaacatttcttaaactaaactttgtattaactacatattacatagttccttattgtaataaaatctccagtggctaatttgttttctgtgcttttctttctgtattttgttacccatatgtgttttggaaatgtcctgctagcgtatgggagactactctattcttatctaattatcaatgctgttgaaggaaaatatccttttacctttctctcctgttccttttaagaaaaacccaagcacgagcctgtactctgtttcccctggaaaaggaagctgctaggtgggtcccagtgtttttgggagggtggctcctggtgagtgacagacacccctggtgtacgcagagtcttaaatgtctgctctggactttgagtatgtgaggccagaggcccaattctacaggctgggccagaggagggcgtttttggatgtttttagggctgtgagaatgtgttccctttatttgtgcctccttctgcttcttttcccatcttttctccaaaggaatagaaatatcaatgttctaaagtccagagtcacaggatgagggtgttgggggtagagctcctccagggcctgcacaaaggtcccaggtctctgcctctgagcatgtggtggggacctgagtcaccttgcaaatgcaccccagcttggagagcctgccccggcagctgcccgacccctcccaggcccagctgctcctctaggtcactcaggaagaagccttgggaacatcctggcctgcctgtggcagcaccctggcagggtaccagcttggggcccttcctacccttgcggggagccagcattggaaccaccccgctgagtctgga

SEQ ID NO: 51156 - DNA, 1041 bp, Homo sapiens
cggatggatcacctgaggttgggagttggagaccagcctcaccaacatggagaaactctgtctctactaaaaatacaaaattagctgggtgttgtggcacatgcctgtaatcccagctactcaggaggctgaggcaggagaatcgcttgaacccaggaggcagaggttgcagtgaactgagatcatgccactgcactccagcctgggcgacaagagtgaaactccatctaaaaaacaaaaaaaacagaaacaaaaacaaaaaaagtgccaagtgaaagtgaagacacagccacgtggagagaaagccatgtgcagagggtgccgtgatgcagctggaaaccaaggaacgccaatgattgccctccaggaacaggtgaggaaagcagaaggagccctgctgccacctggacttcagatctctagcctccagaaccgtgagagaatgaattgctgttattttgtccggtgctttgttgtgcaatcctaggaaactaatctactatatgttccctggtgtggtgtcagctgagcccgaaaacctaaggtacaaaggacagttcttgctccctctcagaaaggcatccagtccagcctgctaatctgttttccctgggaacatttcttgcttctggtcacaggagcaagagcccagtaagggtccatcagaggcctgtcatccattagggcagggtctggtttaatgctttcttcagggccacatctcacgtggtaagaggaacacacaaaaaatcaacgtagtgtttttcttcaaactcttggattttggccagctgcagtggctcacacctgtaatcacagcagtttgggaggctgaggcaggcagattacttgaggccaggagtccaagaccaacatgttgaaaccccatctctactaaaaatacaaaaattagctgagcatggtggcacatgcctgtaatcccagctactcagaaggctggggcataagaatcacttgaacccgggcggcagaagtttcagttgcagtgaaagggcaagactctgtctccaaaaaaaaaag

SEQ ID NO: 51157 - DNA, 5395 bp, Homo sapiens
tcatgccactgcactccagcctaggtgacagagtaagactctgtctcaaacaaaacaaaacaagcaaacaaacaaaaactactaaaagagtatgattggaatatttgtaacacagaacagattaaatgcttgaggtgatgaatactccacttaccctgatatgattattatgtattgtatgtttataccaaaatagctcatgtaccccataaacatacacacctactatgtacccataaatttaaaaaaatctagaaaatgatcaaatctaaaatctaagctaatttctatttgaactaagaaaaattgttttccttaaaaaaaaaaaaaaacgcagatagggtcaaaacccaagatgaggctgtcttggaagcagagacagcacacaggaagccccatcagacacaaaggaagcctatgagaccaaacgtgggggcagaagacagaagagccgacagctcatttgtttccctgggagttccactaacgagtggcaaggatggagtgcttgcctcccagtgggctgctgggtggagaggaaagccgaataaagcaaagcctctcaaagcaggcaaagcatggtaaaggctgtagtggaagtgccaagggtcaagttaactcatgagaaaagcttcataaaggtggcaatccagctgggcccaagccaaaagcgtaagtaatcagaattagaaacggtggaggagtcaacccctactgagacagttcgggttctcagcctgaaggaaaatgtggaagttggaggttgtggagtttgtggcttaagccacagccccctcctacacctggccttagctcccaggatacctgccccccactgggccaggccacggacttcccaaagggcaaccacataaagcacaggaccttccaccactcacactttccagacctatccctggccactatttcttccctctgatgtcacagggctctgcatcttgtcccacctcagcaaaattagaccccctggtttcccaagagatgtcatttttaactcttttctacaggcgcctggagcacagggcttcccagaagtctgattcaatgctattttgagctgggttagattggcagaaatgaaccacccacccttggaaaagtcacacttgggaaaagactgccccagcagaggtggactgggagctctttctcagcatgagtttgaatgggggtcatatggagcaaggagacgctcacatagtttctgcaaagctgtgctgacaaatagctctggacagatccagaccggttctgttcacccagctgttatgccgcttctgcctgcaagatgagaaagacacctccccttcccaggttggcatcatttattgaaccatggctttggaaagaacaacaagttcaaatcccggaaagaagctgagcgtgaattccagccggaggcccaccaatgacagccctgtcttgctatcctggggggcatggcatgggtgggcggggtgcgatggggtggagggaaggaaatccaagcacctgtggatgcttactgccttactctgtcctcctggctccacgtcacccttccttcctgcctgacgtgatcagggaaatctgcggggttaaagaagcttctagaagccacttagtccccctgcaggtagatgctttttttaagggtctcttgctcactttgagcattctagaaccacagatgcagcctctcagagtggttacccagcaccaactcaggggcagaccatagtgcccagccttgttacagcgaggaaggtgactctcaatggactggggctcttgaattcctttaccctcagacatacatccttccaaccccatcatcccacgatggtgacagggtctgtggtcaagggagggggtcaggttaggtcagtgcagttcttcaagtcggaccccaagcaggcagcaccagtccccaagagtagggctcggccagagctgctcccatcaaagggaactgggtggggccctgttatccagacacaaatatctgctgggcccctgggacccagggtgtccaaaggtggttcttttcctccctcagaaacttggcccagggcctttcccagcaagtgcctccccctcctcccgccctcgggttcccttcccagccacccactcagtgagggcttcagcacgtggctgtgtggggcggcgggtttcctctccgccccggcagctctgcagagggtggttttcgccctctcttctcccccatcccccgtgacttcttgtaaaaggctccggcgtccccacccacctccgccctcccgcggctgccagaccggtgcccgcccccgcctcccccggaggccgcgctctctccccgcccctggcagcgggctctgcttcggaaactgttgactcagagggtggccgggcggccagcgtctgatgtcagcctggagctgggccagggagtgcagggcgggcggcgctgggagcgagggaggaagggtgcggggccgggccgggctgggtgggcgcccgcggcaggcgtaggggctgcgctcggcgctcccggctgcgcgctcggcctcggcggcggcccgggcgcccgtgactcagggtgcgtcaccggagcagatgcccggggcggttggaggctcccgggctcccgctgactcatcagaaaggcctgccgcgcggcccggggggcgggggaacgtgggggaccgcggggagctgccgggcaggcggcagccgaggtcgtttgaggcgcgcagagccggaaaaccccacggagacggctgggcgggggcggggcgatcggcactgaccaggtcacctgcagcgcgggctgacggcgggcgactgaaggagggagcaagtctcccacccccagcagccggcggccgcttccgaagtctgcccccttccactgcggagcggcgccccgcgggcccccagccagcgcgcccgaggcgcccccgccccgtgtcgctcgcgctgcgttattgggagaaggcggttcctgagcaccagcacgggcctcggtgacaccggaggtcgctggggtcttccccttccccttaagactctgggtctgtctgtgggaagagctttcattccccaccccactctatgccgaccctctccgggggaggctccactggcactgtagacaccacgtgctgggtaaaaaggcctggtcccagcgcttccctgtcactgactgctaaccacaaggcgccgtggcactcaggaaatgcggcaggggggctggagaactatcaggaaggggtgtgggcagagaagaggcttccaccctgtcttggaacacggacacagtccatggcattcaaaagaggtgggaggctcctctgtgcacgtgccttccgcccccgggacaggtggaggaggggatttgactggtcctcaccctctgcatttatagtctgggcacaccttgggcagtgccgcaggagggcgctgtggagtacaggcacatgcagaaggtgtggcgagggcttcctggtggagctggcagtagggcagggaccttgaaaaggaatgatttgaacagatcggaaaagacattccagacagaaacaaatgcctgaaacccaaaccgagaagcaggaaagagcagactgcgttctcggaatggcagggagtccagtttgactggaagacctgaggctcagaggcgcatcacggcccagatgcagaccacagaggcaggcacagtggcccaggaggaccgaggacctggagtcacggggttccgcccgctgcccctggggaaccgagtcatgccagttcccagacagatgaattccttccaagaattccacagtcctgctcaatcctagccgccaagcctcctggccttggatggctgctgtctaatgcagatcctctttcatccagatttcaaatatttttcctattctgtcctttgatcactaacgtttatgtttatctacatcagcatccctcaatcctgacggcactctgaaattatctaggggtgctttaaaaaagaaaaatgttgatgcatggccctcctccaggaaatctgattttattggtctggggtggggcccaggcatcagcagacttttaatgagcagttagagaggagaaccactgatggagatggtcaccagggagtgtccaggtcagaccgccacagaagagtgcagcctcctggccttcagacccaactgggacaaaccctgagaacagccttggcagacctccaggggcagctggactccctgaggctggatgttgcagcctctcccaggcatccactctgcagctgaggccaaagtttccaacgggaagggagggtgaggcttctatttgtttcccaagagccagctgacctttgaagctagtgataaccaccacaaacctcactggtgggagaacgaggcactgcagccagttctcatcaaccccacatccctgcagggggccccaaggcggatgtgtcaccatcctctgcaacgctgggcctcagaggtggaggaggcccagccatggccagatgggggatctggggaacaggtcctctgctttctgggaaaatagaggtgatgattcctggccccaaaggttcttgttgggagtcttgagataaatcccctagcagtgctcagcatggggagaattttcagtgactgttcccttcctcctgttttgctaataactcttttcacaaatttaggagagtctccgagtctgggccttgccactcctcactcagcatctgaccatccccacctcctggatctacagggttcatagaggaggacccagaagagggaaagtcaggctgaggaacttggcctccctgctgcaagggaaatgacatcggttaccaaggaggtgaccagctatccttttccaagactgaaaagcagaaatacggccctgaggctagagggtctaagagaacaataggaagaatttcctgacaaaggacaatgttgcctaaaggactcaggaagctctgtgaaaacaggagactcccgagcagagcaccagacccttctccaccaggcagtgtttttcccatatgacaggtgagaaaactgaggctgagagacatgtaataacttgctgaagcagcaaccagcacaccatatagctgaaatctgtagatcagcagttaaaagtggtagggcaagtcctctctgactttcagcgctaagagcctaggattctgtgtttttctgcttaagcctgggaatcagagtcctacaaaagccgcgcctaatcctgggggtgtgggctttaaacccagagagaaagcatgttattggaatactcctgcacttttctccctttgaatcccaccacggaaagaaaattctgtgacgtgtacccagtatttattggagggtatttcctagcaagaaaatgaggg

SEQ ID NO: 51158 - DNA, 1884 bp, Homo sapiens
tagccgggcgtggggtggcgcatgcctgtaattccagctactcctgaggctgtggcagcagaatcgcttgaacccgggagacagaggttgcagtgagttgagatcaagccatcgcactccagcctgggcaacagagtgagactctgtcaaaaaagaaagtgtggtacatctatactaatggagtactatttagccgtcaaagaaaaaaaagaaaagaaaaagaaagagaaagaaagaaagaaggaaagaaagaaagaaaaagaaaatgaaggcgattgtcaacagcctctggaaatacagagcagggtccagaaatggccccttcttagatggcgggctggacagtgctgctccttcttagccactggcggcagaaagacaaagcctggtaattgttcttgggattctccctgtcacctctccttgtaggtcacaagcttcctgatgcgacagcccgtgggactactagaaggaaagatactccttttcccattttacagatcaggaaactgagactggacagaaacaccaccaggattgaactgtgaatggatctgactccaacccacaaattcttcacctggtctcgaaaagaggccctggcaacctactgcgcaccagaggggaacccgcccgccgtcccaggccgggctctccctgctgcggagcggcccgggcgcggcgggacagggaacggaaggaacgggcttggcgcgcactcgccgaggcccaggcaggattcgagcgccagggaggcgcccatttcccttcccccgcgcctgggaacgcggtgctgggggcggggcccgaccgctgccccctccaaacgcctcgaccgccaggtgccccgaagcccggcctcccctcccacccccgcgcctgttcccggcgcagcccgagccgtggcagtcacgtctccccatccggccccaaagtaagagccagccgcagccgcgccgaccccgcgctgggtgggagggcgcggggagggcggggagggcgcggggagggcggggcaaggaggtgaggggagggcgggttgcccgggccccgcccgctgcgcccaggtcggccggggagaggcgcgggcgagtcgcagcgccgcaaccaccgcccctgccgggcgctcggcgagcgggggcagggcggggtgaggcgtggccggggatgccgcgaggccgcgcctccagggctgtgcgcgggcgggtgttgctggggagaaaagcgcggcacggccccgcccgagtcctgcgggcacagcgctctctgctggtgtgggttgagaactgcatgagactaattaaagaccaccatccacttaaaaaaaaaaaaaacaacttaattcgaatcggaacctcactgtgttactgtgaatatgcctaattactattcgtcaattttaaaaaattaatacattgaaataaactaagaaagaaaaacctaattcaataatgtgtcataggcgttgcagttttgaaatgtggagaaggaaaaaagaaaaagaatcactcatcatacctttatctagaaagaagcacttagaatattcgtgtctgtctttccagggcttcttatctgcaaatctatgcatgtatgcattctttagaggataaaaaaggccggtggtgactcatgctggtaagcccagctactcaggagactgagacgagatgatctagggtatcgcttgagcccaggagttcaaggttgcagtgagctatgatgacacgactgcactccagcctgggtgacagagcagggccttattaataaattaattaatttataaattaataaattaatttataaattaataaattatacaatattgtcagctttgtgaacgcagaggccttattttgttcactgctctatcctcagtgc

SEQ ID NO: 51159 - DNA, 3220 bp, Homo sapiens
gataaaaccttgggggagaaaggcactgactactcgacctcacttatcaccaccgataatcattttcttttggagtctttcctaaactccttggggcttatttctaatcatgatcagcatctgcacgctctcgtatatgtaaaagaaattaatgaattatgagggcctttctagacaatcatgagccatgtttctgccaacccttgctgtatttgatgtgctttgatgtacttctactttgtgctttgatgcacctctacatcaaccttcgctgagcacaaggcaattccccctcctttgagtccttagattcccacccagtctgggaattcacgatagaaacacgacgggacacagaactaatataaccaagatgccaccacaaaattcagttaaatgtgctgaaacatgaggcggtaaactgtgtccccgactgtttcgggtttctgaaccagcagctttgtctacgaaacacacattcaggataccgtgtaagggttagaacatgttaccaccaccaactgttggcagtcaagacagtagttgataagccacccgtctaccaatctccctctttctgcctaggaaccatggcgcggacggaaaaacgaagccatggtgactaatcctcaggctccaggaggtgactggggtgagtgaaggcgacttgacccaatcaggagcgccgcaggggcggagcagcagcctcgaggcttccagaaggggccaaaagcctctcgctggctacctgacaccggggcttccccgccgccaggccccaagtggcgtcaactttcctccaccagagggggaccgcgctccccgcgccccccaggaatccgacttcctccgcagctgtcaccagaggccggcgcggggcccgccccgctccattcataaccaggaccccagccgttgcagcccacagcgccgcccgcccgccgggcttcgggaggcaaaggtggcggcggcgcaccgcggagtaggggctgcgggaccccggcccctcagggctgcggccgggccccctccccggaaacagcaatgcaccacgggagaggggtgggggccgcacgccgccaggaggggacggcgacccccggcggcgagacccccgcgcgctcccccactggcacacgccccctcgccccaactgctgcggctccggctccgccaagcgtccagcagccgcccgaaggtcctgaggcgcggcccgccgcccagccccgccgccgccgccgccgccgggggcacagacagccgccgccgccatgttcgaggcggccggccgcggggcgctgcggggacgtcttaagggcggcggggcccagccggagccccccagccgccccccaaggccagccccgcgtcctggcccctcccgcgctcctcggctcggtactcacgtgagataacggcccaaagagtcgggtaaagcgtcttctctttttcggcggaatttttaaagagggatgtggttaccttgagcagaaatacccaaggcggcctgggccataggctgcgggaacgacttgggggtaaaagcgcggcaccgacaccagctgtgtgcagcagtggcggcggcggccgaaggagaaatagaacagcgcaggcaaaagaagaaaggcgcgggctgggtgggaagaggattcggactcgtcacactgcagagcagcagagcgagaaaggatgagaagaggcagagaaggcgacggcagaagaaaaaaggaaaaactgcggccgcgatcagagcctgaaagtgtgagaaggcggcgccagcgacgccagtatttatattagggggcgtggcctggtgacatcacagctggccgggcagccgcgcgagcggggcggaacccggttgcagcccggagaaaagggagggggacggaagaggaaggaggactgagcccgggagagagaggggaggggtcggcgcgcgaccgggtcatgcaggtgcagactggccggtcgcttcccgccctccagccacccgcagctccccggcaggcgaagggcggccgcgcgggtgtgggccgagagagggaggcggctcggctggagcgcgccgtccgcccgacccccgccgcctctcgggcgcctgcgctcacgctgcggggcccagcgcattgtgagccgggtcgagctccacgctggcagcgtctgagagctgtcctgggccggaggtggcgcgaaccctgtgcggcctagagtgggcctggggtaagcctgtcggcgccgctgccgagccttcgcgtccagctccctccgctttgtgaggcctgtagtttaccctggggagtgtcctcccgggctgaggcgcccgccctcggtgatgcggtactcctttagggaagcgagttcctcgtggccagaaaggaccggcccagtgtccgggtgttaaaaagggttgtgaccacgtgaaaatgtcctcagtgctcgaacgttgcaatacggtgcagtggaaattttttaaaggaatatggcttttatgtcttcatttttaaaaggattggtggagtcagtcccaagcaggacccgcgttggagaggggattactgatgttacaagcgcacattacttcaatcccctaggtctcattttcgcggtcgttttaatttttctactccacaacagacttttttttactaggggttctaagattacctacatagcttttaatttattttcatcttttttagatgcctcagcactaatgatcatgatcagagaccccgagttctctcgtgctgctacgcttcgcaacacatagcacaaatggaatatgtgttgacacacccctctgaagttaagatctttgatattaagaccctgacttttttccctttcattcttccgaaccctctgtgtactttgagcagcactgtggttgattaataaatcatcaaatgtgaaaggaagaaagcgaccttcctgtgtggaaaagcagggtatcttgcgaggctgtatgagagagtattcggtagaatcaggagctgtggacgcattcctgattttgtttttccttattttgctcggctatatcttggctctgtcttttatttcttcaaagttctgttctattcagaacatttgaaaacacagccattcactagaccctctctggtggaggaagaaaaactagagatgaatacaatatttgaaaccttgcttacaatctagcaggggaaataagacagcaatacaaaataaattgttg

SEQ ID NO: 51160 - DNA, 957 bp, Homo sapiens
ttcctccaaatctccataagtactttcctgccctcagttaactaagctagtaaataccaatgcccaaggaccatgtgaatcttaacaggaccctcccacagacaacatgtactgaagctgggaggaccatatagtttatcacaaaaatgaagacacttttgagactgaaaggggccctattaacaattattccaggataacaggtataaactaggtatgtcctagcaacctgggacacaggtttaggttaagtataacctaaaggaaggcctgtaacgaaaagactcaggctgaatgctaaccagtggggaaaacactgggggcagtagttccttgatgtccctcaatcctctccactaagcagtgacatgggcttaaatctggggcctactttccctaagctcagggaagcactgcctgacagtggatgtgggggtgggggatggttgctctagcaacaatcacagaggtccctttggaattgttaccagggtgaactcaccagccaggggaataccccagaaagagctgccagtaggaggagggccagcctcactggtgattggagtccagcagtcccactgattgggagtgctgagccaagcccatgtcgtgcttcgctgatgcatggctgggctgaagaaagagctctttgaatttttcatagaaaagactggtgcccaaaaggccagggctcgagaatgaggctgcctcaagcacagtgcttggcaggacaccagggctgaaaggtacagcaaagtcctcccagaatcgcttgtcagagcagggatttgcatcacagactggccactgcaaagacagatgggaactcacaggttttgtgtgtgtgtttgtggttcactgctgatggacgcatgtcagaagccacctgagccttggcccagccttcatgtggagtgaaaacccagacctgtgtgagcagcaggtacttgaagc

SEQ ID NO: 51161 - DNA, 1572 bp, Homo sapiens
cattatgaacatttcactatagtttttaaaaatcaacaaaaaattttatgtaaaaagttctgtggggtttaatcttttagcagttcataaatccattaacatttgccacagctaccctacagagaggcatactatgtgaacaccacacttggctttctgagctggaactaaaaacaccattactctactccttggagtttccccagagtgagtctgtccacacgtggttgctattggaccctacctgttgctactgtatcactgtgctgtgttactaaggagtgtgacacgttctgactttcaaagcatttacacagtgaataataccacttttgtgctccttggtataaggccacatcttcaagtacttcagcatttaaaaaaaaaaagtgagcaaaggatttatctggctagagtttaaactccaatcattatttagtcagggacagagccaattgtagtgtttaaacagcattattatttagacagggacagagccaagtttacggaattctggaaggcaagcttaacctcggggtaccttagcagtgttctatgtgctggtcctgagcatttaatccagagcaaactggtgatccatttataacccaagttttctctgtaaactggaaataaaaagatggataaggcataactcctgctgtctgtcatggggttgaaagtctaacagaggcgtagaaataatgcgactagggtacaataagtgttaatcagcacatattcaaagtgtgttgggtgactggggtcagggtccagggcaaggtcacagagatgagatggcatttgagccacatcctgaaggaagaatggagttttccaggatgacaaaacacaaaacgaaggaatatgcatattccttttgcatatgcagaaggaactgcatatgcaaaacctcaaagcatggcaggatgggacacccagaaaaccacaagcagccgtgtgtgggtagagcaaaggcgagtaggagagtggcagatcctgaaaggacatagaaagaactgagattttgtcatagctcaatgggcaacatgggcaactgttgaagggttttaagtgtggaaggggcctggaggggcatgatcaggttttcatttcaaaaaagaaatttaagtctggtggatggatttgaagcttgggacaaggagactagtctgaagattgtcagaggaatccaggtgagaggtgaagaaagcccaggttccagagctatttcagaggcagcagagacaagaattgtaactatttcactagaatgaagttcaaaatgaggtcaccgttcctttcatcttggaattatagcaaggtgaagcccgcagagctgaagggcagctggttcctcctgtacccgcttcttgtggccaagccgcaggagcctcagccttgccatgggaatggggcctgtagctgctttttctctctccttcctcttctctagggcacccttactcagccttcctaaactatttgaagacatggcctttaaatttcctgttgtcttaatttattttttttttgactcagttttatggatacttcaaaaatcaagaaaga

SEQ ID NO: 51162 - DNA, 1699 bp, Homo sapiens
actgagacccatggaggttaagtaacttacttttaatcactgttacttatttttttctctttttttgagatggagtctcactctgtcgccaggctggaatgcagtggcgcgatctctgctcactgcaacctcagcctcctgggttccagcgattctcctgccttagcttcccaagtagctgggactacaggcgtgcaccaccaaacccagctattttttgtattcttagtagagacggggtttcaccatgttggccagcatggtctcaatctcttgacctcgtgatctgcccgccttggcctcccaaagtgctgggattacaggcatgagccactgtgcccagcccaatcactgttacttttaaggaaatccatttgactactaaggcataatgtcacagtggcttagacaaaataggagtttctctctcatgttagtctcatcatgagcagtccagggctgataagacagctgagtcttgttggggacccaggtttcttctttcttgttgctctgccttctctagggaataccctattccaccttgtcaaagatggagcaatgccacctctgcattccaatggaagaaatgggaggaagtggaagacacaaccttcccttttaagggcataacctggaagttgggctcatatttcaatggccagaatgtggtccaatggccatacccagttgcaaaagaatctgggaaatgtagtctgactggaaggtgactcatacagctaaaattcagggaagaaggcgagaatggataatggaaaacaaataggaatctctgtcacagtcagaagtcgaactgggattcaaacccaacagtttgacttcaaagccagaactcttaaccataatcttcattatgctgttgttttagaagaattaaatgaggtccacagttggtaaggtctttctctacagtttgagacttcattaacacatgtatgcacatacatttttgctaaatggatagattatagctgctcttgccataatattataacgcttactgtgaaagttgttcaacattgatggggaatcaagtaatgtttcctttttttttctttttttgtttttttgccttgagacaggtttttactctatcacctaggctggagtgcagtggtgcaatcttggctcattgcagccttgacctgctgggctcaagggatcctcccaccccagcctcccaagtagttgggactacaggtgtacgccacttgtagtcaaaaaataaaaatcaatttttaaaaactgatttgtagaggcagggtctctcactatgttgcccaggctggtctcaaactcctgggctcaggtgatcctcctgcttcccttcccaaaatgctaagaatacagacataagccactgccttttatcctcttctcatagactttccatttttagtatttttttgtgagtctttcttctttttcttctctttattctcctctccctccttttcatgcctcatactttatgatgcttggtatatgaggccatcatcagttttataatttttttctgcatcggattgtaggattgggcttggaaataactgccccaccaatgaactttctaacctttcacaagcaagtggggcaaaccagggtaacttcttttttttttttttttttttttttttgacacagtctcgccttgttgcccaggctggagtgcagtggt

SEQ ID NO: 51163 - DNA, 1526 bp, Homo sapiens
aaaagaaaaattcatgtaatttgtaaccattttactgtttatatgtatctcataacatcatgctgtatactttaaatacacaaaataacattttttaaaaaaatacttagaaaatatgagaatatttaaaattaggatacatcaaacatcatggttttgccacaatttgatgattttcattaaaagaaaaattcatgtaatttgttcccacgtgttgtattttagggttgacataatagaacgctatcaaaattaggaagtttcataatgatccatgtatgtacaactgcactcgggtacccctgtcttctctcacctctgtaagagcaattttgtttgcatctctcaagactctggagacatgttttacaaaagcagtttgaagtgagtattcattcatttgggttttcctggtgtggccctttcagctctgcagaatgccacagcaatgaggaaactgtttgtttccaagcaggagatgccaatgtgatgacagactttttgaaagcatgtagctggtggctgttaaatctgcatttcctgccatgcataatggtccataagctgctggatgtgagcagagagttggttaataatcaagccttctttttcatagtgtttaacaatgcaaagtgcttttaaataattattttagctaatcttaacaataaccctatgagatcggtagggatatcctggcaacataagaacatattaaacgtcattctcataagacaaaggtctattttccccagtttagaacctaggtactctctgataagtagaatgcacacttaaattatattattttcaacaaatgtccattgagccccacctatgggccagtgggcactgcaagatgttggagagctgcagatgaacagatgaacaagacacagctgcttttctcaactccgtctctcaggagagagacatgaacaccactatcatcagatgctaaaagtgccataatcaatgtcttctgggaaaatgagggagaggagagaaggtttcagagagctgcagaggatgtttgtgctgataggattctgtctggcagtgaagtgaagggaggacattccagggaatgggtgcagcatataagggggcagaggcatggactacatgatttcttcagagaatgagaggggaaggaaggatgcattcgattagcagatggtggagagccttgtttgctgtgccaaaaggcttgaattagtcccacaaaccacggaggcagtaaagagcagatctagttaggtgtgaatccaaattccaagaacttgctgacttgggggagttgcttaatcatcatctgtaaaataggggttatactcaaccttctgggttagttttgataagcactttataagctggtgtatataaagtgcttggcacagtgcctagcacacagtaagtgttgactattaactactatccagtaatatttcctaatcttttttgaatcaggttcctttgagaatgaatgagtcctctcctcatatacagtattttgtatattattt

SEQ ID NO: 51164 - DNA, 998 bp, Homo sapiens
tatctggcaatggcaagccaccgcctgagtgtcagctattattgttattattttataatgagagagagagaagggtgactagcaccgagggctcaaaaaaacaaaaaacgaaaaaaaggctgggtgcggtggctaacgcctgtgatcctagccttttttgagaccgtggaggcaggtgaattgctcgagctcagaagtccgagaccagctgggcgagatagtgaaatcccatctctacaaaaagcacaaaaattagccaggcatagtggtatgcacctgtagtcccagctacttggaaggctgaggtgaggtgagaggatggcttgggcctgggaggcggaggttacaatgagccaagatcatgccactgcactctggcctgggtgatagagccagaccttatctcggggggcggggggtggggaaggcacagctatacacaataataagagaaacacaagctagaagtgcataaaaatgtcattcttcatcttccaaattggcagagcctagaagttggctgacactgttggtggaacacagggaagctggtgggagggtaaattggtacaacctgctccacggagagaactttggcaactgctaagaaaattacaaataaacatgtcctttggcccagtcagtccacttccaggaatttatgccacagatatcctggcacatatgcaaaataaggtagcttcaggttatttatttcagcactgtttgcttaacaaaatattggaagcaacctaaatatccatgagtagagaaaggttaaataaatcatggtctatttatacaatgcaacaaataaaatgaaaaacttcctgtatatactgatgtggaacactttcccaaattgattgttacatgaaaaatgcaaggtgcaggattgtatgtatagcaggatataacagaaagcaggttgtggaaaaaaaatatatacctgtatgcatgtgtcttttgttttgttttgttttgttttgtctgagatg

SEQ ID NO: 51165 - DNA, 3204 bp, Homo sapiens
gttccagcaattctcctgcctcagcctcccgagtagctaggattacaggcaccccgccaccacacccagctaatttttgtattttttagtagagacggggtttcaccatcttggccaggctggtctcgaactcctgaccttgtgatccgcccaccttggctgcccaaagtgctgggattacaggtgtgagccaccgcgccagcccatgtgtctttttatataaccagaagacctctgaaagggcagagtagaggaaaagtttttttgtacactcttttgtagttcttgaaatttgagccatgtgaatgtattatctgtttaaaaaaaaaggtgaagattttaattttttaaaacttgtgagtactaatgctcaatgcttcttacctgttacgtgatgattggttctaggaatggtggatggtaaatctctctcaatgacagcaaatgtcaaatacaaaagcaatgataacaaaggtactaaagacccagacattctttgggttctgtgcttgatgatgtaattgttggcttgcaagggagttgttcacgaggagataataacctggttatgcccaacggaatctgtatcaatcggcagagaatgttctgtatttctcccaagtttttgaaaacaatttttttctttttcatttcttccagcataaaaatgcatagttaacatgcatttggatgtcaactgtgagccatatggatttaactgtgctttttttggaaagaagcaagagggagagtggatatacattttcttcacgtttcttctgccttctatttagctagcaattttgtgagagaacctctaagcacagcttagaggaatgtgaagttggcctcccagtgggcactacttctctgttttgagagtttctctgcatggcaagccctcctatactcctgccaaacactaccagtctccaacttccttactacacattgcaaaattttatgcaggttttttcccccttccttctgatttgtttctaatcccctaactccctgcaagtctagttgccctgggtccttctaagactccatggaagtaaatgggtgttaatattattaattgattacttcattccataaacatttactaagtccctagtatgtgtctggcaccatgtcagtgctggaaacttgaaaaagaatgagaaatgattctgaatttaaggcacttacagttgttttggagagacagaaataaagtacagcgtgggaagtacgtgggtgctatgtgagcaccagaaaggggcacctaacccagctttcgtgggagagtgggataggaagggattcctggggaagcaacgcgtgaggaaaggcttaaaggataagtggaagttaaccagggaaggtggggtgagggggatgagcggggttggatattggaggtaaggactacctgtgtgagagtgagaaggagccttctgtgtgataggaggggtacggtttcagcaagagcgaaggcttagaggtgagaaaacaccccaggggtatgtgtgttcacgcagtttaactaggatgtgatgtgtgcagcaggaaatggcagtaaatgaggaaaggaggacgttattgagaacatcaagtgcaacagaggggcagaaacacagggctgaagatactaacaagtaataggtcatgggtgaccttgatgaagtggtttctcaggagtggtagggcctgagacaggatctggtatattgaggagtgaaagggaggtgagcctacactcagatgatagttaacatttacaaaccactttctatatgacaaggctctaatgcattcatttctcacaacagcctgagaggtagacattatccacagccttattttacagatgaggaaactgaggcacagaaaggttaagcaacttgccaaaggtcatgcaggtagaagtggcagaactgagaccttaaggctccagaaaccaaactcctgaccagtaagaaactgggattccagaaatgcagccattgctagagagtgactcaaggctactggagattgtagcacatttatagacacaaagaaaggtgcctggagacatgcggagagtgatgtctgacagagcaaggtccaggaggataaggctgagccctggatttgacaacgagaaaatcactggtgacttctcagatagcagtttcagcagcagctggggacaagccagatgaaccagaatgaggggaaaaagggcttaagagccaccatttaagcacaaggggtggcaatgcccgagggttggatggagacagccccatccagaggcagcagaaagggagtgcattagtcagggttccccagaaaaaatataggagtgtgtgtgtgtgtgtgtgtgtgtgtgtgtgtgtgtgtgtgtgtgtgtgtttatggagagagagagagacagagagagagatttattataaggaattggctcaagtggttatagaggctgacaagttctaaggtctgcagttggcaagctggagacccgggagaattgatgatgtagctccagtctcaatgttagcaggcttgagacctaagaagagttgatgtttcagaatgagttcgaaggcaggaaaaaaatccagcatccaagttggaagacaggcaggaggagttccatgcaggccttcaattgattggatgaggccaacccacattagggaggacaattggctgtactcagtctaccaattccaagactattttctttttttccctttttttcctctgcatttttgctctgctttatcaaatgttgatttcatccagaaacatactcacaaacacacccagaatgatgtttgatcaaatatcttgtcgccctatggcccagttaagtttatatctaaaatgaatcatcacagggagataaggccaagtatgactgcagataaatctgttttggaacacagaaagttcagaagaggacagacttttgccctctcctaataacatatatgcatcaaactagaaacgatctttctttttttctttctttcttttccttccctcccttcctccctcccttccctccctccctcccttcctccctccctccctccctcccttccctccctccctcccttcctccctccctccctccctcccttcctccctccctccctccttccttccttccttccttctttccttccttccttcctccctccctccctccttccctccttcccttct

SEQ ID NO: 51166 - DNA, 655 bp, Homo sapiens
agttaatttgtgtatttttagtagagacggggtttcaccatgttagccaggctggtcttgaactcctgacctcaagtgatccacccgtctcagcctcccaaagagctgggattacaagcatgagccacggcacccagcctagaaacaatttcttaaaccaacttcagctggatccctgaggtcagggtgacgttttccatttctcaaatgtctttgaaagggtggaggctgagctttcaatagtaattattatttataacttttattattatccaaaaaagtgccagttttgtgattggcatttaaaaacactgagttatgttctgatgatgacagactcttgctaaccatatggttaccttgtatcagttaccgagatacacatgttcagccctgctaaacgtcctggcccttgaaccttttcacagacagtgcgtgagtgaggctgggcggttcagtgacctgggcggttcaggagtctgtcgctcagccaggaagtttcacagccagaatttaaacgtacatctgttagactctaaaaccaatagcctcaccactatgcaagcacactcgtaatccagtatgtccaccaaatttcattctaaactatcttaaaggagaaattttactttgagacagggtctcgctctgttcc

SEQ ID NO: 51167 - DNA, 1769 bp, Homo sapiens
aactagtaagtaggagagcctggattcaacacctggtatctattcccttgcgctgaacaactccgtgccctcactttcttcatctgtagatctaaaaggattaaattagaacatctcaaaatttctactacttctaaaactctgtgttctaaattaggacattactatctatctccccaagctaatgaaataagcagggttcctgggaggagcttgttacctatttttctccaaaggagatgctttcccctgtctatgcctctgtcctaaaacctttggtttcccactatctaatgtggtttcaactatctatgaggcgctttcgtggcaaggagtgattctctccagtaggcaatcctaagaacgagcgcagtgcttggcgcacagtaaatgctccatggaccatttatgaaattaagtctaagtggacttcaggaaaatgtgaatctgctaaaatgaactactagccagtatactaggtagaaaacccagctgacgaagaaaaccccaagtggagaagcccttgtagggggttggagacaatttctgacccgcagaaacctgcagtggcgctgacgtttacaagtggtggacaaaacgccacttgcaacactggaagaagcggaaaaccccacccactctggaacaacagcgatcagccccgaatatagggtccccttgccgccccgtagcctcctagtcccgcccctctcccaaggcccggcagtggcagcggctgcggctgcgcagtggcgcgggcgtaggcggagcagcgcgcgccgcggtcagctgactgctgggctggcacgtgacttgttctgtgttcgcttgggtagaggaagccgtgaggccggagcttaggtcgggaagggatggatcgctgagccgatagcgtccgctaggctgtctgcctcggtacctgttactgctgctacttcctcgtttgacaccttcctgggtcagtgagcgatggctctccccggatggggagtcctggtcaggccgaagcatgagctccggtcgctgcctgggagggacgcgggtgggtgcgggggcagagaccgtggcgttggagctggagctggctgggtggctgtgtctggtttctcggcgccaattcaccgtcttgggcctaggttccgtctctaaggaagagaaggagggaaaaagagaaagagctctcgtgggtagttaatgacaggcagaaaggagagatacagcggtctgggatctttcttcttgggtaggaatgcacgccgcctgattgattgaggggaatgaagtgataggtccaggtgaggctatggagtggtgtgtgtgaggtcacagctagcgcaagtgccttcactgggtgtgtgttggggggggcgcgggtgtcgggggtcgggggtggtgggatgacagtttaaaggcctaggagcccctaactgcaggcaaggaaccctcacagagtacacaaggtccctctaggaatgagaaagaacaggaatccagagaactcaactattttttagtagaatgggggagggtaggcaaacaaaacagaacaaaacaaaacaaacccctagaaaagaacttggtgagagtcacataaggcatattgaatcacttgagaaacaggagtaagggggaagctagtattcttttcagaggaaaattctggtatgttagggaaaaatcacatgcttcagtgcgagcccagtacttagcgccgctctgggaatggaacgggtgggatgtgaacagtctatccttaggagttagcacta

SEQ ID NO: 51168 - DNA, 786 bp, Homo sapiens
tactacgtactcacaggtttgcaaatgggaaaaaagtttacatttcagtttaggggcatatctaagctatgctattccctttagaaaattagcctccaaaatcttttgtttcaaaatattatattatttcataaataatttcaagcaaatacagacatccacaatgtagaacatgagagaccccctccctcaatttccacctcccaagggaagtttatgtatttttctaggcccttttctatgtctttacatctctgtctcacacacacacacgtatacacacacacagtttatttttaataaaataggattataccacacacatcctgtcacttgcttttttgcttaagagtatatctaagagaatcctttgtgtcagtgaagctggagctacctcattcttttaactggctgcgtggcgttccattgagtgtctgtcatcatgtgtttagccgagtggatggatagtctgcttgtttttagtttttgctcttaacaaacactgctgcagtcagcatccttgcacagatttctttgtatacttgtattagtatttctgtaagatctgagaagtggaatttgtagggtcataggttatgtacacttaagtttttgacactcactgccaagtcatctgtcagaattctaaactaaagacatgtttggagtgtggatttatcttcagtttttctttggacaagaggaagctgtgaaagattttgctatcagaaaattttggttctttgtcttttgcacatgttctttgagtcttagtatctgtaacgt

SEQ ID NO: 51169 - DNA, 2678 bp, Homo sapiens
taaaagcaaacagaagctcattaacacgtatattttacatatacatgggagatatctaggcaattactaaatctcaaagaagtggcttggaattccagcgtatgtagcatcttcaacaaaaaccagtaaatttttagagaagtgacaagacaaaggaaaaggactttgagtctctaggggtaaaaaattatgggaaggcagatagacagtagataaaggctagttagtaaagcttgttaatgtagattcctctggtgccctctccaggctgataagggtctgaagttgtcttcagtgatcaacctttgtctttcctggtagagaggggaagaagcctttcctcttgtttagtgaccagtgaaaagtaaatttatgccctacttttaggcaaatggcagggggagggggcaggtgggaggcggtgacagagaactacttctccattgccttcagcttaaaataatccttatgccaaagtggcacattttggggtggcatattctggtctcctacacaggacatatcgctgggtgaggaggtaaaaaaattatttttcctttgtgtttttctgaattctaaaagttttctaacattgaatctatttttcataactagaaaatatgagttaaataaaatccatgcagcaaaatcacctggtttgttacagatagaagtaacagaaaattaccttatattcctaaccccttggggtgtcctcttgaccacactggacagatgacccctgctcattgtttggcaaatgccaatcccccaagctggccctggttgtcacagagcttctctgtttcatcatactcagtaagccagtggcttagcacttagctggttgtgtgactcataaatcaggaatgcaaccagtgtggctaatggagaggggcaagaggcggggataggctgtgccaccaataatcagtgcaatatgtgtgcaggcatcgttagaacctttagatatggtctcacttaatctttacaatcgccccatgaaggtggcagtattatctccatttaatagatgaggaagtctagactggggggttaagaaaccaaagttgtaatttttgtttggccaccagtgaaaaatgaaaactctagaccaaatgatggatttttaaactgtgtttctagcagcgcttaggcttagcaaagatgccggggataggaggagctgctgagagggaaggactggccatcggcacctcagttatggcagctctgccttggtctgttttatgggttggcagggatagcttcacgaatgtgcagccagtgcagcctcacggggcctgctgggctcacaaggggccctgcgcttaggacctaatgctctgcaggcaccatcgtgaaatccttcataattttgtcttttaatgtgtgttttataagtaaatccaatggacaatggagcgtgtccccgggcttggagctgtaaatcatacttggccccacttgctgttgcctttctgcctccctgggatatattccctgctgcctgctcttgatcctggtgcgtaaggcctctccttgcttccctgctgccctcctcatggatcagcaactggattgcattgggagaagggagaagggagctgtgtttcatgtccttcaacccccaggaggacctggccataggcatagggaggattggggtcaggtgtgccccttgaagtgtctcaggtatgacaagggagtggccatccccatccaggctggcagcatcatggtgcattcagtggatggctcagtaggggcctctcacagacctttgacccgggtaccaagtcatgacgcacatagaaaatggcaacatctggaggctgggtgtgggggctcacacctgtaatcccagcactttgggaggccaaggcgggtggatcacttgaggccaggagtttgagaccagcctaaccaacacagtgagactccatctccatttaaaatacaaaaattagctgggtgtggtagcgcatgcctgtagtcccagctactcaggaggctgtggcagttcagttgcttgaacccaggaggcagaggctgcagtgagttgagatcatgccactgcactccaccctgggcaacagagcgagactccatctgaaaaaaaacaaggcaacatctgtatggcacactgggggagacagcaagcaaagggagccctggccagccttgactcccattcagcagccccaagggctgaaggcagttctaccctaggcttaggaaatggagtctctaccttggtcttgtgcttcagacaccccttgcccctttcaccccatgagccccacccttcccacaggctgagttatccagaggccaaggggacgtatctaccaaagcctcagccctccttcagaattcattgcttttattcccccagtccattacagacaaatatatggtcttactttgtgtgattaatacacaactcaccccacttgtgactcaccccatgagtttaaaagcactcaacttagtttgcaccctgctcaatcagtaagttcaactagacaagtctgcctttggatgttctggcaatgtcaaattgctatagaaatttgtaaatgcttgcaatcagttcttatatgtatcccacagcagacagtaacaacagtttggtccctggaggacactgagtagcactattctaggctcttctg

SEQ ID NO: 51170 - DNA, 1097 bp, Homo sapiens
cttaattttttaaagaattgccaaattgttatagaaagcaattgctacattttacattcctaccagcaaaaatgagcatcccagtgatataatttggctctgtgttcccacccaaatctcatgctgaattgtactccagtgttggaggaggggtctggtgggaggtgactgaatcatggttgggggatttcccctgtgctgttctcatgatagtgagttctcacagaatcttgttgttcaaaagtgtgtagcacctccccactttgctctcttccccttcctctaaacatgtaggacatgtctgcttcaccttcaccttctgctatattctaagtttcctgaggcctccccagccatgcttcctgtacaacctgtggaaccatgagccaattaaacctctataaattatcctattacaagaagttctttttagcattgtgaaaatggactaatatagaaaattggcaacagagaggtgagtcattgttatacatatacctgaaaatgcaaaagcaattttggaactgggtaacaggcagaggttggaacagtttggaggggtcagaagaagaaaggaagatgaagtaaagtttggagcttcctagagacttgttaaattgtgaccaaaatgctgacagtgaaatggacaataaagtccaggctgaagttgtctcagatggagatgaggaacttattaggaatggagcaaaggtcacctttgctatgctttagcaaagagactggtggcattgtgcccatgctctagggatctttggaactttgaacttgagagtgatgatttagggtatatggcagaagaaatttttaagcagcaaagtattcaagaagtgacctggctgcttctaatatggtcgtatgcatgagcaaagagatgatctacaactggaacttgtattttaaagggaagcagagcataaaagtttacaaaatttgcagcctgaccatgtgatagaaaagaaaaatccattttctggggaggaattcaatccagctgcagaaatctgcataagtaaagaggagccaaatgttaacagccaagataatggggaaaagaactggaaggcatttcagacctt

SEQ ID NO: 51171 - DNA, 1078 bp, Homo sapiens
ggaagtatctcctttcgaactcaagtcacttgggcaattggctttacaaagcaaattggctccgtttaaggattcttgactcctgaaatccgcaaggaagtgggttcttttagagccagcgccaagagcttcaaaaaatccttctaaggtgaacccctccggacccggatagcgagatggggctcagccttgcgcctcgggggtcgtaacagacggcaaggtggaggtggcttcccggccccgcagccggacctcggcaccccgagcccgttcaccggggccgggtcctggcgggccgcggagtgaggccgggcggcgcagcgcaggcggtgcccgggcgcagggccagtcccgccgccgccgccgccgccgccgccgccgccgccgcgagcccggacctgcccgcccgacctggcggcgcagtctcgcgggatcgctcagctctcgctccccgtgcggctctcgaggcagctccagtcccggacgcaaccccggagccgtctcaggtccctggggggaacggtgggttagacggggacgggaagggacagcggccttcgaccgccccccgaggtgaggcttccacggctgggactgggcaggggccgggcgggtgccgggggaagcggggagggcctcgaggggcgaggggccgcggctgggatgaggcgcgccgggagccgcaggtgctggggaggcaacggcgggacggcccgcacctgagtttcctcggaagcgggaaccggctctgaaaggcgatgccggggccccgcggcgccgcgcaggccaggaacgctgctgtctggctctaggcctggggcaggttcccgggtgtggggcgctggcggaccgggcatcagtgtgtgttggggcgcgggtaattcgtaatccggggcctacagccttcctcccgcaaggggactgccttcgcccttcccccgggacagatttgcgcactttcctttcgacggcagcactacaccctcctagccagtgaaaactgcaatgttgctcctccactggaggaatcctaaaagtctccctctagttggccttacgaaaatcgagaaaactacat

SEQ ID NO: 51172 - DNA, 2384 bp, Homo sapiens
gatttaattctcaaggctgaacttaacttgtaataactttatttggaaactattttctgcaatttcagttatcaaagatcatctttgaaactctttccagactttagtgttgagtttaacttctaaaatgctttgttaatttcaacatactcaattcatctaatacacttaaaatagtatttcgattctagctattttttcacagaaacttgtaccattctacaaatgccaaaaaacaaacattcaagagaattctattctaaatctactcccaaccattcgctgaagattacgccctatcccaatactagtcgagctgccaaaccacgtgggtatgctaagatttcaaagttcctccaagagtgaatgatttgcacgtgtgaggactaaaccttaaaatgtgacaatcccttctttattttacaaatcaggctttgaatcccatcttctctgccaatgaggatgttttttctcagacttctctacatacatgccccctctcttagtcttgaggagcggggaagatcgcaggccgacccctccaccaagcaccatttcctcaaatctagttcaggttagccaacgcggacagcaacgctcccttcaacgctcctcctccccctagaacggaaaagacggaggagatccagttcgggctgacagtgagaggatgcagcccggtgtctgggcgggctcttaccggcgaagcggatcttcacgaggtcgagcggatgcagcgcaaggttggataagacgccgccgctcacgcccgctatcaggttctcataccggacgtggcggaataccgtgctccacgccgacgacccggacgccgactggccctggcccgtcataggctcggggcccgtcgacaccacggcgcccagggccgcggaggtgggacgcgatgcagtggccgccaccgtggcgacggtcgccccttgtgagcgcaaccccacctccgggaccaacgagaggactcttatgcccaaggcgcgtgagcgaagccggagactctagtactgagggggcaagaacggggcacagacactacgtcacgccggcggaaagcgcgatggaggggaggtcccagcctctcccgagtctccgccctgcctcgcccacaaatgctccagcccacggacgcggaagcgactgcacagctaaagaaccgccccttgctaacgtttgccggcaaaactacggagcggcgcaggatccagttgagccagcaggccgccgctccgcgagtcacgtgactggaagtagtctgggaaaagcggaagtcgcctgtgggaggaggtggcggtgggcggaactcctagcggacacctcgtggagtccggccggaagagcaaccgagatgaaggtgaagatgctgagccggaatccggacaattatgtccgcgaaaccaagttggacttacagagaggtaagataagttggtagggagaaagggacggtttccgcaagtcgttgggtctagcctcggctttcgcggagtaaagccgggggaggctggcactctggtctggttctttctcagttacctttcgctaaggcaaactttgtgcttacggagtcgctgcggaactggatggatagcaagtaaagtctgttcaagtcctttttctaagaatttcctctagtggtgagtgggaaacagttgtctatagtggagaaaaattccagctgctgctctgggattgtcttcaggttcctattactgaaaagtggacttgaatgagccaaactcgtgggttgaagggctgagagttaaacaggcttttaaaaccttcctactgctcttcttgccgctttactacttcacattagttgtggatgttggaagagacaaagatgaatttaaaagcatcagttttctcttaccatcccttaagaagtttgatgaaagaatggttaaatgaaattaatttatccttcctggtctgttcccccgttaacatgctaaccacttataaattgtactttgtgatacctaaatgacaagggaccaaccatgcgtaagcagattgttctaaataaagagaataacaggagcaaaggtcttcaggcaggaatgaacctaaggcatagaaagaagggctgtgtcattagtttgaatgaggagtaagcgagatgagatgaggcgaaaacagtatttcactattttggttgagtaggagatattatcaacatgtgtgtgagcattgctaataagtctctgctcaaaagatgtttacagtttgtcacaaggcagtaatgtttctaaaatataaattagatttgtcacttggatttggcatcgttcccagtccttgaatctctggtcccaccttccttgccactttagtcagtcactacgtttcccacaagtggttta

SEQ ID NO: 51173 - DNA, 715 bp, Homo sapiens
ctgactcacaaggttgttgagaggattaaacaatgtaacgcagacaagggactagcacaataccagacatacaattactcagtaagtattagctatttctgtggtggtactgattgtcattattactattagttttactaccgttagttttttttctcttccaggcacttctaatgccttcaacacttgtcacttactagaaacctcatcatcttatctgtcctctaaatataccctctccatttgcttaagcaaatgactctggatgagtactggctcaagaagagtactgtggactctgctttgtaaacacaacctgtgattctgttgccgtgttctgcagttacctcacatagccctttcagactaggctggtggtcaaacgaatctctcagatcctccatatgaattgctttcttacttgtccttgtggaatttcatttttagccaagcacagatgtaaaagttttcttgctaaatttttttcttattggttttgtccaatattccagcctatcaaaatcattacaactgccctaaatctgcattcactctgaattttgctgaaagcttaagatttataaaacatgtcagctttcactgccagctctgtgtcacgtgcagttctgataaggacgtttcctctatcttgattcacatctttgataaaatgttgactaaaatagggccaagatcaaagttttgtaactctttt

SEQ ID NO: 51174 - DNA, 2601 bp, Homo sapiens
ctttctttattggaaatgacccagacatctaatgagcttccaaaataattagaagatttttaaatccacaaagattcccttacagtatttaccccatttatatttcattcatttttagcagtttatctagatgacttatgaaaacagtgatatcagaaaaagctagtaatgatttccttgttaaccatttttatgaccggtgcctaataggcattcatctaggtaagaatcttaaaggcacacacataggtattttcacccataacgcagaagattcacctgtttttgttaaaccaacaacattaaattagttttattcatttaaaaaaaaaatcacagaaagatcattttgttcttgtctggctttgcagtcttacaaccttttgtgccaaaccctgacaccttaaaatttccagcagagacaaatataaaacccagacaaaaatatatgctgacaactctgaagacatttttatttttattttactaataatcttaaagccagcttgcttatgatacatttacttcagtcatacacatttgaaaaatgcttggacttatttacttaacttatgagtgctcttttagttataggccaatttggtactgtatgaaaacacgtaacattcagatacatgtacacccatataaataaagagccagtaacttttaccttggaattctagccatgagacagcaatgcaaacttactagtctgtaaaagatagctggatccaaatgatttctgacaaaattgggacctgtccacatggctaaactttatttgctctgataggtaatccgatgaaggctgtgaaccaaaactttgggtaaagcagtttccatggtagttagatttccttttagaggtcaaactctcccaaactccaaagaatactggggccaaacacactacagaagaacattatgtactaactaggcccaaccctgcttagaacagcagcataaaatcctgggtacatggaagtccctcctgctttcctattcaacagcaaaatgaagactgccctataattcaaagaccttccaagatgagatgagacctggcacttttgaggtgggatggccatagccatcagcctacaactatattcagaccaaccgtgaaggatgcatcaaagtgggcagcgctgtgggatcaaatcccgacctcccacaactacatcaaaacatacacaaaacaatcaacaaaatataatacaactgttgcagcagcaaacaagggccaaaaggcccaaactgaaacagttgaggtgcttcctctctctgtctgtttggcttgttcaacctgcaaatggaaagtcctttgaaatttctcaagctgaggggagctgatctcactgtctggtaaccacaaaagacactcagttgccaagacacacaagcaattactaacaagccccaagagtgtacaaactgaaacagtcagagtgctttcctctttgacagttgggcttgttccatctacaaatggaaattcctccagaatttcccaaattgagaggagctgatcctgctctctgagcccacaaaagacactcacctacccagacactgatgccaaattaaaaaggctgttcttaggcaatcaagaatgcagttggagctggcaacggtggggctagagagagagagactgaaaccaacctctggccaaaaaaaggtgggcagctgcttaggagggcttctgaaactctgccagcccactgtggtcaagccacaagcagcacgttcccagttagggaaccaaaatctgttactgaaatagcaggggtttggtctaggtccttgtattagtctgttctcacattggtataaagaactacctgagactggataatttatgaagaaaagaggtttaattgactcacagttccacaggctgtataggaagcaaagcatggctgggaggcctcaggaaacttataataatggtagaaactgaaagggaagcaagcacatcttaccatggcagagcaggagagagagagagcaaagggggagatgctacacactgttaaacaaccagatcttgtgagaactcattcactatcacaagaacagcaagggggaattccacccttatgatccaatcacctcccaccaggtccctcccctaacattgggaattacaattcgacatgaaatttgggtggtgacacagagccaaacactatcggtcctgctgctcactgtatagaaagccaatcactaaatcaacgagtattgccagggaagaaggctttgatagggtgctgcagccaaggagaacaggagatagtctcaaatctgtctccccaatcgactaaaattggggggtttatgtagcaggcaaggtaggaaaacaggaattagaaaagagtaaggaagcaattatgatggatgaggggtctggcatctcactggttgtggtgatctggtgagtttcagttccttgcctgaaggtaagtttcctgagaaagaaactcaaatgagacaaatgttaagtttcaagttttaagactagggagcctcaatttctatgttgattaaaaaaaatcataaatatttgttctaatggacaatcaagtcagtttcatc

SEQ ID NO: 51175 - DNA, 584 bp, Homo sapiens
gttacttaaactctctaagtctgtcctccatctataaaacagactaataatggtgcctaattcacagggttttcatgaggcttaaattagataagccacaccatgtgcttaactcaggccctggcttatgatgattgataatgttagttattgttagggtctccagcaagagcagatggctatctgtccacggtgctattatcacacaagaaggccttcttacctccaactcccctgctttctgcttgagtcctgctgtgctgaccgttatgtgctcacactgttaactccccttgaggtcagaaaagccagtgttggggatggtggacagtcagagccttggccgctttccagctgaaggccttggccagtggccttgactttcccagcactaacctgtttatacccaacaagacaaactaccacagggcaggtcaagacaagagcaggggtgccaggaaagagccagcccatgaaatagaaacaggggtcgaccagataccttctgggggccccattttgttttatggtttgagattgggataaaattgaatgtaataaacttaactctgagtgagacaaca

SEQ ID NO: 51176 - DNA, 1126 bp, Homo sapiens
gtggtcactgctactcaggaggctaaggcaggagtattgcttgtgcctaggagtttgagactgcagtgagctatgattgtgccactgcactccagcctggggtcacagaacgagaccctgtctcaaaaaaaaaaaaaaaaaagcgtcaggcacacttagcatcaataagtgttggatgtaattattattactattagtaaacattcctgggaggatggagctgcagtcccgagcatgtccagcagagtgcgccctgcagttcagaggcgcagagtgttcagggggtggcctcactgtgggctcccctgcatgccgactgccagatacccacttaatggatcccattggaccaatgggtgcttccatcccttcacaggctccatctttatctttctaaaccatcgtgcctgaagactcctggaggtgacctgtttgtgaggaaggcaagagaccaggaagacagggaggaaatcacctggattctgattcccaacctcggaagggctcagtcactgggcaaaaccctcactactggcaagaggcataacgggcattttcatccacacagactggctctgagggtgcccccactcagcattatgagccctttggggagtggtcctttcgccaggggctgctctgtgccatcccaggctttggagcggcggctggtgtggatgattccaccaacaaatctctgaaatcagaaatgaggctgtttcataatctccaaaggctggagacgttccaggcagtggaaagagaagctggcctactttaaagagcttcagagaatgaaattcccagccctccgcagacatgggaagagctgccaccttcaggccaagtgtagatgacaggcctcttcctaaaatgctcagccacctgttcaacccctgtgggacccaatagctcacaaacctgtctcctgcctgctggcagggaattcctaggatctaaccagagcctgtgccctgctcactatctatctacgtggcctcgcttctgggcaggtgtggataaatttctctgtgcccccactaaattaggtccccaggtaagaggacacgcagctgtctctggcagccagtctccacatttgcctaacttgctttgtggcgcactg

SEQ ID NO: 51177 - DNA, 883 bp, Homo sapiens
aacaggaggacaatagtctatcgctattgactgaagggtttgtctttcagttttagttttgtaattgtactattgagcagcagtagccatcagctgtgactcagaggagactagaagtttctaagatgacatcagatggtttcgtcctgctttgatgtagagcagtaaggcagtcaagctcaaagaaataatagtagctatcattgattgagggcttactttgtgctcagggcaatgttaatcgcttatgtcttagttaattctctcccaaactcagggagtaggtattattattcccccatttcacagatgagacccgtgaggctaagcaaatgtaagtaatttgtctaagttacataagtggcaagtgtcagagggaagttttgaacccagtcagtttgattctagattttgtgcttcgtatccttccctacaccaccagccacacctcctcccatggaggtgaagacagggaagctcagagcggagctataacttgcacgagccccacaggcaaatggtgcagagccgggactaatgccgggttcctggagtcaagcccacactgcatcatgggaagtgcccctggcagaggcgctgatggttatgggatagcccaggaacagcgtgtcctcattgactctgcttcaagttcagtttttggatgactggagggctggcgtgaccaggcccccactggtctgtggcactttctcagcagcagagcgacccccacctggagaagcagcccactcagaggcccttggcaccatgggtctctcccacccactgctcgccagcctccatttcccacctgtgctcttgtctttgggttcaagagggaaaaacatcaaatttggattcaattctcttgaataagatg

SEQ ID NO: 51178 - DNA, 2012 bp, Homo sapiens
atcctcaggctcaggaactcatccatgactatcactatataatacagtctccctgttagatgcaatgaaacataacagaaaaaattgaagtgtcctttctcaacttgttacttgacgtgtgagaagaaagcacaaagcagtgttgaggtgtagatggtggccagttgcccaggctcacttgtcagccaagtaagcaggtcagaaacacagccaggtgatgcaggccactgtgattgatgactcagcaacagggaaaatgccagatgtcactgacctcacatgtttactaaaaatttgtcacaatcatcaaagcaaagtctataaagcccaaacttactatataaaatttattatcaaagtccagacagattagagacccatatacctctagtctgtttaccgctgagaacaaataccatggttttcatctctataacctctgcaccagccacaatgcctggcacttagtgggtttccaagaaatacttgttgactgaattaatggaacctaacagccagcttgaaaaatccttagtttgggattattccatattagatggcagttgagactctagaatataccactgtagcataaatattattttgagctccagatatttgagaataggtgtttttttgtttgtttgtttttgtttttccttaagtcccaaatctgctataaagcaaagcctccccaaagacctcaattatcataaatcccctctctaggagtttcacaaccagggaagattgacttatcactagagacttggaagctgacaccatacctaaatagacactgtcacaaaactgtcatatgtcccatatctccttctaagggcccatttatcttttctaaaagtcatttgttttcctatgtgtcttttctccctgtgaccatcccctattaagaagttgtttttttgtaagtgcctgctccgccttcccttgttctgttaagatggtgtataaccccccaaatctagccccctcgttgagtcacatttttctgtgaattcctatatatgtatgtgaatttttttaatttgtcttttcttttgtgaatctctcttttgtcagtttaatttgcaggcccccaattactaaacataagagggtaaaggaaaagactttcctccctgagagaagcatcatggaaaccttgatttctagactacctctctcagacattttatggtttggctctgtgtccccacccaaatctcaagttgaattgtaatccccaatgttgggggagtgaccatgtgggaggtgattgaatcatgggggcatatttcccccttgtcgatctcatgagtgagttctcatgagatctggttgtttaaaagggtgcagcacttccccctttgctctctctcctgccaccatgtgaatatgtgcttgcttccccttcaccttctaacatgattgtaagtttcccgaggcctccccggtcatgcctcctgtacagcctgtgaaactgtgagtcaattgaacctcttttctttataaattacccagtctcaaatacttctttatagcagtgtgagaacagactaatagagacattgaaaatacccaggccagacatgtgagagagaaaacaaggggtggaggtgaaaagcatgaactatggactatcaaagctgaaataaggcaagtcttggaatctaagtcagtgaaaggattcctaatacacaacacccttaacagaaccaaagctttaattagcatcaagtggtttcagttaatctttgagtttttttgtgcttcctctgatgagtctgaaggttaagtttgtaatcattaaacagccattcaaggaaaccacagaattacaaacccttgaagctggagcatctaaactactaatacaacacgaatgttcaaagctcagcctcaccagttattaaagagatgatcttttaaagacagtaagaagtgctacgtttttcctctgaaattgacatagatttttttaaaagtcattatccaggccaggcacagtggct

SEQ ID NO: 51179 - DNA, 918 bp, Homo sapiens
actcagtgagttacagccctaggtgtacaaccttaggcaggtagcttaagcttcaatttcctcaattgtaaaaaagtagacaatggcatctgggatttttggaagataatgcacaacttagggcattggctggtatgtacttgataaaatagatgttacttaaaggtataataggaagatgtttttcaagtttaacatatcatacaaccagtatttacaaaaggcctatctttgtctctagctccccaaaacaaacacccaccagcgttgctttggggattattgcaaaggccaggaaagaagacaaaataactctataatgcctttctttcagaattcaggtcaatactgtaatgtttatgtttatctatatttccccatctggttcactttatgaagcctcagctgtttcggggggtgggagtggttacctcttgggatccaaccaactgactctgaactagactattgcaacacagcccctttgtaagtactgtttaatattcaacaggaatttggtatttgctaaacctttgaccttaatatctctgaccgtatcattttttgtttaagatcctaagctcatgaagaacatgtttttgtttaatgttttcacaacctttaagtacagaaatgcttagaggatcagctggtggataaatcctttgagatgttgacaacagactatacgccataaggacctacattctcagttaagaattataaatctctctgaactagagaatcccagaatggctaaggaaaagatagaagaccaagaaccacttcccaggaccttggggcacgcaaagataatcttgagaaagagagggaatgcccctcccccacagcattccacttcctcttctttgctgcttcatctggaaccctgatggcagaaagagaatgaaagctact

SEQ ID NO: 51180 - DNA, 1847 bp, Homo sapiens
tgtaaagctgctctgttagtctcttgatcttgtgttgaggagctttggggaaatgttgcaggggtgtccaatctttggcttctcttgtcttgggccacacatgaaatatactaacactaacgacagccaatgaactaagaaaaaaaatctcataatgttttaagaaagtttatgaatttgtgttgggccgcattcaaagctgtcctgggctgcatgcggcctacaggttggacaagtttggtttaagtttcctttcattgacccaaacttctaggcctttgtatctagagaaacccaagcctaccttcacctggggagtggtgatctgattaccctcctgcaacatcagtaaaactatgggtactccagcagcaagaatgttgtgtccccagcgcaagtgggatggagaaaagagcctgctgcgaggctgcgttggtgtgtgtgagtgttgcgagatcatttctggaatactttctcttctaaaccctggtcggggctatattttttctactgggggtgggagtgggggcagagggtaggggacgggaacgtgaacacggtgggcatctagcctactcagacacattacctgctacactgctcactttgagtcaaggctgtaactaccaggtgaatggatttttcatttggttttggttggggataaaggatgggtcgaaatggttgggagaaatggctggaagtgcctactttaaaaaaagattctaaagaatgtatggaagatttgcgacttccacagaacaccaatcaaaatggggttgcggggagatttggggagtaagcggtatagagaaattagggtaaggggatggccttaaactcgtcaaattaaccactaaaggaggagtcgagggcatctggttgagccaaggctgctcggctgccgccgagaaggggcgcctgaaagggaccccagcgaagagaatctgagtcccctctgacacccgccggggctgcgctccttcccgcccacccagctcctcggcgccgcgccgcgcgaggcggccctgctgaggaccccgggacgactggggaggctgcccgagcctccgtgggtaccgcggggcgggggcgcggcggggcgggtaccttggtgccctggtggaagtcgtcgatggaccgcgagcccatgaaggggaactgcatgtgcgtgtgtgtgtcgatgcctccgggcaggacgagcttgccggcggcgtcgaggacccgcagccccgcaggagcgcccccgggaggcagcaggtcgtgcccgagtgcccgcaccacgccgtcctccaccagcacgtcggccacctccgagaagtcatcgttgaccacgcgacccccgcggatcaggagccgcgagggcgccgccatagcgaggggcgcgcggggtcctactcggcccgggctgcgcgcaggggctgggttgggcgggccgggcgggcttggggtgccctcctgcaaggtccccaccgacagcccccgagctctgcctcaggctgcaaatccggagcccggcggcctgacgggtttatgacctggccgcatatgcggctcctccccccgggaaggctgggctggagcccaaaggccgggattgaacaggtccgcatggtccttgcacactcagaccccaagtgttctgcgccctgagttgaggtatccacccaggcttcggagtcattggaagggaaagatcttggaattttaagagaaaggaacctgcgtttttcatcataagattaggtgctaaagggaaagaaatccacctcaccctttcccttggttgggggtgtgtttgtaccaaaagacagatccagagggagaaagaaagcaagaaccatcac

SEQ ID NO: 51181 - DNA, 1069 bp, Homo sapiens
cggggccctcccggccgggccccccagcccctctccaccacccgagggtctggaggtggacgagtggagaaaagcatctccgtgtggggacacccgttccgccacatccaccccctcaccggtctttgtcccgccggtagccagggtctccgcgggagtctccaggggaacccccgtcctggaggcctcggggcccgggtcgcctcagctttgttcggtcagcggggcgcggggacgcggacacttaccgtacaccccagcgaggaaaagcaagagcaacgcagacctccaccgcggagactcttttgtgctccagcgacaggccataaccacagcagatggagagagagaggaggagacggaggaggagggaggagaagctggaggtagacgacgccgacgccgccgccgccgccgccgccgccgccgagccaccggctgctccctgcgctctccgcggctgcgggagggggaagggaggggccgccgccgcccgcgcgcgctccctcctccctcctccctccggctcgcctgctcccaccccgggcggtgcgagagccccacgcggggcggccctcctgggggcaagggcaaggagctcgcgcgccagcgcgagacgagagggtggcggacgccggactccggcctcgcgccgctcgggctagccggcgccgccactcgccagactgagcgcgcgcccatccgtgcgatcggcaatcccctggcccgcctgcctcggttccctccccgcgctccgctggactttccaagtttcgggccgatttccacgcgacgggagcccaaggagcaaggcagcgccaatcgatgacagagcgtgcgaacgccggctgctggatgcccaggggctggagcgcggggtgtgtggaggagcacggtcgctgtccgagggctgggctctggcccagcgggtggggggagggggggtgggataccagctgggaggctgaaggtggttccgtgttgggggaggcgtggatggtctgaagctgacaacttgggagttccttcctctatccggtacccccaagtctccacttgctgtcggcgc

SEQ ID NO: 51182 - DNA, 930 bp, Homo sapiens
aaaacaaaactagatgggtggctggcaagatggccgaataggaacagctccggtatgcagctcccagtaagatcaacgcagaatgcaggtgatttctgcatttccaacagaggtacccggttcatctcactgggactggctagacagtgggtgcagcccatggagagcaagccaaagcagggtgaggcatcgcctcacccaggaagtgcaaggggtcaatgaactccctcccctagccaagagaagccgtgagggactgtgccatgaggaacagagcatcccagcctagacactatgcttttcccatggtcttcacaaaccaaagaacaggagattcatttgggtgcctacaccaccagggccccgcgtttcaagcacaaaactgggtggctgtttgggcagacaccaagctagctgcaggagttttttttcataccccagtggcacctggaatgccagcaagacagaaccattcactcccctggaaagggggcagaagccagggagccaaattgtctacctcaatggatagcaaccccagggagcccagcaagctaagatccactggcttgaaattctcactgccatcacagcggtctgaagtcgacctgggacattcatttggtggggggaggggaatccaccattgctgaggcttgagtaggcgattttcccctcacagtgtaaacaaagccactgagaagttcaaactgggcagagtccacggcagcttatcaaagccactgtagccagacagcctttctacattcctcctctctgagaagggcatctctgaaagaaaggcaggaaccccagtcaggggcttatagataaaactcccatctccctgggacagagcacctgggggaaggggcggctgtgggcacagcttcagctgacttaaacattcctgcctgtcagttcttaaga

SEQ ID NO: 51183 - DNA, 777 bp, Homo sapiens
agcgagtgcaagacccggctggctgtcctgggtgccaacacaggagcaaactctgtttgggacccatggccaaaccgggtgtgttgcctcaaggagaatgaagcagtgcccatgtggggttacccacaaccctgaagccccagatgaggtgttacagtgctcctttagttctgctgtccatgaatggtggtgtgttagcaactcagttggcctcttgcctcattgcgtggggcagctgtcctccactggtgagggcaaagggccagtgtgacagctcttgcatggcatccaagaagaatgaggtcaaacagatagctgaaggatggtgaaattggagaatttcactgagtgatgaaaacagctctcagtagagaggggagctggagagaggacaggaagggcaggtcaccttcccggaagtcaggttgtctcttccctgaagtcagcccatctcttcagagggggagaagttagaccatttccccctctaacgactgaggtggggtctttataggcacaggatggggagtgtgtgctgattggtttgtgagtatgcaaaaaaagattaaagcgaaggcatcattcaaaggtgggcacgacagtgtagaaaaccaattaggaaagggtagatatatgtaaaataagtgaagggtgggaatcaatcagaggaaagcatgccaaagaggaaaacaagttctcaatctggtccaaggattcaacttgcagcttggctttcaggttttaaactgtcttcagcttggaggtggggttttattg

SEQ ID NO: 51184 - DNA, 833 bp, Homo sapiens
cttgatatcatatgatagctcttgcttccctcttccacttggacctttttgattacaatgggcccacctggataattcagtataatttcccatctcacagtcagctgcaaccttaattccatctgcgtccttaatttctctttgccaagtaaggtagcattcacagattccagggatcaatataagaatattttttagggggtcatcattctgcctaccttgttggagtacctgctactaaataaaaacaccaggaatggtagtttttgctgttcttaacccaaaggaagaaagagcccttctctgaatggtttttgttgtttagttaagaaaatgccaactgaccaatgtcccagaaaccaaatgggtgtagagccctagcatgcttcatttcaacacctttcacaaacagtagttttggcactttgcctaccaagctgaaaaacaaagagcagggttgttatgtctgacctaaatacacatggtctgtaactttcctcttctctctccatacctcttcccttcttgaagatattttactgctggggtatcaacttatttacatgtagctgactcctcagaagcggaacttgaatgccagccattctgtcgagcttaaagcaccacaatccagctgtgagctaggcaactttccccttatattttgtgtgcctctgaaaacatctccagaattcaaatgaccatttttgacataagttatcccttcctcccctctgattgcaagggcagcatcactctttctgccatgcataagtcaacatttggagtcaatagccctcttgtactaacactttcacagtcctctcaagtag

SEQ ID NO: 51185 - DNA, 1676 bp, Homo sapiens
ctataatgcaaagcagtgtgaactatatccattatgatgcaattggaagttctggatgcaaaacatcaaaattatgttctgacaatggctagcagtatttacatatctataaaggtacagaacaccagcctggttcatactcagcttatcaaatctgctacctgttgttgctattaggactataaaatagagatttgttaaaggtggccatgccatttatttactttatgataagaaattgtacagaggctagatattgagtcttgtgatctcactccatgatagactttacagtatcaacttagtaacgtatcatacagagcatgtcgtcgtcaccgtttctaaaatgttcagtgagccaagagcaagtccacagtcacagggcaggtacagtgagtttcctgtgtgcagaaacagaaacctctgaatcttgcacactgccaccaggggtcagggaccgggcgggaggagaaggcactctggcagaaaggaaatgttatattaccctgagaagcacaggaatcaaaattcctgtctcctcttcttgaaagcagctcactgctagctgagcaaggttcgaaggaaggacctcagaaatgttctgccagcgcaaaggtatgtgtaagtgctctcttagtggctttaaataagttattttggaaagtcagatacagcggacattaaagggcacactttatgttgcattttcaaagtccagatgagctgtatggatctgtgacgatgcagttggaggttctatagctactgcctccaaaatgcaaatgtttggctggggaggttaggagggattaaactgtgtcagaacactgaatctaaatagaatatctttctaaaaagactttacatgtgtgtaaattatttctctatgatttgctgtagatactgctgctaattatgattccataagtactcccagaaatagattcagacataatgattttgagtctcttcatgtccagtggccatttgtaacaagtccttagcgatttattttttattcattcataggacaacatttgtcagtaagatttccatgttgccttaccttattcttcactcaaaaattgtccctaactcgggtaatggcagtgatcaagtcacatgctctcacttttgtcaccactgtattctgggtttcaaagacttgtaattcatttcattaagactctccaaaccatccccttaaacatttgtttaaatgtctctgttcttcattagcgttttattacgttacattctctaggctccagaaaaacgaggcaagaaataggaggatttttttttttgccttttttcttttttttggttgaagttttggtcaaacaagccaaaataacattatcattaaacagatcgacctgtacttttaaatggaaggaataaagatataaaaagaactgaggcgtgtaagtaacctctttgatttttaatggcatgcagcagatggaattcattattgactttaaaaaatgaaattgctctgcattattatttatttatagttttgcctttcaaaagaagtaattaccattactaggttagtttttcctcaatcacaagcaactgtgtgacagtatcagaatgtataatatactttaccacttatttagacatgaggcttaatgatgttgcaggacattatccctttttaagtt

SEQ ID NO: 51186 - DNA, 2316 bp, Homo sapiens
ggacttagtatgagagaaggtttttaaataacattttatatgccgtagaatagaaattacaggaaaatcagttattgaaaggctgtgttgaatttaacttgtaaaagggtatcattacttatccaaatgcatcatgtgagaaaattgtccagttcatttccccagactacctcaatctattccttctgacaaaccagaacaagaaattctgttttccaaattgttatttttgctaacacattaagccagcttcagcttcctacagcacacatacacacacactatcctgtgttatcctgtgtctgtttagtgttttcattcacatgtgtgttttctttcctctccacccttgtttctctggaaagtcaggttttcgaccaattatttccctgatttgacaaggtcactctgaacttactttcattgaaaccattggcagtatggtctagcttagtgacagactgctgggtcactcaggtcctttgataaaagggcatagtgcccttgtatggtggccattccaaataaggaagtaaagaaggagtaagatatttagataacaaatgttaagaagaaaataatagagtaatgagactggagtagggtagggcagtggtgcaattagcctggctaacgatgggggcatctctgagaaggtgtcattagaattgaaacccaaattgtgagaagaaagcagaaaaacaaggatcgggaagaatagctaaccaggtagagagaaaagccaggtggtagaaattaatttgctttgttcaaggaacagaacaaataccagtaagatgggacagagtggtaggggtacaaaaatgaggtctcagagatagctgagggctgggtatacactcaaactgaccttcgtttacatctacaagcactggaattgctgtttttcaggtgtgtcccaattgtaaatctaccattatttattgtagaaaataacttcacattgctctgcactgtaaaaaacctttgacatacattcgcattttatttaacatttcataacatcactttgaagtttgcagacctgatgtttgtttttggttttgtttctgagacaggatctcactctgttgccgggctggagtacagtgatgcaatcatggctcactgcagccttgacctccctgagctcaagtgatcctcccacctcaacacactaaggagctgggacttcaggcatgtgccactatgcccggctaatttttctattttttgtagagatggggtttcatcacattgcccaagatggtatcgaattcctgggctcaagcaatcctcccacgttggcctcccaaagcgctagaattacaggcatgagccactgcacctggccaagcctaatgttatttctgttttgtggataaggaaattatgataccaaaaggttacatgaattccataaaaaggtcaactccccttccctccccataccccacatgttttgacatgctatgcttgacacccattttgacttgctaggctaaatcaaaattttcaagctgggagcagtcgtgtgtacctgtaatcccagcttgctgaggcaagagaattacttgagaccagcctggacaacaaagtgagaccaccccctttcagaaagtcaaaactgccttttagcttggatagaaaatggatttgtgactttggtataactaagggctcattattgctcaaaacaggaaaacaaaaagaattgctgcaatgaatgaaaaacaggcaaccttggtttgttctaatagcacatgtgtgtagagcaagaatctacattctctgtttagccacattttttattctgctgggtggctagtttataaatcatgtgttggtcactgtcagatttaagttttaagtaattctctctgaaacatgtatttgaggagagcaggacagcttaggcctggtgagatatgttgacaatctgaactagggtaatgatagtttaggtctcctcgcttagccatcttagtcactaaggtgtgtctgcattgtataatcaataatgtttcccaatcttgttgaaatgacctcacatgtgatagcacttaaaaattcaaagaagtgagctatagttacttttcttctatttttcatatatttactttattgtaaacgtatattagattatatatgtctttttaggaatttcagttatatttaatacatatttttttctctatatgcttaaaattgcttttaattttatatcttttcaaatactaatgtataatttttagaattaaaaaatattttctatcaagaagtactattgtgctctgttctgcgttttgtgtgtgt

SEQ ID NO: 51187 - DNA, 1114 bp, Homo sapiens
aattgatgcttttatagattttactgttgcttggcacatttcctagtgtacaattccatttgattaaatattcattttttaaaaaccattactataaaacttacagtatctaaaaaatattttggtttgctttccttgccctccaaggttagctgatacctcacttcttggactctttctagatgtcccatcccctctctgctatcctcttccatcttcacacgcatcatacttcaagtgtaatggttgacctgtatatctaatgcctctgatctgttggcacttcacgtatgcagcactgtgtctccattgtcttcgtaccctcagggattagcatcttgatgttcagcattcaatatctgttgaacaactgaaggaataaaacagactccaaggataattttaaagtatgtgggctctctcttttctcacaactgctgcatttctgcttccatttaatgtttaactgcactaacacttcaactaacactcagctagattatgaaagagcaaagacagacttcagagcgtaacagagtaagagagaatgaagaaaagacaaaatcaccctcttttacttcattcctctcccccaccctccaaacttgagagattgtcttgccagatgaggaagagacaaagttgaaggagagaaaaggtgtgcttagatagtaaaataacatttaaatttttttaaagattagttataccttgtgttaagtctgctattcaagtctgtttttttttttcctcatggtcctttttaacaatattttgcaaacacaggaaaacctacattcatggcatttctgagaggttggcaaatgaggaaacactcccaaattctctcctgagaacttacaggagatcaactgatgagcacatggtcaccaagtgagtcagtgtaagttctatgaatagggcttggatcttctgactactcgtctagggtcctagtcatctagctactgccatgttccctgaagaatttggtaaaaatagcagatggcataactgacaaagtaaatcattgtcattgccactgtccatgttctatttttccatgttcagtagcataatttaaaaactcattaatgcatgtatgctattggtt

SEQ ID NO: 51188 - DNA, 1761 bp, Homo sapiens
aaacaggactgggatcatagaatgtccaacactaacatgagttcataatggcacaacgaacttaaaatgttactattcatgttttaattatgattgcagtcttacgttgaaggtatctccgccgtccttaaacataaaaaaaaaaaaaggaaatacaagctgcaaaagttttatgtaatgcactccaccctcttttttccccaagccaacacacacccttcaaactttttgacagttattttcagacccctcctaggctcccgaactccatgcaactccagcagtctcccctgggccatttttagcctctgctctgacctggcgggaggctgggtgtccaccctttcccctgcagtcctgaaagtccggtccgagcgcggacggggcggggaggggctgggcgggccaggccagctccattggcgccaggcgggtgggggaatgcgctgagaggacccgtccagcttgcttaaaagccatcagttttctgaccccgcatcggttccaggaagaatacacctatgtgacaagctaagttctgcctcattttgcatttagaagccacaagaaaaacttttcgaaaacttttgtccgtcttttgctcccccgacgcgtggtttcctgatggtccgtccccgggcagagagagggacgccccctcctcctccccgcctcttgtgaggcgcgcggagccgcctcccctgggtcaggtctgatgggccggtgggcgcgctagtggtggccgccaccgccgaaaccgtcgacctcctgggccccagttccgcgtccagccccgcggcagcatggactacctgacgacgttcaccgagaagagtgggcgccttctgcggggcacggccaaccgcctgttggggttcgggggcggcggcgaagcccggcaggtgcgcttcgaagattacctgagggagccagcccagggggacctcgggtgcgggtccccgccccaccggcccccggcgccgtccagcccggagggacctggtgagcccacctttctttcgcctcccgcgcggccgacctgggctgagggctgtggggaggcggcggtcgtggcgccgggcgggggtcgctgcccggctctggcaggtgtgcctgggccggggcgggcaacgtggccggggtggcggccgccgggggcgaggaaggaaggactcgttcggctctggggagggaagactttcagctgcgtgccagctcttcctgctctgctcttcctgctttcctcacctagacttgattttctttccccgccaagtatttcaaggggacgatccattctctctttccctcccactgggaggtgaagactgaaccagttatgacgtccgtgttttcagtcttggattcttgaagagcgctgtgcctgctttggttttggtttgggtcagtctttccttaatatttctcagttgttaggattcacttcctaaccgaaaaataaaaagccagatacttctttgtaaaataaaacacttcattaacattggaagctagttgacattttgcgtcgtgtactttttgaacggctgcacgttgtcttgtggtggcagaacctagaaactttctcagttcctgtttattttgtgttgtgttggccgatttttttcaccacagtggctttgtaccattctttaaaacagtcatttgtagcgacatgatattgataacttaaagaatttttgaaagtgctgctgaacagttttagcataatgcatagggtaacttccagtgtccttggct

SEQ ID NO: 51189 - DNA, 1507 bp, Homo sapiens
taagttgctttctctcctagtctgtacccagtttatttttaaagtgagattgcttatatccaaagcctcctttggttctattattataaaagtcaatagctctaaatagagaagctggtttctgagccaccaattagatgcattagtaacagagctgttagtaacaggatgttgtgcctcaaactccacccttagcattctcgttattcctaacctgcttcttctgtggtttccacctcagttaatggcaccatagtccactgaggttatgggaccagagaccttcatgtgacccatcctcacccctccgattcagacaattgcctagtcctatcaactcctttgtccatcataactttcaaaagtggccactgctggtctcaaactcctgaccttgtcatccacccacctctgcttaccaaagtgctgggattataggcttgagccaccacgcccggcctatgatagtctcttgaaattgcctgtttattatttgccttcccactaggttgtaatttccttttagagggagagtatgtaccaaacccagtgtttagcatagcaaaggtgcctagtaatatttgttgaatgaatgaataaaatactttctagaagagtcatagtccccttttatatcaactaatctctttatcacaaaaatgttcttggagttcatttctgttcctctctctttctggggagcgtctgctaggaataatggaataatgaggaaagagaggtcagagacgagaaggtgatgatgtttgactgaaggagaataaagagcaaataaacttcagagtagagtgggcccattccaagatgatcttttggaagaggaccaaacccagaggcatgcactcagttgtgccaggtgagatgccttttgctggagcggtgggaggaaaatgtcaaaaccaaaaccctggaagacctgttttcaggatccatttaaaattcaagttcaggttttcttagattgtagattctaaagaaaacttttccatctttatttgttcttgtgctttactttcctcttctggaggtggcaccttctctgctctaaggcaatcatctgttctctcatgtatagcaatggtgcttattagggccggtccccctactaagcagtgttttagcaatctatgcgggtattttgtttttgtctgaatgtttaaaatgtcttactgccatttagagagtaggaaactcaggaagctagatgttgaacaatgttcaggagagtcctacataataaataatcatcctatgtactgctgaccttttttttttttttttttttttttttgagccagagtcttgctgtattgcccagactggagtgcagtggcgagatctcggctcgctacaacctctgcctcccgagttcaagccattctcctgcctccagcctcccaaatagctgggattacaggcgtctgcctccacacctggctgatttttgtatttttagtagagacagggtctcaccatgttggtcaagcta

SEQ ID NO: 51190 - DNA, 624 bp, Homo sapiens
acctgaaagattcccatttcaagtctccttctcctttcttattcctccaggaaagcagaatgatagtaattaaaatggaagcatgaagaggccctgggcatatcgcaaacaccatttgcctaaaagacttccaagctgcagaacccacttttttcccccgtgaatgagcagcaactactgtcctgccatgccgtcatcaaaacctgcctgctggatgagcagcgcaggcgtgtgaaggcgctgggtttccctctgagccaaagcggcgggagctgccccgacttggggcttttttttttttttttttttttttttgccagaaagaataaacattaacacacatatcactgggggcaggcgtgccctggcagaagggcacattgtgtgactggcagcctgccctctctggctttcagttttatatttctcaatttctaattgacttgcagcagcactgggaggagttttgcttcatttctgtattacataagattggacggcctgagggcatatgggctgtggagttctctggagcccaggcttggagtgagtagagctattcccaaagctgcctttatgcatgaggaggggagaaaagaggacagcaactgtaagctttctcct

SEQ ID NO: 51191 - DNA, 590 bp, Homo sapiens
atacacacgcacgcacgtacagtggcctgcacctatagtcccagatactcgagaggctaaggtgtgagtatcatttgagcccagcagtttcagactgcagtaagctatgattgcgccactgtactccagcttgggtgacagaacaagatcctgtgtctttataaaaaaaaattccatcttatgtaataactctaactagaattctctatccctctctctttctttacatccatattctaagactcattccaacatagctggtgtaattttgcaacaagcatcaagatccataaatgcctgcacgctctgagccatatcttactttgtggatctttgtttgcactgtgcttgttgatcttttatttgttgatctttacttttcgaagtgaatcaggtcaaagaaaaacctgaaataaggcccaaggaatactagtaaataattgatggcatctcagtttatctaagctgctgattatcactctgactgaattaaagaatgtagaaataatctggtttcagtaacatgaaaatacactcagtaaaagaaaccaaatgattaataggcctgtaatctcagcactttgggaggc

SEQ ID NO: 51192 - DNA, 1723 bp, Homo sapiens
acaagacattcttggacatttactgaaaatgatcttagccgttacctaacgtcaacaactttagagttgtctatgtttagaaaaggtgcatatgaatatgaggattatacctgtctaacgagccacaacacctggacgctggtttttgggacgtttttgttttattgctttttgtcttttgctacacaaaatccactccccaaatctagagttccctaagtagacttatattgtagtctgcttccagaaacagaactcacttatttttctgaaaaaattcgaattccttcatcactgcaaattactttgcattattaaaatgcatcaatttcccaataaactcacggtataactaatgtcaattttcttttagccaaaactttcaagtccaataaaacttttaggactgacatatgctttaaaatgaagttccagaattacacatttattcatgatatcttgagtagataattgaatattaacgaccaattcaaaccacatgaagtcagtacaatatatccactggaaaacacatttaaagattggagggattttttctgggggggggggcgggggagcgccgtccccatctgacgaaatatgctgttctagaaagtcctacttaaccaagacaagaaaacgcaaagaactcacaacttcatggaaattaaagcgctagatacttattttaagtgtaagagaatcactccaaaagactcgacatgcaaaaacccacagccaagcccaggcttcccacagttcccaaaagaaaaatcaaaagctctaacagcactccaggttgcttttacaagccagcctgtgaagctctaacgttctctagcgaaaccagcgaatcgccaacttccgagaagaaatgatgcgaaaatccctcccgcactgacacctcagtaagtgaaagagacttcttttctctctccgtaacctccctcctcctcactgccgaatagtgcggtgcttcttaactgagacgacgctaaactaccagaagatccttagtgtccgtccaggaaccaaactcgcgaccgcctcgcacgtgtcaggcctaggactacagacaccacctttcggccttgctcagcacctcatccgcccccacgccttccttgcgcccaaagaccccctcacctcctttacagagagaaattcaagaagcggaaagactagatgccgatccaaaaagtgcgcgatgcgagtagtcaagtcgtactccgccatcttgccaaagaaaagggagtctgtgctcactaaaactttattggtagcgccgacaaacgaacagacagatcctgtactgcgcatgtgctgtggtaaaactggcctaaagaaaggggcggggtttaccctggagagcagaggacaacgacgcatgcgcgcgggttgtcccaccctttgcgttagggcgcgagtgacggaaacagatccctctatttgtaggtttgtcggtatcctctttctaatgctggccttcgattaccagtcagtggcttgcagtctattccgttaataactattgaaagctcagaattgattgctgaggcaatgtgactgcattgggatgcggcaaaggacaacatgaggaggcccctgctttccaggaagttacatacagggaagaatatctaggctttttcatttggcatacgctaatcattttgtaagcgattgttaaagtgagggtgggtttttagacagaaaataagtg

SEQ ID NO: 51193 - DNA, 1618 bp, Homo sapiens
gctgagaaaaaaaaccctccactcttttgacttgtgggatagtattatttctacttctcaaatcaactgccccttctttactgaccaataactttcggctgcattgcagtgatttttagttttttctcagcttacatatttcctctacaatctcatgtccccattgcttcaaatactaaatatacgcttatcatcctcaaattttttacttcctgtccagacatttctccttaagtctaggagatgacgtccaaagtttcctaaaagcaattagtctggtgggaaaggaggctcccccatccacccaggagtaatgaggagcgaagttcaggaactgtgaaggtctcattcgtacattcattccttataagtacttacatactcgcgacagtttgaaacctagtgtggcatgcagacatggatgaagcaatgacaggcacgacgagcgttaatgaagggtataagctagcgcgagggcattcaagggaacttcagagcgcaaaggaagaatcccacttagtctctcaaaactttggagtttatccgtttagtcgattaaaaagtgaacggaaagcaaatcccattacggaaggaggaaagttggggacaaataagggattcgtgcagaaggctgcactgcggccggccatgaagagaataagggtacttaagggagtgtgaagagaatgaacaagcctaggtagaaaaaactgaaaagccaggattgacggacactaaaaacccagcatttgttaaaaatccacgtcaacacacacacacacctcaccccgagccagcaccgtagccccgccagcagccagggtatcctgagattgcgggagcgccacgcaccgcccacctagctccgtccaccgtccagctcgctccgcccagctcgctccgcccccttccccgaaagcccctccgcagagccgcgtgcacgtgcgtggcggataccgccccctctgctctcttggccaatgagaaaaagctacgtaactctccaccgcccggtggcgggtcacgtgactgcgtctccccgccctctcaccccgctgcctctaggttctgggaagatggcgaaggtctcagagctttacgatgtcacttgggaaggtaacttcgggtgggggcgggtgcggaaagactaaaagcgctgggaagccgttcgggagtacccgctgctttcggggagctgggttctctggtgtctttttggtaccagagccctcactgtacgggccaagctgaggtggaggctgaggctgacccttcccttggcccggacgcgtactctgcagcgtttcccacggtgtctgctcctcggttgacctgccctcctccgcgccagtccagcgtcccggggccgcttttatttatgaggcgggcgggagggacttggggctggggttgtcgcacgctaactggttgctgggcggtgcggaagaggcggaataggtggttactgaagcttctttggagccaagaaacacagggcctgtaaggccctttactaagtggtgtgtaaggattacagctctgtgcagaaaagctgtgtaaaagatgcgtgaacaaatgtgattctcatatgccactctacatttagttttcttcttaa

SEQ ID NO: 51194 - DNA, 1529 bp, Homo sapiens
cccttttagtctttaacatgcaacttaggcccttgaagcctcaggcatccataacacatgtataattctttagaattataaataagttgtattcaacaccaattaacatcaacatcaaaaatattgtgcatggcacacatctcatgcaagcagcaagcactgactgtacaaagtacgctcaattggaactctcccagcccaaatgacttcatgcagagaaaataaataacagtgaacaggcagtatgatttgggtaaagtagactttttttgggttttgttttgttttctttttcaacctccagcagcccttagcacaatgccttactcattaaatatttgttaaaatgagtagtgtacagaacttggtgtgtttttccaatgccacatctgattctgaaagtcaaccactccaagttaaatcacctagcatttttattttagagagagtactcctctccctttgccttcctctgaagcagagagacaaaatgtgataatgcaatcatttgcactgagcatgttctggctgaaaggacttttgtagtttctttgagtctcagagaatggtattcattgttagtctttagtatttgaagatgacctcactgataggattttatccccaagtggctgaaagagctgtggtctaggaggcgtgtgggtgtgggaaggcttttctttggtttgtggggcctggtatttgtagtgccacctttcttcaggctgcttgtcaagataagttggctcatgtctgttagttgtacaccaggttcctctgttggcaggtgttctattccagaattccatagttatcgacaaatggactatgtcaacacaagcttttattgtgttttgaggtacttttggagcctctggcagctgctctcattttgcagagcaaaactgctgctgaaggtttggtaaaggttaatttttaaatggattctatgctgctatatgtggcatctcccttggtatttgaatcattcagcacataaccccatcgttagatcatttttttgtgaaatttttgttggtcacctttaaagctacatcaatcacttggtaatggaaaaaaagtcaatgtaatgatctgctttgaaaataaacagtctaacttgactttggcattgagagcctattatcatgtggtaacatcattctattccaatgacattaactgctaaggatgttatcgtggtggaaaatatttcaattttgttatcggaacaatgaagctgtgatatttaattatgaagaagtatgtttaatttggggaatctggcacgttgactgccacagtttacttgtcagaagcctgggcaatggtaatgaaatttggacacaatattatttagtgacccaccaaagttattgattcaacaggttttcttgctttctcatgttttctttgtaatattatttcttccattaagtccgttgattaacaaattaactaattaatgaacccaattaatacattgcagtactagctagtagagaagggctagggtatgaagaatagca

SEQ ID NO: 51195 - DNA, 778 bp, Homo sapiens
agtggagaatggataatcccaggggaccagctaaagactcttttcttccgtcctctccctctttttcctctgatctgcttaaaagcccagttaacgacattgcaccttaaagcgaggggacacgcactttccctcgtccatctgtcatcaattaaaagcattaatatttgctttaaactgacacaggcaaggctgatctcggggaggcgacctctggatgcgccctgtgcgagcaaagccgggagagcgagccccaagcacctggcagcggtgcccccagcaggcgccgaggaatccggctatccatttctggtgaactctgcgcccactgaggcattcgaggtacggatgtgtccgcctagtactcggagacgaaggagagagagcggggatatgcgctccagctctgctaggctccagggctctcacccttgcattcaaagcctccaccccatcccactccccgccactcaccttctgcttcggccacccggtgcggctccagcaccgcgcgctctcccggcacggttcccggagaaagtcccccaatcaccagctacggcacttgtagcctctgcacgccgctcggctccgccgggtgggcagcgcccgccacggcgggcggggtggggcggggcggggcgctcccggagcatcccgggagttgtaggccaggggcggtccctgcatccctcctgtctctgtctcctcccacgccttctgggttttacccttcctgcagatgagttcccgccataccctcttactcctccccagc

SEQ ID NO: 51196 - DNA, 1003 bp, Homo sapiens
gcaatatgacattttgaaatatctttacatgtggaatgcctaaattaaactaatcacatatgtattacctcacatatgtatcagtttctgtgatgagaacacttcaaatccactctacttagtgattttcaggtgttatacaaattttatgggagactattgttttgaactaccctcctgcattagacaccagcagactagactacctgtgctaagtgccatgtgatcaaaatgaactttgaaatgggccagttttcaaaacaaacaaaataaaacaaaatccaaacaggagattccagtcaactgcggtcaatgtaactagcgagtttcctctattttaaccctatgagtaaagtaagtttgaaatgaccaatctgttttttgttcccaggttctcatttcttcagccttttctgtctataaagccaaactcttctgctcagctcatcgaaacactcattctgttttatagagcaagatgttgctcagtgctagaatcacaaataaaagccaattagatctttaaagatgtggtaattttgtgttttgtcagtttttggtgaccatgactagacccaaagaacactgcatatgattcctgaggctcctcgaggaatgtgagaggcaccactgtccccttttaaggtccttcgtcttcctcatggaaccccaaaagctggactctgctctttttgcattgagccattgatcattttggcttttgaatccaaggttagtttgtgctatgagagagcacatgaccctttggagttttgtgtgactgagtcactggaaagagctatggtttttcaggtatctgaccgtggttgcagtcggtggctgttacttcatgaggtgtacagctctcgctttcagaaatgctcaggaatttgggcttattcttctttgttacttcttgcatgcataggtaggggaaaatagttcactaagttgatcaagagcaatttcagcaccaaagccacaatttaactggtgggcatgg

SEQ ID NO: 51197 - DNA, 815 bp, Homo sapiens
tcatttatttgtccttacctataatagaacgttctcagtctaaggaagctatctcaccaattgtcagaaaggatcaatcaggtacactcagaatgaacaattcacgcaatgaagggcaattggccaactgctgcatgcctgagatgggtgactattccaggagaaattactctagcccctgccccctcaaatttttttccagactaatattgcaggagacaagaaagctaacaaaacaaatcaatgttttgtcaagatgttactgaatgtaacaaaagatagcaaatgacaggattgaaagcataaaatacatgcaattcagttagaattgatttatcttcaaaacaaaaccagaggctaaaagatgtgtcttttctatatctatatagatgtgctatatgctatgtgcggtgtgctatggccttctggcatctaggcagtctgtaccttgggttcctgggaaaaaggcagagtacaaactgcgtatgtgtgtgtgtgtgtgtgtgtgtgtgtgtgtgtgtgtgtgtgagacaggactttggacctagattcctatgtggcactcctggtcctggcatgggtcttgcgacctcctgttgcccgtctagtctaatacccaagtaaggtttttccaaactttatgtcccaagcagcacaatttacccaagaaagtataaatcataatattcagtgctcaaatttggaaaacagtattaaacaaaggtaaggaggcttccttaaaacttttcaaatgcatttagttgctattgtatgttgggaatattcacagctgagatattatattttctgtttac

SEQ ID NO: 51198 - DNA, 817 bp, Homo sapiens
tggactaaatatctgtgtcccccacaaacttgtatattgaccccccaacccccaaagtgatggtatttggagatggcacctttgggaggcaattagagttagatgaggttagagggtaaggacctcatgatggacttagtgccccataagaaaagacaatagagagcttgcattctttctccacatgcaggaacccagcaaaggctgtagagaggacctaaagagagggcagccatctacaagctaggaagggggccttcaccaggaaactgaattggctggtaccttaatcttgaacttcctggtctcctgtactgtgagaaataaattcctgttgtttatgccactcagtctacagtattttgttttggcagcccaagctgactaatccatgtggtatgtgtttccactgtcaccttccctcattgacctagatttctgcttgagctccagcttagaagtagggtagtagaagaggacaacgtgaccttcctggaagccccactcaatgaggtttgaattcatttaaatttcaggtatgcaagaaggctgggaaatttagtttatcatcaaggcattctccctagggttatataaggaagaaaaacatgactattgggcaggcagctgaaagtatctgcaacaatgtgtatttgtctcttctctagaatcgatgagggtatgtgtttacatgccagctgaattagtcttttgaacaaatttgattccaatcttgaactctagaagataagtttctaggaaaccttgatccaggccaattaatttgtttttctgaaccatagtaacatctatttta

SEQ ID NO: 51199 - DNA, 2305 bp, Homo sapiens
ataatgcctccaacaaagatgttcacatccttatctccagaacctgtgaatatgttatattacatgacaaagaaacattaaggttggagagggaattaaggttactaatctgataactttaagatggagagattaccctggattacctgtgtgggcccaatgccagtgtaatcaaaatggccctgaaaagtagatgagggaagcagaagaattagtgtcagaacaatgatgcagcatgaaaaaaatctgaccagcaattgctaactttgaagatggaagagtgccatgacccatataagcaacttctagaagctgcaaaaggcaaggaaacagatcctcttctagagcctcccaaaggaatgctatcatgccaacaccttgattttagcccaatgaggccgattttggacttctgatctccagaatctaagatattaaatttgtgttgtttaaagtcatcaagtttgtggtatattgttattttagtaatttgttacatttggaaactaagatatcaataaatataccaagttaaagaatctctctaggattactactgagattatcattctggagtctagaatgtacaagaccagatagggagtacaatttagacaatgctatcttttggcccattacttcatctgggtgaaaacagaataatggcatcgacatataatagtttttattttttaatgtagtttttcaaatactattcttggagaaaattgagaaaacaattgccagaagcttctctttaagcaaccttaagtgtgtatgacagtgttgaattatctcatttgttaaaagtaacatttctaacccaatccatgatatttggtgtttgtcatggactactggagtttctaattccacataagtttgaaaagcttgcatcacttgcctttagactgctgtcagacctaggatcaataattgttaaccacatttggtaggggacagatggcttgcactactcctttctctaactctacactgagtcaattcttatgaatcatgattccaaagtcctgccagaaatgcaatggaaaacactggttaaagcactactggagaagttcactcacgtaaaaaaaaatgtcttcacaactgtctccacagtaggcagactcaaaaataggtcaacaaactttcctgcttcgttaatgactcatcatggacaccaggtagatcagagagcttagcctactgctatctttgtaaaacaagatctttgggtaagtaaacaagtacttgtagcccgggattcaacaaaagtcagaatgataccttaagaaaaacacatcaagggaggttaaaacaaaacaaaacaagatttggagaaaggaaagtaaaaaaaatgaaagaaacatagcctaaaggaagattgctcatgaacaggtgaatggcagtttttcttctctttgtaccaagttataataacccttttaggcctaattaggaattatcacacagctgggatgagtcactctgtcggtcaggggaaaccattcaaaagcattcatttggaaggaattcaaaaactgtgtgctatgaaaatcacagtacagattatcctgacccacctcacaaagcacaggcgaaaatcaccagcttctaaaatcatacaaaagttttcccattgatttgaatatttttacttattttcctaaaacctctgtctctgaagatactgaatactgacaattgcagaaacaggtaaccaagcagcaaaagaaaagcaatgactgagaagtacatttgtgccccaaactccatttgcctaaaattctagagacttgggacacatatgacttaagtcatcaccacaattaccaaaaagtacataaacaatttactagctgtgtgtgcaaagcaggttttgttttgttttgttttgttttttgagatgggagtctcgctccatcacccaggctggagtgcagcggtgcgatcttctcagctcactgtaagctccgcttcccaggttcatgccattctgctgcctcagcctcccgagtagctgggactacaggcacccgccaccatccagcataatttttgtatttttagtagagacggggtttcaccgtgttagccaggatggtcttgatctcctgacctcgtgatccacccgcctcggcctcccaacaaagcaggttttaagtggctgagagttcagcaaagtctagactgccttggttcaaatccaggttctgccatttactatgtaattcagacagatcacttaacttctctgtgtcccagtttcttcttccgtaaaatagggttggtatgaaaaaat

SEQ ID NO: 51200 - DNA, 1735 bp, Homo sapiens
ttatactttaatgtctgttattataattaactgtagatcactatttctcaaagtgtgatctctgaaaacatgcatcagaatcagcaggggtgtgaattttaaaatgcagatctctgggctctatcataacgaaaatgccgttaagttgtaaaaacaagagtaaggatattctaccagctacagataaagcaaggagtagcagtgtgggagtaaatccacttttcctcactatcttctagagatgttctctaccagagttcttaatgtgccaggaactgagtaattaaaaatgctatgactggaatgtagtttctcttctaagaaacggctctcggtcagaggaaacaggaactgggggtcctccaaggaggtgtggtttctcaacgcacacgttcacaagcgatgctccaggaggaaggaatgttctcagcgtcccccgaaacagaagccaggctgtggacacacagcagccagagccccaggcactacccgcacgccagccctcagacctcagacctcagaggctgggctgctgacggagggggcccagggtcccgttaccgaagagcgcgcgaaggcggctcccaccgggttctgggatgggcatcattccccagaagcagcggcctccgtgagtccacgcaagccgccacggtggcttcgcttgccagtcagaaagaaagaaattgcgggaagggtcaggccggaggcagccgaaaggggaaaggaacggagtacgaagggcgccgccgcttcccacctgcgtcaagctccagctggtaacaaggcagcggctcaagagagagcttgtaaccctcgaagcggggatccaacagaggtctcttcacccgtagggagcaattagccgccacctccatcgctttccagggccgcagcgtgagaattaataaagcccttgttgaaaggtccgcgcttcacgcctcgcacagagactgggaagcggcgtggttcccatcccagaaaacactgcggtgcgaactgccttctgggaaatgtagtgtccgtgaaaaagttgagactgttgcatgctgggctatgtagttctcctggtacttaacgcgcgcgcgacggcaaggtctgaactctgttacccagaggccctagcaaccaggaggcggcccgcgctggttaaattctcacattataggcagggtggcgagaccccgccccggaaatgcgtgttctagctttctgtgtgcttaggtgcccgagctactgagggtctaagtccgggcagccgaagagtgtggtaggtaacggtcctcagcgcaagggtcatttcgtcgctgggaagggacggccctcgcccgcggtgatggtggtgagctatgcccgtggtcctcagggccgggacccgggcccagcccaggctcctttcgatgtactgtctttcgttagcgtccccgacccgcgctcgcgggcctgtagggctctccgacagggcgtgctaccggagttggcctgaaaccagtcctcgctttgttttctggctcctcctctcccgcctctcccgctgtctccgccctgttctattttccctaagaatgtctgaactgggagggataccctagcgcccttgttttaccagtgagaaaactgaggcctttaagaattaagtgacttgtccaaggtcactatccgtattttaggagccaagacgagatcaagttcaatattccaggagtggtactgactagaccttgtagttattttg

SEQ ID NO: 51201 - DNA, 1856 bp, Homo sapiens
cccagtctcgacgtcagacccgtagcctctcacctattgggccagccaggacctgaggcggagtgcagaagcgagggcctggagacagccgagagccgccttcaaggagggctgggggcggggctagaggaggggctgggggcgggtttcccgatgaaggggcggccatggcagctgcgcagaggcaacgcaggctgctacggagcgcgcgcccggctttgaatgagcggggctgggagtgagcgggcggagcgcgagctcgaggaagagacaggcagcgcgcgtgagcgcgccttgtgtgcgcgcgcggcccgcggcagctcggagcctccgccgggcgggcggggagggggaggggcaggtgagtgtgtgcggttcgcgcgtgcctgggaggggctttcctctccctacccccatcccgaccccagccctagcctctggggcattgtctgcccttcgccgtcggccctccgcctagccgcgcacttcccgccctcccaccttcctttcgcccttccaccagacctccctcgacgcccgacagctgctctgggtactgtttccgggtcagggtgacctctggggtgaggaaactgcgactgggagcgggacccaggcgtgcagcattcgccatgctccgctcacgcgtgggagactgggctgtggggtaccggcccggaaagcacgcagcctccaaagccgccttcctcagggaaatttgcgtgaccttactgccctccgtctacaggccttgtacctctccaggccgatttttccacaatttaaatctcagttcacctggtatccagctccagcaacttagagcgtttcacgtcacgccgggcgccaggcgtcggcttgtataacctgaaaacgctcctgtttttctcatctgtgcagtgggtatgatttttttttcatcaacaaatttcacgtgggtaatctgaaatgaaaccacttaagttatgaaactctttccttttgagttattctggagaccttactccgccttcggaaccgccccagtggtgtcacatacttgagggcctgactctcggttgccagacatggcacagaatgttcgattttactaccagctctcacactccgcttctgtttccccttctcttacgggccgctgctcaaacctttatttatcaaatttaagtgagttcaggtaaattttattttgggagctttgtaatattttctaacccacttcagagagttatagtttgaggatattctggactgtactagatcatatggttttcaaattttggtatgaaaagattcgtaaatagagttttagaaatacagcacctgtttagtatgtaccgaacatagattttggctttgcttgttttgtgaattgtgatgtattgaggctacttgaaaggacctctagcagtttaccgagaatttcaacaagaaaagatataatacatttgatctatcagtttctaatgtagcattctttttttaattgtattttttttccgttaacatggcagagctctcattcttgatttcctagagttgtcatttcttcaaaaagccttaatgaggatacattgcctcatagttttgaatctcattctgatatacctcaaatttttgtctttgtaatttttaaggaaatttaatgttaagattagattatattaacattgttccgttctagaaagtgttttaaagcaactaaagtgtaaagtagcgtaagatacttatcaaattggtgatctagagggcatttcaaaaatcgcactgaggcaatgtgcacacaattaaaaggtttcttaagtaggatatgatgtagggagagccttgggctttcgggtcagtccctttaaatc

SEQ ID NO: 51202 - DNA, 1012 bp, Homo sapiens
cgtaaccaagttctaaagttaaagttatttccttttgaaatcattcaaatgaacgccgctcttctcttcgtgagaagaggacactttatacggaacagatgggctgatggctttgtgacaaaaccaacttcagcagcccatggtagaaagaacttcatgagtagctgaaaggaacatgtaccctggtgtgcattttcttttccatgcttcacttctaagtctggcatcaaccagactatttcttaatctgattatgagaaatatggaagattagctattacaccttaggcaggaatgtaaagagctatcccatattttgacctggggaattttattacgagttaacttccactgaggaccttctgtgaccctggcgctgtttcaggtgctttctgaatattgatcaggaaataaattatcagacagtttgtaagagctaactttttaaaaagaagcaacatgcttaaaaatatcagttctcttcatttagtagttcaaatgctaacatgtataggtgcaaactcattataggcattgataggaaacattttcaaaggagacactgagattccatgtttgtcatggccatgaactgtgaaacccaatgctgtcctcttcagcccatcccagatccttcagtctggtggacaagaaaaacgcagtccacaaagaggaaagaaaattctgctgaccctgaacccttctacaaacctgaatacgtaactagaaggtcatagacagaggagtgaagatgacacctcatgagtgactcaggtgaatttcgattccctgaccatggctctggacttcaggtaatatcatcatcatcgtcatcatcatcatcaccatcatcaccatgatctagggttgaactgtgtcaccccctgcaaattgatatgttgaagccctaactcccagtaccacagaataatggggctttaaaaagtgattaagttaaaatgaggcagttagggtgggccctaatccagtttaactggtgtccttatacaaa

SEQ ID NO: 51203 - DNA, 3279 bp, Homo sapiens
cattgggttgctgtgaaaatgaattgagttaatgcatagaaagtgcttgacacactcataaatacgaatcttaaaattattattaataatgcagtggttcctaaacctaactgtgcatgaagatttatctgggaagtttaataatagtgcagatttctgggaaactctcacaaaaattccagttcagaagatctgggaggagggtggcccaggcatctgcatttttgataattactatagctgattgtgcagcaggtggtccatgaaccatattatgaggaagagagctccaaaggtaaaaaagtgcctggactttctctccaagttctgtcaaattgcaagagctctcttcagtgcgatgtgaacaatgagtgagcagaaatgaagacagacaggccagcaaaaggaagaggaagaaattcacgggcaaagtgcactctgagagaagaatttaatctacagaatgatctgtacccccacggctctccagaaacacttgcctggagtgaatacattatcagaggactggagggaaagacagaatgtacataaggcacaggttgtttgaaactgggccagttccagccaaactcatgtacacaaatgttggtttgcaaagctagtaggacacttaacagttggttcatggttcaaagtcctcataatcctgttgtaaaagagaagggtccaaccagtgtgctgttgaacgtgtcaaatgccattcagcagagaaataacatttcacaatccagcataccctgcactggggttattccatcagtgccaacctgaattttccatggcagacatgcttcacagcatcaaaggaactacacacaggcattcatcatctcccacactgactcagctcaggaaccactccagtggcaggcatgtccaacgggcagcccttcccccactgcctttcacccaacaggtctgggaaaggttacatccaccgtggtcataaatgtcatcctagctcattatgttggggaccaagtaataacagagcaaatcctccctgaagtattttacagacttgtacatgggacttatctttgatttcttgtcaaatttactgaagtgaactgaatttctacccccttaaaagaactagctggaaagcctgctgcttctatttaaggagaagcatttatccagtgtttaccaaaatgagatgcctgccctcctgtctggcaggaaaacctacatcaggaagagcagcactaatggtggtgctgggtgcggagcaggggtgtcattgcaggaggcattcataggggaggaaggaggtgatgaaggactgggagagaaaaatggggagtgagacaccaggaaagacagaaggtcaggacagggctaggatttaagtctatgactcagtccagaatataagggagaaggaaaagatgagaatgttttggagtcacctcattctccactcttcttcatctcagtgaggtggtgctgtctgcttgcaattctagaccacaaatggaataaaacacccacttactgggaaacagatgacataattcacaactcgttgccaagacatccaatggggccctaaaataattttttttaaaaaactcacttctgtacttaaacatggcttttcttaattgactctaagacctaacaaccttgaccattcaacccccatcttcatcctcactgtgtgacaacttccagggcacactatcttctcaacccacaggttcctttcttcccttggcagtggcactcagagtgtcaggaaggttgcatatgtctcgcacgtggctcactccctggattttctcagtagcactgacctccacctccactgcatttaaacagagcagagttctgacactggactcaaccatgctccccttccaatatcttgacatgctttcaccctcctctctctttctcacttgtactttcagtctctatgaagttatttctctgcctttttaaaaataatatggtttagtagtttcagttgctagctgtgtgaccttgggaaagacaagctctctgagcttcatttttttctatgaaaggagaataataatagtatctatttcatagagttgttgtaaggatgatgtaagataatatatgtaaaacatgtaaaaatagtgctggcactcagtaagcactttaaaatttcactattatttttacttttcttcttatgattaccctctttgaaccatatcaaggtcccaaaacatgtgaggccaaaatctggaagaacttagaacagtgacaaggaatgaggcgaggctgttgtgtagtgtgagtggcaagaaaggattcaaaacaagcatgaaaataaaaaaaataaaagatggtcctggcagaggatggtaaaaattcttcttttagattataagtcagtgagtaaatcctccttagctgtattgactgaatatcccaatttcacaggaaggcctgcagcacactaaacaacagggagctaatgacccaacccttcttatagggtctgtggctcacgaataacacatggtgagagctgttatctccacatcagttcatatttgtgtgttctccagctttttgctagcacacgtgggctgagaccatagtcctgccttcagagagaggcaaatgtcttaggagggactcaagttaggtgctaagagaggtcaacaatgggaaagactgtttcctgctggaagcatgaagacttcatggaggaggcacactgaactagccaggttttgaagccatttacaacaattcaggactgtagcatgcagagctgtggagacagcacagtgtgaagggaacagcacacagagatggtaatgctgaaagaattagaagcaacagcagggaatgaggcaataaagggaacttggaggcaggcgaatttaaaaccttccttagacacaggtcccagtggttgccactggtcaggttaagagttgctcatatttgacacacaggtctttttcattttctaaaattcccactttcacttctctaataaaatatgcaaacatattaccttactcagagaggtgaaaatgaaagaaaaggaagcacatatttttcctattctagggatcctacagccacaattctgtctgaagtgattccactgacaacccttaatggtctactgatccgtgcccttcttgatctccatttagaggctgaacctgctgacgtgtgaggtgaggaagtggcaggtcagagagtgccatacgaaactaagcatggaactatttttctatacgtgaatgacatttcattatt

SEQ ID NO: 51204 - DNA, 2331 bp, Homo sapiens
ccctgttcaccatttccttgcgttcacttttacaaagaatgatcacatctatgtatttttaaaaggtagaatttgaggatttttgttttatttgtttttaactttttaaaataaaacaggttatcatgatgtatatacaatcttttgggacaattttcattcaatattatattgcgaaaattctccatatagttgtagtgtgttcatttgactgctacataatattagagtgtgtgatttttatccataatttatacttcattctcccgataatgagaaaatgagttgactttattccagttactcatttagctagattttccattctgataaacatgtatttgcatttccagagtctaagaagaaaaatcaagaggaaatctactcttaataatgtattccataggcaaaaagaaatgctctgtggatcacctgtccttacagatttgtacttttatttacccttcttcctatcattatgaataattaaaagtagttatgaagagtaaaagtaaaactagaatctctgttttaccttattccaattttagggtccaatatgcctaaggtgacccattgtctcatggtagctctgaccctgaatagccctcaaagatcaggaattacgtgatgccctgttgagtttggcttaggtcacttcacaaccctgtacttaagacttggcaaggagatgggcccatgaacatgagaagctgacccagagttgctggattatgcatacaacctcatcgagggagaaacctcttgtcccaaagtggggaggaagagtgatgggggaaagcttccctgacggtatgtgctggtgtttaatgcagcccagaacttgttcctaattccaaggcctaattccaagttgcaagcgaagaaaagatcatcattttaaggcaagccccactgttttggagaaggagaagccaccagttaagtctctatattaaagctgggtgcagtggctcccgtctgtaatcccagcactttgggaggctgagataggcagatcaattgagcccaggggttcgagaccagcctgggtaaaatggtaaaaccccatctctgaaaaaaaaaaaattagccaggcatggtggcatgcgcttatagtcccactactcaggtgactgaggtgggaagatcaattgagccccggaggttgaggctgcagtgagccatgagcatgccactgcactccagcctgggtgacagagtaaggccctgtctcaaaaaaaagttttttgagtctatatgaggaagtaactgctatgctttttagatgttacaggcaaagtaaaaatttctatcttttgatttttatctaagcatctatgtgttagagctgatgacttgtcacttcaaaatgtctttgtgaagttaaatgtctgttgagcgagtcaggcaattatgggatagattttaaaccatcctcagtgagtcagaaacatgtttcccaggtggtgctgatgctgctggtttggagccactctttgagagtcactgtttcagaagaatgagaagatgactaatttaggagcagaggtgacattctgtaagattaaataacttatgggtagaggtgagacccagtaatatatgttttaataagccctccaggaatatagatgctaaagtttgaggaccactgccctaagacaggcctatgcctgagatcccccagcagcttcctgaatggctgcctctgacaaagtgagagcagccggcttgactgtaatttgacatacagatacacactgtagtatatattttgggaacatttttacatatttcacatccaaaatgagtgaactgcttaatttacttggcataatactgagtggtactaaccatgctgcatgtaattgacaatatgtttttaacagctgtggttaagagcaggtgctagcatcagcagattcagggctcaaatatccactctttcattaatgacagtgtgacctcaggcaatcacttaacctctctatgcctaagtttactcactgtaaaaagggactaaaagagtacctatcatatggaatttttgtgagaattaaacgccataatatgaactactgtaagtgcacagtaaatactcatcatcatcatcatcattagcctacttatccacgtgtttggtatgtgtgctgctaaacactaaatttttctaataattcttccatatgggcactgtagactatctaagtaatgtgatttaagaaggaaaggtatttattaagtgactaaactctaaatacaagtgataagttgtagatgacctagtttctctcgggaatagttagaaatggcttgttatgttcacac

SEQ ID NO: 51205 - DNA, 3323 bp, Homo sapiens
tctgcacatccttttctgaaggagttaacatggccacatacatcacatatttggagttcagcagacgtttaatgcaaacacttaggatactcttatgaacaaggtcgacatgtgtgcattgggtgatagcacagtccagtacccacgggatgttgacaaatggactgtctgtcaacctctagggaaatctctagtaacacatcacctggccctggtgttgtccatatcctatttaacatgctttattaatgacatgaatgaaatcatggatggtgtggtgttggcggcagactcctgattacacaaaaccttgaagggataactaatgcatcggatgacagcatcagataataatgccactagccactgtggactcagagcctactctgccaagaactctacagctgctatttcctttaatccttcctcccaaagacatacaagtaaagaccaggaaaccaaagttctgagtgatgctgagactcaccccaaatcacagagctactaagcagcagagctggcttgtctgacatcactctgcttgatccttgtgatcagaattcacaaagatctaagatcaggaaaccaagacaacaatgttcaatctagtccatctcaactatgcgttaaacacttcctaggctaaggcactggatgggggaggcatggagaaacagttccaatgctcaagggtttcctaggaggagttagactatacagacaaacaaccaggatataaggcagaatacaatgagtgcaaacagagagggcgggcacccagaaaacacagaggaggaagaaatcttcttagctagggtgaagggatgagggcaggggaatatgtcatgggagagatgacacttgagatggccctgatacaccaggaagaatatagtgttgggggcatggacaggagttgaccttgggtgaaagagatcacatgaactaaaacacagaggaagaaaaacacagggcatgtttagtacatatatggagtcccttgtatggctagaatatagtgatcatatgagaaaatgcagccaaaaaggtgagttgtaaccagagagttgaaaaatgtaaaaattatgctatgggcaagagggaactatgacatactgaaggcaagagagaaccataatgagttttgtttggggtggtaacatgaacagtgatgctttatgaagacaacatgacagcaatatctgaaggagagactggaggctggtggggaattcaggtgactgttacagtttggagatgggtcataaggtaagggaaaaggaatgctgaaaaaggagaccctttccaggtagctcttaggttccacaaaattaactgtatgggttcaaaatcatttgacactccagatggacaaaatgattaaaaatagaaaaaggataaagtcaagttaaacattaaaaaacacctttatcttatgccatatgcttgactgcagtgctacccacataaaagaacaattgagtggagatacgtatgtttggaaaagcaaacaaaatgggaaatatctcaatcaaatgaaaagaacaatgtctcttatatattgcctgaagaatttgtgaagaattggataatctgataagaatggattgaggtactccaagatcaatactagatttaacctctgtgtaatttttttttttttttttttttgagacagggtttcactcccatcgtccaggctggagtgtagtggcataaactcggctctctacaacctctgcctcctgggctcaggtgatccttctgcctcagcctcctgagtaattgtgattacaggagcatgccaccacacccggttaatttttgcatttttggtagagacaggtttcatcatgttgaccaggctggtctcgaactcctgacctcaagcgatccacccactttggcctcccaaagtgctgggattacaggtgtctgtgtaatctttcatgtaaatttcgtttgcaagcacaaacgtcaatacaataaaacaaataagctgggtaaattctggcaatttctggcatctgtagggagtgtgagaacaaaagcaaatggagaaatggaaggcttagtggcgttggggttgtttttaaccctgacatgtgttcaaggaactcaaatgagaaagggagaaacagaataatgaagtcacaagaaaatatttccaagataagtcctggcagcacaacagagaaatgcctggatcaggtgatgtggtcacaggaaagcaggtggaaagcaggcggaacagttcctgcacgcctgccttgggacacctgtgcaaggaccacagagcccagtgtccgccccaggaggggacatgcactgggatgcctcgctcctacttctgtcttccttctcgagctggggcggaagccgacaagaggcaaagagctctgtctccagcagcaagcaacaacatttcacctcataccattgtctatcaattgaaaattattctaactctcaagcttctgaacaaaatgtttttgaactcccactcatccttccaaaaacattttctacaaatcctggtgtggtttatagcacttaaaatgaatgaagcatactcacaattggattttgctctgctcacaaattatgctctgcatttccttggactcctttagtggaaccttccccaggatctcactctcagtgacatctggcacaaagcacatgttcccaggccaaccctttgcttgcccagctactctgccccacccccctacacaagttaacttttaaattcaagtgtactcagtgttctctactttctccaccccttccctctccagcccacaatgttctgtgaaaaaccaaaataaaatggaaaagcaaagcagagtattacgaaaaataaatcaaggccactctttttaggaccatcaaagagtgtttgcatggcagtaaaaacaagggaataagcaggctttggaaacagtagttttgaaaataccccccaacatattgtaaagggcacatatctaagctggtaacattatttttaaagtgcaaggaaatgttaaaacacacatttcagtacagtggttacccctggggtagtcagagaataggatctgggaggagtgtgcaggcagcttccctggtggtaaatcttaaagtggaaggtgaaatcacaagttttgctttattattattctacccagctcacgcatatgtcacatacattctctttatgcatcacattatatgtagtatttataaagaaataagggaagcagcaaaactgaatttaaaacaaatgcttatcagagagaaataaagaaagagaggagagaaagaagaaaagaaagaaa

SEQ ID NO: 51206 - DNA, 2226 bp, Homo sapiens
caacaaagtcacacatttgaaaaggaaacaaaaaccactactgtatatttcactttttgttaggtacattctcatgtacataaaatcccacaattcccatcaaaatgttaagcacatagtagattcttagtaagtacttgataagaaatttgataggctgaatcaaattgaaacaaagaattgttcaagctattagctaatgcctcccttgactaccaggcattgtaaaaatgatgataacgtttatagtaatcacaatacaatagaagttaatttttttgtatgccatatgccattgattatttcactgaattttcaaagcagccttatgtgaggggtactcttactatctccactacatagaggaaagaaaagttttagagaaaagagtcagatattttgaggttaaaaataaatcccatactatgctggtttttagaggtgggcaggggacttcattgcagatccactgagaaagggatatggggctttatactgttagtgcagtaaaaatttggagaaagtgtcatccacatggtttccagggctccaaaatcatgatctctatagaatttctcacacacccatgtttgtctgctattccatctactgttagaaattatacttatgaaatattaagttaatcacctaaagtttgaccccagtgacaaagccagggacagagtagtccttggtacattcacattctcaaagggtggtatcttttcactgttctgggcaattaaaattgagccatgactaaccgttggaaaagatgacataaaaacagtgtgccctttgcctaagtagtcatgagcataaaaaagtaaacaaagttaacaatctagcataatgctgtgttcacttttttatatgattaaagatgaatttctcttatactaatatagtatatgttttgctttttgtttagagctgccagatgtcagctatatatgtgaacaatctaaatatcttaattttacacaattttaaagttaccgaactaaagttggagttaccataaacatagtatttcttttgtttctactaattaattttaccaccacaggcattaatcatttgcccagcagatgaaaagtactttaagatgactcatgtgttttacaacactacaaacccaacctttatgctcttggaatgtacagtaaagaggaagtgttaggtcaaattagttaataaaaataaaaatgttccacatcccaattccatgaacattaactgtttcagaatttctactggatgccatgtgagaaaagtaaattaaaactggccagagagatgtgttctgagtaattttcatggtaatcaggcagacatgggtattccctttcctaatcacacgaacaggctctctcttgataataaatacatcgtgtttcagcctacacagaggcccacttcaaactatgtgcagtgccaattagcgttaattgtggctgtgttcatctattcccttaccacaccactggtaaggccaggcttttcatttacaaatgcaacatgcaatgctcatggttggaagagcattctaaatataattgccaatggtcagtctttttcattttggcatcaaattgacttacaattgcacaaatagacttacaaatgacaaagagtatttaaaataacacatgtgtatatttttaaaagtttagttataagaccatgcattcagagtatctgagaggtgaagatgaaaacttgttttaggctccattttggcctaccacaactaactcacacacacacacacacacacacacacacacacacacacacacacagtctagcctctgtgatccaatataattatttacttactgtgactaatactacttacttagaaggtaagctccatagactttcatggcaaacattgcctctgcaaacagcctcccagcacaggctggggtatgtcttttgcagaaatacagtgtgtgcagctcatatctcagtagagtacagtctcagagtggggtatccatggagactgagccttctgcatgtgcagggcaaggaagttactctgctggcaccatagcaacaggaggcagagggaaagccagcctatcagggaagagcacagggccttctccctggtgactgcagtgttccaatgaaaccatcgccctcatgaatggacacaaaggatttgaagaaataccaaattgtcaaatagaagtaaatgcctacacaacagtcaag

SEQ ID NO: 51207 - DNA, 1371 bp, Homo sapiens
gatttataaagaagagaagctaatacaggaggattactggaaggttgcgaagctatgatgacaatagatccctttaaattattttagctttgttctagtaaaggatggtattttttaatatttgtatgcaccttgttctctgacttaactgccgtgattaaacaacgaacacaccttctggcctcagtgttggagtggctggattaaaacgagcgatttccccctgctggttggacatgtcttacattctctatctcactgcctccagcgttaacactccctgtagtaccaaacccatttattttccacccaccaaccggcctcctaaagcatcattaacatgcccccaaaggccttgctgctgtcaattttagcctacacagcactcaaaagcctttgtggggtttatcagagttctgtaggaaaggaagagaaaggcattagactcaaaccttggggaactgacagcacaggaagatgaagagagatgagggagaggcccaggaatggaggaaatcctatctgcaggcagggtgcaaggctcaagattgaaaggttgttcagagacacccataattatatgcttctgccactcaattttcatctagttaatagcaaaaagatcaatatctactttcgattttcatgtacagcattatagccttagccagagacaggtctcctaggaaggaggatgattcaggaagtgggtccggggaagaatgattcataaccaaaatcaataatcatattggtttgccttcatatattctaaaatatatttggggttttccttttttttgttgttgttttgaacaactttttctttttttctgataacactactcaccctgaaatccctcacagaggaattgattacagggagagaataccaggaataaatgtggaactgagttatgtacacaaagctctgtcagtttgaaatgacgtgcccagagttcatccacactcaccagggtgagctctgggctccaaaacagagttaaagtaaacagcattacattctgcaaatatgactctagattctaggaatactaactgtgatagcttctcagttatccttttgttttcttcttgggggaatagtaggcaaagcagcagtgggtttccatcttaaactagattcatgtgattcaaatataaagaaataagttttaaaacataatattttgatagggttttttttttcagaatcaagcagacaatttgattagcaaattgttagcaaaaaattagttagcaaaaaaaaaaaaaaaaaaagtaggcagtgcagaatttccaacatacaacttatgcagaggacagaataactttgtggaagtatgtaataaatccaaagctgcatttata

SEQ ID NO: 51208 - DNA, 3246 bp, Homo sapiens
gaaacgcgtttccctctcttaactcctgtcggttccttcaaggatcaatttctaagaaatcacatttctgagtattgagtcttcacagagtagtccttcttatctcagttgctgaaatgagcttcaaaactcttccaatgagttaacctttctaatctactgaatagcacatgtctgtgtggcacacacacacacacacacacacacatatacacacctccactcactagctggaaggccatcctacttccctatgctggtcctgactcaccttcccaccctgacttctatcacattcaagcttctgcctcccaaaggctctttattaacaccacactctggcttacttgatagccttcagacttccattttgctttccctaaattagctgtgacagtctgacttgttttcttgtctcctcacaaagttgaaccctatacctggaacagttatttcctgatagctcacacacaattatctttaaaatccctcctcttctggacaggatcttaattattcgttaatatcctggtacacaaggcttgttgccaacagaaaagcaaacacaaatccgatactcgggaagatggctccaccttttacatcatctttaatttttgttttccttacaggacatccataagaagagatttttctttctccttaaaaacgcagcatgaagtaccctgccatttcgtggttttaaaaatgcgtaacagtaatattttcacaatgttttccaacttataaagtgcttttccaaccattttctcatttgatctttacacaccagactgtacatagagagcacaccaatgaatgtccctattttcagatgaggaaacaggctaaatggggtagagatgcttaggcaattctgcacaccatgccagaagtagaacgaaattcaaatccagtgctttgcagggtcaccaccaccctgccttatgaaaatggattcctaggaggagcgttttgcaaaaattccactgcttcctccaacctctgccactgaaagggactctttggcttaggtaacaaacaccctttcgaaacatgacctactgttccttccaccggcttaccaggaagggtcacggccaaaataaacacctctgggaggccggcacatggcataaattgaagggtaaacctcagcaatggggaacttcggagggccctcaggcatccactctacccgggggccgccagccgcacgcagcctcggattcgccctgcacatctgccgcccagcaggtaccatgcgccagccactccgccgggcacaccgcagaccctgagctaaggcagggtcactgacacgcgggagtcctcttttcccagtcgcggatgcatcaaattcctttcattcacatcacacacacaggatatcaactgaaagctacaccccacagtcccagtttcaggaggtgggattaaccctccaatcatgtcattctccaaaatctattcctccagtaccacctccccatctcctggatctcaactcctaagcaatgcctcctgccttctccagaccccaccaccacctccttccacctttccccagactctaaatgtcacccctccagctctcatcccgccgcttctcgccccgcagtgcccgccttccccgccctccagtgcccgcactgccccgcgctccttaccttgctctcgcggaggggccccatcgcgccgctgcccgccggctcctcgcgccgccgctgccgccgtccaggaggaggcacctgcgagcacggagcgaggagactgcgctgagccggcgcgggctgcgggcggcggctcttggtgaggctccaacgcgccgccgccgccactgccgccgattgctctgggctccgagggcacgcccgaccccgccccggccggacacgtggtgccgcactcgctagaggcagctcctggggcgcctcccacgccctccctcacctgcggccttcggggcaactcgaccgcgcctgggcgcgccccacccgcccgatttccccacggcactccgcgcccccccagccagagccggtgtccctccctctccaaggagctcggcccggtgtaggcaggctgcggctagcggcatctccagcccaggggtgaccccaccctcttttttttttgcacttgatctcaggtttgaagtgggtggcgttggatggagtgactgagaaaagctgcgacatcacagagagacaaaatagagaaagttttcccctggccacccctccttggcctccaggtcttaagtcagcctacagctccccacaactgcctcgcccgagagctgcagagatccctctcgtaccggagcccagccaagccagtgcgtcaggaccgacacagcctctgggttccgggatctgaaaggctgcgatggattctacttggaaggggttgcatcagaaaggccttcagtggtcagcgcagctccctccggcttggagaagccaggctgctatgtagccagagaacagtcttttccccagcgctgccctgcagctgcccggctccaggaagtagctccagcacactgctaagggaagagcactggaattgaactcagaaaaacgagttcaagccagcactccaatcggtcccttcagcctgagtgcctttatgcctaaagtttttgttgttgtttcgttttttgtttttttttttttccgttgctgttgaaacggcatctcgttctgtggcccaggctgtagtacagtggcgcgatcagggctcactgcaacctctaactcctgggatcaagggatcatcccgtccaggcctctcaaagtgctcgaattacatgcggatgccattgcatgcgtggcctacgcctacggttcttgacccttctgaacttcaaatttacccttgttaaattgagggataataatagtgatacctacctctaggatagctgtgagggttaggtgaggaaaacaaacagctctatccagctgattgaacagaactttccaaagggcagctaagtcaggtccagatgatccagtcaatatttgttgatgccttttacatgacaggcagaaaaagcatttgtgatgcacacaaatttgtttaagaaagctcgaaaatctgtccaactggggacttagaatagggtacatcagctgggccaagggccttgatttattacaattgctacccttaaatcttatctggtggtggaattcaccatgtataatgacttatataccctttattcagaattggaga

SEQ ID NO: 51209 - DNA, 1131 bp, Homo sapiens
aagaaagaaaagaggaagaagccgctgccataaagctgtttataaaagtgtttttttgtaatggcaaaaaaaaaaaaaaggtaaattaatactctaattagtttatttaaccatttttaattaattttgctaaactcaagacacaattctatgttagagatggacaaaatttagtcccagcctgtgattactttgttgattgtggaaaatagacttataagtagggcaaggacaatagagtatgataaaggtcagcatagaggtaagccatgttttaatgaaagtccatagaagaagctttcagttcatctttgcctgtaatcaagaccttgctttaattgtgaatatctcaaattaattttaagtgattatctgttgttggaagtaaaggtagaatggaaagcaagaaagtaattcatgtaaaggaaatagcatgtacatatgtccagggtaataatgactcatactgacaaatgcaaaagtttcattatgaacagaggacagagtacaaagagtagaatgatgaaatgaggctagtgcagctatcagacttacaaatcagggaaggcctatgtgacacattaaagagttggaactttgctctgagaatactggctaaacattttaagcatgaaagctactgcttaaacttgtcatttaaaagaatcaccctgactgtagagtagatagtagatttctaacaggcaagatagtcagcaggaaggttagttaagagatcgtacaataattcatactagggaaaataatgtcctgaattgagatagcagcagagttgctggagaaaggtgtttatattcaccttaaattgagaaaaataagaatatccaattttacaattgatgagatttgtgaaaggtggcagtgaatgaaaaaggagtcaagcaagatttcagcttctggtttagacattaaacatgttattcactgagatagggaataaaaaacaaagttgtttgtgaaatggttaattgttatgagactagtaagaaatgttacgcagctgttaaacgataatgcttataaagactatgtactagtaagaagaagtttatgttacaaagttaaggaagaaaagcaggatataaaattttacatgcactataattatgg

SEQ ID NO: 51210 - DNA, 1306 bp, Homo sapiens
atatacaatatttgaggaaagtgaggaaatggaaactgatattcattttttctactacgtgccatggagttggttaagtgttttaaatgaatatcaattaaaaccatatgaagtaagtgtattcatctactttaaggaaggagaaaagcttggtttaaagggaatgttaataaaatatattttactccaaattcagttgtgctttcttgtcactgtacactcaaagtgtctgcatctactgctctatatcagtcatcgatgattcatgcaagaggaatggatatgtcactatcgggagcagaaatgactcagaaagaaataaatgagaggacaaagatcaaagttattgagagaaaaaataaaaatctccctaggagattgtttgctgtcactagtagaaaaagacccaactacattattctttaaccctgaatccacctgtattttcagctacaatatgaaagcctgtaatctgcaactttgttttgtgctatacagctgagaaatatgctgctgaaaagtaacaaccttcttttttctataaaaggtcacttttagtaatggacattagcataatcttctaaaaacactaaggggaatggttatataacttgaagattgcagcaaagaggtatataaaatatgcaacataaatagggaaacaatttcagcctcaagtcacccagtgtatctttactttaacaactcagaagatagctggaggttttttaaaaagaaactaaaaatgatgtttaatcggtgtggctggaagctacatgggaattatctgtgcttgtcaaagacacaatactcttcagtgtttcaactgtataggcccattctgaataggtgattcaatcttgctttataatttaagatattgtgcataggttttatgaaaaaaaaatgtattggaacattaaggaagtgtgatcttcatacccctaacgagaaatgaatcaagtgttattgctatcaatcaccttgcttactgagatagtggccatgacatatcaccctggaaaaagggtgctgtgcaagattgtctatcagtgagcttcattccatctgcctctagtctttacttttcagctatctgaaagtaagagaaaattctccagcaaaggcctaaaaaattcagtggcggtaatgtctaattttcccttaaaaaaatcactttctgtagaatgtataagaagattgcttgtaatattgtttgatttctgtcctttgatatcacgaaactttctcacattgccacatgaaataaattaatttataacataggaaagtaattcctctggta

SEQ ID NO: 51211 - DNA, 1202 bp, Homo sapiens
ttaattctacggagaaatgtcttttaaagctcttatatgaaatgatacagttctcatatcacaaatttaaatgttcaagaaatgtaatttctcatcttatccagagttttatctaaatgtctaaaatgtagagaatgccaggccagagtaaagttgaggaatttaggagcagggaataggtgaagaggaactgggaagaggctaaaatgaagcatttaggcctcctcattcctttctaatctcaaagtgtcagtccagagtttgtggctccatactccttatcttggctgtaagataactcctggactagcttctcccagctgcatatgaatgtctaaatgcttaggactgtgtcaagattgatgcttacccacattttttccaagaatggaggagtgatcaactaagcaaacatttggttaatgattaagctaataccttggtaaataaatatggtaaataagtatctggaagaaacatagaaaatgtcctcctcacccaggataaaggattacttaattcattgattaattcaattgtttgcattttcagtaaatacatattgagatttgttttaatgtgcaaaaaattgtcaagctcttttattttttcaataataaaaaaatacaacctttgatcacaaagagatgacatattagcgcagtattttcattgagctgcaactttgtaaagacagtccccttcaaatacgtacacacacacacactcacacccacacacacacagagaaacagagatagagaaaatatccatattggcttattaaagacacttagcatccttagagaaaataagcctaaaatattttttaaaccccatgtttccaaattttgctggactttatgtccctgtcctctcacccagatatgttagtttaccctcccaaagtcttgggtaaagttggtttagtgaattctaaataaagaaatgtctctagagtagataagaacatttcttccagctgtagtagtttgaaataaacttttcattagtacatcacactacttcctggtatccttaaatgtcaataagcttgtgactataatttttaaagtaattatatgcttttgtccaaggagtagttatttccaccaacatgaagcgttctaggcaaaaggccaagactgccaagcttgccagatattctctcacaaaaagagttggaaattggtattgtgatt

SEQ ID NO: 51212 - DNA, 691 bp, Homo sapiens
tgaagcaaagtgagaacacaataagcatttgttgaattgatttaacatggcataccaggcacttcataatctggtctctgccttctttaccagtttcaagcatattagttcctgactagtactttgctcttcaactagagataaaaatatatagtccctttcagaaaacatatgccatatctctacatctttccttgtgttgttctttttggctggaatgtccttctccagctaacaattacacattcattaagacttaggtcatgtgccatctcatcagatcaatgtttctgtcacggttatccccatttctcaaatcagccaccagcctgccttagctgttcctcctctgtttacccatagcatgcttacaaacggtagtttcccacatcgtagtttatagcagtttccacattcttcctgaataaactgtttaattttctaattccttttcctgtgatctcctagagggcaggaaccattgtttacataacctgaacattcagattctagctcaaggctggatgtatacacacagtgtaaataaataattgagcaaattagtgaataattgccacttacaagcaatataatatagatctttacccacaatgaggttagaattatttatagcacatttctacaaatttagagatagtaaggagaagcaaaggggttaagtaaaagagaa

SEQ ID NO: 51213 - DNA, 1739 bp, Homo sapiens
ttttttagtatttttacctgtttctgtgataacttacttaaggataggttaatataatttaaaatcattaatataatggctacttttacaacttgctttcaaaacatctaaaaattcaacaaccaactctaagtcagtatgagctgactccaggatgccacagtttatgtctagaacaactaggcgttttgtaatcttcatgttaagtcttctgctacattgtccaaaatataagtcctaattaagcctctaaaaaattgggctgatagttttctaaagaaatttttttttaacatatcaagagtttacttacatccaaagaaataaacatcctgcacttggcaggataaagaaaattggataaatcacttttttcctaatgatttgtattatctcaagaaatacataacattagtcacgtgtatatgaaatgagtaggatttaaaaaatcagtcaaattcaatgtattcaaatgaccataaagacaattttttatttaaagaaaagcctttctccgggcaattgatgagttctatgtgtacattcagtagttcaaatgtaatgaaagcaatgtttttcttttcatttgctgggtaacttccacaattaaaataatgtattttttattaaggtacgtattaaacaaatgcatgcattacattatctatttgaagactttccatcagaataaactattatatattttcacctaaagaatttaaaaatattacaatcatgaaacctattcaacaaaaaagtttgtgaattatgcatttttaaaaagtaaaataagtttacttacttttactttttcttttaaaaagaaaataagcagtaactcacagtgacttactgcctggccggtagacaacaataatatgaaaccttaaataccagactgtctggctcacaaatggaccttgaccacacaagcagaggccaggggtgacaaactatgttatcaggatagcaaaaatacagcaataaatatagctatcatttactgagtacatcagctaggcattgtgtcaggtgctatatatgtcttttttcttaatttaatcttcccaagagttgtagaaaaaacattagtctcttcagaagatattaagactcataaaaattaagcaatttgtccacgatcagacaattataaatagacataactgggattttgctaatctgacatcaaagtccaccaacttttctgtcctctatgcttatattgatactcttcatagttattgctaattattgcaccagtttagtttattatatatatcgtagttcttccttttgcaaacattatactttttccaggaacctttgacacatactgaaatacacatgacttccactcacactctttatcctttggaatgtttccatctcttgtgtcctctcaatgccaataaaaaagacatctgaaacttctcctcatatgagaatcgcctctttatcaccagaacaactataatctctcccatctttgcacaatctatatgcatgtgtcacatatgctcatgtgtttattagttttatttatcagtgattcttaaagtatagcacttgaatacacaatatccacatcacctaggtactgattggaaatataaaattttagatctcaccctgacctcattacttggaaactctgggggtttgcccagcaaagtgagtacctccagatgattctgatgcatgacaaagtgtaagaaccactgtattagagaatataa

SEQ ID NO: 51214 - DNA, 1684 bp, Homo sapiens
ggcggctgaacttgaccctgctgactccaggggctactgcagtttgaagtcgctggtttccaaagctcagatgcctcagacccaccaaaaggaggagaggaagggggaaaaagggagcagaagagaagaaagaaagaaagaaatcacacgctcaaaaaggaagaaagaaaatgcatgtgaaacccgagaagcctgcgcttggctttctgcacactctccctctgcttttttttttttttttttttttttcaaagaaagtcacttttaattcccagggctccccgctcgcgatcgcccacattttgcgcgcacacgagcgggcgctgcactcgcgtcgcggcgccccgggcccggccgaggggcgcccgcgccccccgcgccccccgcagcccccggccccgcggcccgctcgggcctcccctccttacctgttgattaatcgtcaagaacaccctcggcagcccgaaagatggtggcgcggcggccaaagccatgaaccgtcttctgttgtttgcagagttgatcttggattattgcgggggggagagaaaaaggtctttcctgcctcccccccctttccctcccccacccttattaaaaaagagagagagagagagagagagagaaagagaaaggaaatagagcaaggatgtgcccggtgccgggtgggagaggggagggggtgttgttttttgtttaaaaaaaaaaaaaagaaataggaaggcgagagagcaatcgagaggacgcgaggtctggagaaaccagcagcaccaaaaaagaggacgctagagattgcagtaagatcgggtctttatcagaaatgttatcgcttgtcaggacctcagtctccgcgcattacgtcagtttcaagacaccaacactattaatatcaaaggagccttcgcggaggaaagcgccaccccagaccgagctcccttaaagagacagcgcgcgtccccgcgccgccgccgccgccccgcccggctccgagcacccgccgccgccgcccgccgggaccggccccggccgcggcgagccggctgcgcgagaacttcgcccgagtcggagcgccgcaaatgagagcggcgcggtgcagggacccggctaccttcccgccccgcctctcccccctcctccctcccccacctcccgtctgtgaacgtgcgggctggaaaaggaggaaaaatccgaacgcgttaggaataatgtgataaagacgaggacttaccttggggtagtggggggcaggtggggggcagtgcgtggccgccaaaccgacgttccccagacactcagagatgctaacagaaacaatttaaagaactctcaaagtccttttaccttttctgttgttactttcccttctctctcccaattaaacgacgcaggatgtgtgtgtgcgtgtgcgccccctcccccgccctttatctgtggcaagaagtcttaggacacctagttggtgatcaggattccccacgattttcacggcaagaaggcttgaggagaacaacttgaactctatcctgagttggagaagtgcggactgaggttgctatggttttctgagctaaagagaagccagaaactcaatgggtgctttaagggggtaccacaaaacagacaaaatgggaacattattcaaatgctgcaagattaatacatgcagtttgggttttagtagcag

SEQ ID NO: 51215 - DNA, 1105 bp, Homo sapiens
aggagaagttagcctttggttctgggaaaacaccggctaggagtccggagctcttgaatttcatttcttgtttgtcttttaaacgacgaaatgtatttaaataaaatatcttactacttcatgccttgttcttcattagcaaacgaaggattgaattagaaagaaaaatactttggcctataaccttccatgattcattggttttataaaagagtgtagtaccgaaggtgtttgaagccaggcgggcctctgggttggattctgagccatgaatgaggacagagcacagagctggtatctgttctccctgttggtcttaatgctgggtatggcttgtcagctgttgcttattttccctgctcaatcttttcttatcagaggcagaaggcataaaggatgccatctgggattgcttgtttagatacagcatggtgttaacaagtttccctctctcttacgctttcttgtttattgctgggtgcaaagagcagcgatacacatgtccaaatgcagtcatcgtccaggctctgttattcatcatgaactttaggagcaaagggcaatggaagccacaagctctgagtcatctagaggcggggcaagaagtgctaggctacgagtgggtgctacattctgcagcacctagaggagcttcgagatcaagttatttgaaactgtgaaagaccatgtatgagattttactgacatcctttctgggagtaacaagagactccacattccttagaatctggtggctggtaaaaacatggcacttcttaaccctgttaagagattttgagtttacaatatattacagtgttaagaacgtggcttcagagtcacaggatttcaacccaagttctgccacttgtgagctggtagttaatactgtatttgctctaccaagattccattcacctggactttgcatctgtaaccagctgctgtgaatgttggctgctaactatggtcacaattgccccatgtatcccttcagacaattgtccttagcaaaaatgaaaagacttctcctagaagccaaagaatgactgttatctgacacaaaatacctgtctccttgcctcaaggtgggaccaaagctctg

SEQ ID NO: 51216 - DNA, 1093 bp, Homo sapiens
ttatttcacttttgtccactttttccattttcaatttatatgcttgccccaagtgtaaaacgtatgttatttttggctgccaaattcttctcctatccctttgcactaatgtctccgcttgctccacctttagagtctaatgttgaactaacatcaactacaagggcaacaaggcaacctctgaactttagctgtcagcaaaagttgaaaggagcagtaatgggagcaagatgtggcatggggatgctgtgcttgaggacggagtctcacgagggatggctgccctcttctctctgcagaatgacacccactctccaattctttccacttttcactggagaaggaaaaactttaatactctgatgaaaaatttgtcctgttactttggaattttccaaaggtggcaatgcccttttattcctagcctgatcgttagctgtgttgacctcacagagcaaaatctaatattcagggttgaacattgtaagatcccacagtcactaggagcagaatcaatgttatcctttgaaatcttggcacctagaaaaaagagcatgccacaatcttgccacacattgtgcactgtttattttagcaatgatccaagccatgcctacctttgggagagaggaaattatgttcccttaaatctcacatggaacattaaaaagcaaataagtcttctcttattgtcccaaatgtactaagaagaaaaagaaaacaagcagggggatgcatattttaatgatctgcaaagtaagtttcattttttttcagcacttgactttgtcctgcccaagtgatagcttggttcaaacagttttgtgaagtagccatatttttacataaaatacatcgctagttagatcaaaacactttacacggccttttaaaaaaatattttattttattaagttctgggaacctggcctttataaatgaactcatacagaaccttccattggaggagggtattgtcagagagaaagaaacgtagagaagggtttattaaactttcacacactaacctcaggctagaacccatgttgtgatgtcatagaactcacttcatttcatacgagatcatttttct

SEQ ID NO: 51217 - DNA, 736 bp, Homo sapiens
ggtgaatgcactgtaaaatgcattgctgtaattgtgtgtccatcatttgaagacaagtgtagtatatagtgtcacatgtgaaaatggtccagcctttatttatgacattcatggcaggtccatagtttacaccttaccaacagattgtctaaatgttcagacagattaaagggttatgactttatcatacagttcaacccacctaaattccctggaacatgttaaccagtcagtacttaaactttccaatatcgttaacatacttagggttaatgtgggaagaggtatggatcttggctgcagggctcatgatagaatgcaaaaatggggtaagagatcaagcatctatggtcctattcatttacctgaagtcctgatgtcaacagagtcctggtgccaatgcctatttcctcattgttactccatgagtcaacatacatttcccattacttcataaatcttaaagagagagagggaatgttttgaagttcaaaggcttcttttccttggtctgtggctttatggacaatcaataaataaaatcatctattcatttatcaagcatttactaagctcttgttgtgttccaagaactgtcctaggcccttgagtgacatcagaaagtaaaatagacaaacacacctgctctgtgggacttgcacatttttacaaatcagtatggccagggatataagacatcagtgataactgcttttccaggttaatagatcctgtt

SEQ ID NO: 51218 - DNA, 613 bp, Homo sapiens
caaggaactgggaatacagccatgaataaaatatactaaatgatagattctaaagaaaaatagatcaggataaggggattaaggctgatgctagttactattttagttggagtagttgaggaaggtttctttaaggaaaccacctaaatagagggaggatgtcagccttgtagacatcagagaggggaattccagggggtgaacaacaagtgcaaaagtcctggggtaagtatgggagtgacgtgttgtagagaatgaagtgacggagaagaatggttaaaaaaaaaaaattagggcagaatttacccaggagctggattttgcaagagtaatgtctttggatttttttctagacatgatgggttgctgtaggagggtttgagctggggagtgacatgatctgaattgtgttgcagaagcatcagtctggctgctctgtcaacaacagatttagtgacacaggggttggtacgcccattatgagactgtggcagtgtcgtgagagagagagaggctggcagtgacagagtggtgatgtcatcagactggtgacacattttgagagtacagctgagataaaaggcttttcctatcatagtgtgacgttaaagga

SEQ ID NO: 51219 - DNA, 2241 bp, Homo sapiens
tttgagtgatttcaaagcaatataaaataacatcccctgcctccaagaattatatgatttactcaggagacaagactgtcacatgtagcagtaaagaatataaactgtttcatttaatcctcacaagaaaaaataacatacgccataaaaataacaatagcatctggcatttattgagaatcaattatatgtgcatcaccttaattggattatttcacttaatcctcacaacaattatgagtcattactaaagctatttccattctataaatgagaaaatatgaacttaagagtagttaagcaacttgcttgaagtcttacagttggtaggtagctgagccaagatatgaatccagggtgttccattccaaaacccatatttttaatcagtataataaaaagaagagtgtctactttgttctaagtgtcaagcatcaaacatgtgcatgtgcgtgcacacacacacacagagtccctgttgggtaagctccctcagtggccacgttttgtaacttgcagcacttctccatctgccaagatgattgcaccactggtaggtgtctgatccaagagcagccaataaagcaactggctggcatctgctgaggttgcctgataccggtgctctgccctctatgaccaatattgattaagtgaattaatgagagtccctcacgtggtggtagtcataataagagagagagagagagagtgagagctattggtagagaagagtacaaattaaaagactgacaaaagcaagcagcaaaggcctgtagccagcacaatcaatgagtaagcagaggaaagggtgaggtggctggctggcactgggattagatttggaaagacattgagagaaaggcaccaacacagaaagacaaactcatattattgataaggaacaaggttatctacaaaattcttctataccaaaggcaacagataaaccaatacctagagctggatctcaaaggactttttagtcactgaagaaactgttctacattcaaaacccagggagactggtcttcttgaggctgggccatcccattgttcttgagtttctatcatgcctggatgtatggcttagatgcttgcagtcttactattacctatattgatttcctattgctactataaactgtcataaacttagtggcttacatcaacacaaatttattatcgtacagttctggagatcagaagtcaaaaataggcctcagtgggctaaaattaaggtgttggcagagtgtgttccaactgcagcctctaggaaataattcatttccttggcttttgcagtttccagagacagctcgcatttcttggctcatggccttttgcatttctttcaagatagtggtggagcatcttcaaatctccttctgaccaagacagtgactcttctccctctctcacttgtcaggacccttgtgataatgggggggtctatgcagacaactcagaacaatctcgccatctctaattcagctgattagcaaccataattccatttaattctctttaataaaggggcaaccttacttcccctttttcatgcaacattacatatttgcagtttttgatgtttaggaacaggacttccttaggggtcttattgtgcctaccacaccacctatattcctaaagtaatctttatattacttgagaacacttgagtaagtctgctttttgcaaccacaagaacttgactaacacaaagatgctatttggccagtttgagtagggcttctgttgcaatttttaaaaaaatcttgactcatagggtcccaattccacatattactcatattattctcctgtctggtttgcctttccttcctcctgcctattctcctcccactttcctaatctgctgttgtgaaaatccagctcacgcagggcaagtactattgcgcaatgcagcatgaagcaggttgtatatgagataggagatagaaacacagaataattgtttatataggaagttcttgggaagtttcacaaagaaggagatggcatgattgctaggtttgatttaagatcctgcttgactatccatccatatggggaagattcagatcaggcagacagttaacaatagagccaagaattgtaccaaggtcttctgattcctattctgttgttcttgataagtttttccatatctatgatggtttgggtataccagatggctataatgcatatttgttgaatgaacagaatgaataaatgaat

SEQ ID NO: 51220 - DNA, 1665 bp, Homo sapiens
gacacgcacacttcaaagtttatacatttttactagtaaggcctccacaaagaagatggcacctttccctttcccaaactacagtggaagaaaggagggcgattagagggaaaccaatgtctgttagtttattaatcagactttattatacttcctttgttttgagtaaactggctaatccctatcgtaatgaatgttaccaaacccagtgagtcattataacaaagtgacctcagtttaggaatcaggagacgtggtttaaaggacaaaccacattctgcaaataattttttttaaaggcagtttcctcaagaaaagcaacattgatatattttttttcctgtaagaagatggaaaaagagaatccattttaatgaatatctatttcaacttaaaaagtcctgtgctgaggtcagatttaaaatacaaatggaaaaattgtcaaaatatccaaaacaaacctattttattagtagaccagcagctaaaaatgaaacacttatcacactcctgctaacatcttattttaaaatttgagtgttttctttttcccatggaataatgtgtagtaattaaagccagcaagtctctgattagtatgaaaatgttactctattataaattaagagtaataatgccttctgtgcacatacctggctaaaacttgaggatctttaagaggttttagtgtgtaggatgaggacctcatcagcatgagcactaggaaagggatgctaagaacagtggacctttcgaaatgccaagaacagtttgcttatttgtaaaattggcagggcacagtcacccagaaagaaatttggcaagggtgtacagatctgtcaataactgccatgagactcaggatctgactggcaaggaagttattcaaccctatttgtattagtctattcttgcatcactctaaagaaatatctgagactgggtaatgtgtaaagaagagaggtttaattgactcacggttccacaggctgtacaggaagcatgatggcttctggggaggcctcaggaaactttcaatcatggcggaaggcaaagggtaagtaggcacatcttaacattgctatggcagaaggaagagagagaggggagaggtgctagacacttgtaaacaaccagatctcgtgataactcactctcaccagggcaacaccaagagggatggtggtaaaccatgagaaactgccccccatgatccaatcacctcccaccaggccctacctccaacactggagactgtaattcaacatgagatttggatggggacacagatccaaaccatttcactattctttaatcattttatttaatacttaaactaaatacagctggccaactgctggcctaaagttcctcaccattctcttagcctctcccacccccacctatatagtacttgatcctgctgacctgaacctatataggaaccaatatacacagtggttctggacatccattgaaagtctgttgaatatgatgctctgtttcttcatgccgcttgtccatggactcctaaccttttttaagatacccataaagcaagtaattaagagcaagccacaaggttagaaagacacagtacacattttcccttggagtcacttaagccatttacccctgttgcactttcacagcatcatatatact

SEQ ID NO: 51221 - DNA, 697 bp, Homo sapiens
cttgcttctgctttgagtgttctttacaattttcagcctgttgcccatttcaagtagattagagagtcaaataaatcatcccagtagaggacaatcttaaaatgaaatgtcggttggggaaatagcttttccatttattaatattaatttttaactttaccatatgttccgttcatttttctgcctctgaaagtcagagctcatggtgtgcatgtgtttttctgaagagttgaaagaatgatgttacccacccagtggtcagtttatagccttcccattcccagttctttatcctgattttagctcaatcccaggtatggccacattctggtaaatcccttaagcaagaaatactgcagccaatttaaacaaaagaaagggagggagtgctgctgtgaaaggcagccatgccaatgggaaaaaacgaaatcaactatttgccaatactctgtggcctgagggttaacgtagtgtccaaacagaacttattaaatgagctttaatattgaagcatcacagagtcgggaaaagaatcaaccaactcaaggtgatgaaatgtttttctgtttcagcactgagttttatcttcagaaagtcggataaacacaatgtattagaagtatgtcttatattactaatttttagaagactatatttttattgggtataagttggaatataatttatttatgaatgt

SEQ ID NO: 51222 - DNA, 1893 bp, Homo sapiens
taggaaataacctttaaaaaaatcaaaggaagagaggatgctttttaaaaagagggcaggaaggatacttttaaaactagaacgtcatataaatgcattttgcttcgaaacaacagaaataaaatttctcattctagattttcctcttcccagctaagtccatttccttatcaagaatttccttggatgtcctagttcatgaaccttaactactaaatacatttaaggcccttctctttgatattcttttatgtttttcagaatgaacactacaaaagagtattctaaattatacggtttcagataaagcgccgaagtacaggctcaaaagagtggctacaaagtacatctccacttggaacgttatagatgtcagatcccagcagggaatcagtggagtttccttactctctccttcccagagccctactaggtccctaaatccttctcgacaccttcgttagctgctggtctccaggagtctttcttcaaatccccccaccggtcatctcaaaacaagaccccaggaacctgtcactcacacccctattctcagtccccttcctgaagccccaactgtcccgttagaagacaagagaaggctgtcgaagctcctgaacaaaaagtgaagatgaaagagaaacgtactagggaaaaactttggcccagccacaccaagcccaagggggagaatgctagaaagtacgtctggtgggacggggctgggaactgcgctccccacgtgggccagaggaaaaagaacagcactcacaaggccatctatctgcacttgcttcacggctgaatctcccgagccgcctttgcctttgcctttccctgctgcgccggcggtggagctggaagaggtggcagtagagccggtaccttccttgcgggacgccatctttccaagcagacaggaagaaagagaaacgtgagttaccggaagcggaagtacaagtctcgcgtgacgtcactcgcaggccggcgttcgaggggcggagacggaaggagaagccaaaattgggccccgcctccctcctgttttccagttttaccttctttccaggcggtatcctttgtgcatgcctactgtacattttcgacctctttccgatggaatgatctaagatgaaagtaaactttttaaatgtttaatcattcaccactaggcaaaccgtcataatagcattacagttcgcattatttctgtagtgtctcttatgtaaaaatgctttcatttctgatcttgcaatgaagtgctgtactaactcgcattatgcatattagaaaactgataagtgatttgtccgacattattctgttaattagcgatgagccagtattgcacagcttgttttacgtaattttagatagctgcttgtaaccacttagattatatagaaattaagacatagaaacttttatcagaattaccagaaatagtagccttttgctattagcttcatgtagagatttacctgagtaaagtaccaaagaagttatctgaggtattgttgaaggatgatacagaatatattttctaaaaatcacgctgatttatgacacattactctgaaatacacatctcaagtccttaaaagaatatatgacaactgtaagaagccattttagataagtaatttgaaacattcttttctacttccaaatgacttttttcctatcccttatttttgaaatgtttattcaataaatatgtatacagaactgatgaaataattaaatcaataaacggcatatcctgccctgaagttttttgttgttttgtcattgggatctggtgttatatttcaatctgggaggagaaatagttacatgttacaaattcttaacactacaaaatgaaaagttaatatccactcatttcaagtg

SEQ ID NO: 51223 - DNA, 1857 bp, Homo sapiens
ctgtgctggttctttcaatctttagccaaaactagatctgggacagattccaggcaaggacaaaaatgcaaaattccatactccccattctttgattattttaccttgaagtggatactcgacagttagccacgggagaacttgaaattttctgattcattctcctcattaatcaaattgaccaagtaatttttaaacctccagtcagctttgtgccttcctgttactggcccagtatgtagtcttcctatgtcagagaccatgcacataaaaagagtacttgaaacttatctagacctacaaccagtttgacagtgaggaagttgaacccagctttcttcgggagttgcccaagatcaaacggcttgggtttgtggcaaaaccaggactcaaggttaggaattctgactctaggcaaacgaagctcttgagagttcttccaaaacactccatgcgagtgatttaggatggtcctaaggcaggaggaaatgcaaaatggtggcaccctttgccctgacaaatggttcctgagtgacgttagtttctatggtggtgtagcaagaacatttgaacttcaggcacgaaaactgggttccagacactaacaaactacgtgcccttcgtgaacgtgcttaatttctttatgggaaagcagccagtacaaacctccccactcatagctatccaatatatcatttccttctttcacttgggaattataaacattcaggggaataatgtaaggtaaatcacttaggacagtgtctggaacatattaaggctcaatattatcactgactactactatactgccagtctttcagagaagctcttgctacgcgcctctaaaacgtaggtaacacgctaaatgtattctcgtaattttcttttaccgtggccccagactgcgcatgtgcgcccccgtgcggaatcgcgcaccccagcggttttccagcgtacgcacaagttccgccctaagggaccgcccctttaagcgcgggcactgcggtggaagcgcgcgctggtctggacatgacgtaaaccaatgggcaggcccggaagacagaggcgtttgcttccgtggccaaaggcgcttcatttccgggtgaaactggcattgagggtactggggcgtgcgtgaggcgtttactgatgcttcctggtccggtggcctcggtcccggtaagccaggcatgaagatcacaaggcagaaacatgccaagaagcatcttggcttcttccgcaacaacttcggagtccgcgagccgtaccagatcctgctggacggcaccttctgtcaggcggcgctgcggggccgcatccagctgcgggagcagctgccccgctacctcatgggggagacgcagctgtgcaccacaaggtgggcccggggggctggggaggaggcacagagggtccgtcgggtgttgtagaggcgaggccgttgctcacagaccttcattgcgagctcaggaggtgcaaaacgccccgcccacgtggagttgacagttaagtggagaggtgaaggtggtcaggcgaatacctataatagaggcagattggacagtgccctgtgaatatcacgtgtcgttagcctggcgaatgagagcacattatagcagagagatccgacttcgaatcttgatcccagttctaccagctctgtgatttctgtcaagttatttagcctctctgagcctcggattcctcatttgtaaaataaagatgataactgcttagaagattgctgtaagctcaaacgagtatagtgtactagagcatttttcggtatccaaagtgtacccgtcttcaaatggttgctgtcatttgcatagcttttcttagtttaaaccaaaa

SEQ ID NO: 51224 - DNA, 1703 bp, Homo sapiens
aaattctatagactcgcactgcccgctggcatttacacccaatttaagaaaatagaaatttttgcctgaaaaccaattactcttctaaccagtataatgacaacaaagattaactttcccttgcaaaaagaagccgataaacacaagcctttcccagaaactcttcgcacaaacgctgttttttttttcacgctgaagacactaacaaatcagagtgaccaagtaaatcccccagggtttccctcttacaaatttgaagaaggccgctaagtctggcagcacaacccgacagtgtcaccccacactatcaaagcggatcattcgcaaaaagcctttttcagcgacgaaaagggcatcaagcatttatcagaaacacacacctcccccagagcgtctctacaacacccgatatccttaatcactttaaagaatgatcagaaaagttcaggggaaaaccaattatgcaaatatccttggaaaaagaagcaacttccctccgtctctttttccacgcgtctgtgaaatattcagcattcccaacgtaaaaattatctttttaaaacgggagggcagcagcagtcactggccgaggggcacccgccgaccccccgccccaccccgcccagccccaccagctccgcactttcttgagccccgcacccgagttcggcggaaggttgctgctcccggggctggcaccgcgggcgccgggcccgccaccgcctcctcccagacagccatttttacccgcggagtaggcggcccggtccccagagcgggctcgttcaaacctcctcccctccctccgcagcccagggtttccccggcctcctgggggacgtgagatggacctgcagggtaacagcctttgtagatctcagaatggatcagaatcatttgttaccgaacaagcgatgatgcgggcccaagctgcatgggtccgggccgagggcgggcccggggcgaagggggctgggcgggtggcgccgccgcttgggcgccgggagggtggcagcacgcgtgggcgcggcgagggctgccttctccctcgccctcccgcccccaggagtccggctccccgacggcagagcggcggggaaagggtggggggagggagctggaggaaaagaaggggtcggccgagtctcttaccttgctctccgctgggagttgggcgggctgggtggcccggggaggggaaaagggtcgggggagggggtggggaaaggggggagcccttgcgaggtgtagcttccgagcagctcccgccgccgccacagccggcgcctcctttccgattcactcaaacaaacaagatggctgccgttacgccgcggctcttcctgccgcccaaatcctcggttcaaatcggcaggatgtttacggtcaaaatggtacctgtgcgcctgcgcagccagcccaagcccccccctccccccagaaggagcggcgcaggcgcaatgactatttccttttctttggaacccgccctctgtttgtggagtccacaactgagcaagcgcaaaggtgattctcttgcgagggtctttgagagttgcggtgttagccaatagcgtaagatagcgcacgcgcagtgctttccagtgcggtgaatatttgcgtttagctttattcttgtgcttgttttaaagaaaaaagctgtcgtggtgcaattttgtgtgcccccaccaaaaaattcattt

SEQ ID NO: 51225 - DNA, 589 bp, Homo sapiens
aaaacaaaacaaacaaacaaaacaaaacctttcagacaccttaaactaaagctgctctgtcatcttgcagacccaccctggagtccaacaggacaattttcaaagccacccatcctggcaaagtgcttgacaagctgcaggagaacagcattcaggattgcaattagagttggaagagaggaggaggagacaggggtcactgggccaatcaatactcagctaccctctccccccaccccctcaccgccggtgttcagagaaatgccaaagcttgccgcttaatcgcggttcccattttaggtagtgcactcctgccatctagtggttcccccacgctctccacaatgccttcagcagagatggatttcatgtgctgaaaacccagcaaaggcagaaccaaaccaaaaagccagacttaaaagagtgccctaaaagagtgcccaagtgcaatcaaaatccacctagagaaccacaatagcatttgggttcctttgtgactgttgagaagtgattatcttagctggtgcggaatgccatagaaggtccaagtcttgaatcatggtgtcagtcaaactggtaatcagatttg

SEQ ID NO: 51226 - DNA, 1275 bp, Homo sapiens
ggaaaactcaaagaataaaacatctgagcagggaccaagagcaatcggggagtccgtatcatgtcacagagaagcgtacaagcttaggaatcttgttttctgaattcgaatcgcaggttgccagttacacctgtatgcgactcaacaagtactttaacctgtctcttagctgttatactacaaacctcaggcttgttaagagaaaatgctccgcaaggaactaaacacagaaggttctaacgctgagccaagactgggaaacgaactctgggaactcaccccaggctccccaagaacatcgcccctctggctggagcgcaattggtgattggctacttaacccgtccgtcctttcccgcccaggggtccaatccaatccagcccggctccgctcggagacagttcgccgagtgggcggtgtctatgacgttttctgacgtgttacgtcacagtgggcggaagtcgcggccgctgttttgaaatcgggccgcggggggtctctcaagctggttccaacgctgaggccccacagcctcccaattccgggcagacccctgacacctgctgtctggccccttccggcctgaagctgcagccgcgccatgtccacccctccgttggccgcgtcggggatggcgcccgggcccttcgccgggccccaggctcagcaggccgcccgggaagtcaacacggcgtcgctgtgccgcatcgggcaggagacagtgcaggacatcgtgtaccgcaccatggagatcttccagctcctgaggaacatgcaggtaggaaggcgggcgcgcgaggccagggggatgcagctgggagggaaagggcctctggtttcctctttacgtggggcccgtggatgtcatcggggctgccctgggcaaaccttaggtgtagggtctcccccattcacactcaagagtgtccccaaaagtcggatttgtagaggtgatgttttccagaccagatttctgcagaattgaagccaattttttttagattcaatcgagctctttagttactctgtaaactcttgcacctttcaaggcagagatgggtcgcactccacttccctctttaggttgctttaaatgttttttccagcatttcttctggggaggtccaaggagttgaagaatttacattttttttaaaaaaacagtcctcctttttttggcatagttaatatacagtaaactacactcacctaaagttttgatatatatgtgtactgtagtctgtatacttgtgaaattatcaccacaatcaaaa

SEQ ID NO: 51227 - DNA, 646 bp, Homo sapiens
attggccaggctaatctctaactcctgacctcaagtgatccaagctgccactcccggcctcccaaaacgctacgattacaggcacgagccaccgcgcccggcctatccccaatatatagaagagaaaattgataaagggcagcctatccccattttatagaagaaattgatgaagggagaagccaggtaaacaaactgtgcaatggcactctagtagcaagaagagaaaggtttgaactcaggcagtctgacctctgagcctacccagttagtcaccatgacacactgagaaccactgcagtagtagcaatagaagagtgattcaaagtttcagaatacctcatgggaaaacaaagatcccttactgtgtaaactcaaactacctagccagtcacattttgttttgattcccaccccctcatctccatgtttcataccttctcatactgtctcatgcctatttttttgtgcactgtgtgacctctgtgtgacttgtgctctcacctttgcctaaggcttattcattttctgagttagcttaaggctcatctcctgtaggcaaatatggatgcttccttcgtataaaagaaaaacttcagctgaattaaatttaaaggagtttaattgagcaataaacgatttgcaa

SEQ ID NO: 51228 - DNA, 926 bp, Homo sapiens
ggatattctgaataaaattaatccaattgaaaacaaagcgttcccatttttcatgtaatgtcagaagtggttaaacctcatcaggaataatttcttccatattaaccccactatgagtatatgtaagagtaagatccaacatctctaaatactttattcctctcagattgagggaaatgcattttccttcacttctaccttcaacagagcaaggcccagagtattatgacatcctaagggagagaactgcaaacactattctgtaacgaacatttgtcattcttgtgtcattcttgccattcatgtgtcattcttgcataatagctgaaacccattcctccttggagaatccctccctttgtgggcaaagcacaatttgtgtgtccctgtggagactgaaaatgtctgatactcattttactagccttcccttgcacctagagatagccccacaacttgggctctatcaatctgatttctgcacctggacctttaatttaatgtgaatctaaaaagcagaggtactagagataagtctatggcatgggtggtggttataaaaagatgaatcatccagagcagctgtgctggtggtggtataaagtgtggagtgccagctacagcagcagggtaagctgcaatgtgtggcacaccatagtggtggcagtattgtccacggggttcagctctggggtgtgaattggaccatggtttcctgttctgaaatctttcagccaggatctcttgcaatctagtctgctcttaagctgttcactaagtatcctcctcattgtctttagaggtgtattaaaggtgtattaaagcaagtttttgcctcactgcaatcttacttttcatcttcttgtatcactaaacatttttttaaatttggacataagttaaacttatacaaaagttgcaagact

SEQ ID NO: 51229 - DNA, 1530 bp, Homo sapiens
agggccaaaacactaggaataacccttattttctcacttttcttcacatctgtcatccaatctatctgcaaatcttgcctactcattttctaggattgcttgatagtgatccatttccatagttagccaatcatcatctgggaaaaaaataataaaagctaccatttgtgatctacttaccttctgccagacactgagctaccactttgtatgcattacattaatgaatccccacaacaaacctgtcatctgatattgtcatcttcacataacaaatgaggaaaccaaggctctgagtggttaagtaatcttcctacatctccacagctagtgagtggtggtactctaatatcagtaatgccaatgttgaaaggtagatccaagaccctccagatctgtcaaaatgccattttatccacttcctaaaatagcagactgaaaaagaaaaaaaaatagaaacaattattgttctgtaattaacctcctttccagtagaatcaaatgctaaggagaggggcatggtattgtgggtgtttgggagaaatataaagcagaaatgggatagagcattagtcagttttcagcatatggcttttcttcttgcaaaaatatctccattcggcgttcacaacactactcacacctgattttcttctaacctgaaacttgtgccttcttggactccatttctggttcctccgcctctgctaacccttaactctgtcctccaccctcttttctctccaaattccttctctaggtgatctcatcctcttctatggcttaaaataacatttttgtaccgatgactcataaatctctatctccagctcttaccactcccctgggctctagatttatatacccaactgcctacttgacatcacctctgagctgtctaatagacatctctaatttagtatttccaaaataaaattcttgatttacccacagccatcttccccatctctcagttgctggtatcaccaccgatcaagtttcttgggccaaaacactagcaataacccttattttctcactgttcttcacatctgtcatctaatctatctgcaaatcttgtctactcttatttccaaaatacattcaagatcccaccacttatcaccatctctattgctacaaccccaatcgaaatgactaatttctcacagctgggctgcaatgggctgcttccactcttcccctgccagaattcattctccatgcagtagccagccagagtgatctttttaaagagtaaaacagatcaaattgatccattgcttaaaagctttcaatggttccactgggtttcgagtaaaacagaaacttcccaacatgaccagcaaaactgtacacaatgcactccttgccagcctctcagacatgaccacatacttctctccttaccattctcccaactccctggccttctttctatccttccaatacactgagctccttcacgtctctggcctttttcaccagccgttccttctgcatagactgctctttcctcagatcttctat

SEQ ID NO: 51230 - DNA, 698 bp, Homo sapiens
ctggatatggaaggccagcttcatccaaggcaccatggtgaattctttggacagttgttttaagtaaaaaattgaacataattattctgctgcccctcctaattttaaagggaagtgtctttcttttgggttctttttgattcaccagcatcaaggattccaggacacagcagtcacctgagagctatggctgataaatgtcttcattgcctcagagaattgttctggggccgtgacgctctccagcattgcctgaattccaaacggaactacatgcctttgtgactttgaagattaatctctgtcactcacagctcgttggcttcccttgctcatttctgcaatgtctgcagatggtgtggtgctctgtgccagagttatttacccacaagttccttcacacatagctccctctttgagccattccagggagagttaaatactgaacaattacgcaactcttttgtcaacccgtgggtctttccagctctggtccaaaagaaagtctctgcagcaatacctgctattcctggaggctgctgctgtctctcaactgaatgcagcagagacattgccttcaagaaccctctcaccacaaaaataaacattttcaaaatatacacaaacaacacatttttcattggtaaacattccttaacacacttcccagagtgcctgctgcttcactgcatttttct

SEQ ID NO: 51231 - DNA, 782 bp, Homo sapiens
aacatgtttcatttttaaaaaagttttaaacatttcccttttgtagaatatgcttctacctggaagtacagcaccttggtggccctctcaaggatgctctaaaagcctcttccagtggacagaagtgaggaaagtcacagattcagctgcctgctctgttcccactcctatggagaacacatggctgagagtaggtgctcagtaaatatttgctgactggatgaatggtcaaggcattcctttgtttgcactgatgttctctttctggctcttctgaaaagcacagagaaaagagaaagactggagaggtcaatgcattcaccaagccacagtctggagaacgctcttgtcttttggtgtcatctatgcttccagagaagactttggtgtcggaggctgagctgtcggggcagggatctggttagtgctaagctgtcttctgggagagccctttctgctctgtcacagctggagtgcagctgctggccagagagctgatttcctgacagcactgggatttggaaatccctgcatttcgcatacgtacccgccagctggtcttatccaaccctttcccctttggaaggaagcagtttgacttctggtagaaacctgcagacttgacaaagacaagagcttgttgtatggttttagcatatacattccttggaggactctttgagttatgtttacatagaggtccttgactgctagacagaacgaatcacttgtaactcagtatgctaaacagtcttgaaacctttctctctctcatcaccact

SEQ ID NO: 51232 - DNA, 4136 bp, Homo sapiens
aaggttttcaactggagaaccaagtcctataacttggtcgttgctatgtttagtgccttgatgagaaagactgtgaaactgaggacaggctcagcagggaagagggatgtgatccattcttgatgtgtgtggtgaactcaggaaaggcggcagcatcatgtatagtatctatttaccttccccacccttgaagctgctagaactctatcagcattttcatctttctttgtaccatttggtctgtcccaaatcacagaagataaatattgagcaagcagatgagcagaaaaacaacttgggctctttcccatgcctctactacctgtctgtatcacatgaagctttttgaaaaaggtcacagaaaatgattttgaaaagaggcccagtaaatattttggtaatgttttggtgtgggctttgtttggcctttttgtctttgctgaactccgtggcttgggcttttaagatacttttaccgtcagagtaatattattttgataacccacttcctcgtgatgtttgaaagatggttaattattgtagggggtgtaaatacagtgtcaaagtaaatcattacaggattctttggtcaggctcaaggttaaaggcaaccacatttcccaacaacagagcaacataatcattccttttcccacagataactacagtcttcctgtcagcctacaggaatcccatcccctttcctccagtgtaaccggactccctgccacagagaaacaacactctcctcttcagctttgccacagggtaatcagtcattggtacaccagcttgatccccaaatgctgcagtaaccacagaaaccacacagaatgtggactgaccacgtggttgtggacatagtcatcatttttaacacagagagatgaagtcactccatcttttctctgatgcagtaaaacattaaaatacaacattggaaacaaatgcttttccaatgtagaaatgtatgctgtaaagccaaggctccattctacatccctgagtaagggaaggaaagaccaatgagacaaattcctgagagcccgttaaaaattggtgtaacccattctcagagaagataatggggaggtgacactaagggggtacagaagattgtcatctgcagaaaaatcaggcatgttttcccagaagagagaaagattgaactacctcaattgcaaaaatgtgggaaccccaaagaaagagatacagcaaattcaaaagcattaagaaataataaagaaaagaaaatcttggctttaaagtggcaattttttttttctagtgactgaacagtaatcttctaaggagaatagtgagagcccctccccaatagagttttaagctttcactgtgaaaaggctattcttggctcagcaacccagctgatttattctcaccttgaggcagttctgtaaccttgccttctacctcagcttcccagtcagccaagtgggacttccgacttgcaatctgcttcatttgctaggatgtcatgaagattaattaacaacattaatatactaaatgttctttgggatgggcagagagaaagtgtaattatgaccattattgctctgggttactaggcagagtattgagatggttgcagggactgtgcttggaagtagaaaaacaggccaaacggtgatctttgcatggtttcaaatgcccctggcctgaaagtacttcctctatattcttgcccagggacttaaaatgttcacaattatgctaatatagcggaaagtgcgttggacttggagtcagaaagcttgtatcccatgctgtctttgccacttactggctgtgtgatcttgtacaaactacttaattgttccaagtctcagtttcttcatctgtgaaaaatgcataaggataccaccaatgtctatatgccttacagtgttcctgaaaaatctaaatgaaatgtgaatatttctaaaaattggactgactatacaaagataaaatattattatctcctagaaaaaaaatgctgtaaccattataggctattttatcccctactacaagttagtttatgagacacaatccaccaacataagtacatctaagacagacaatttttggctctagagaaagatcagaaagggtaatatggttgtaaaactgaggacctcagttagccaggcatctatgtggggtgcttgggtgtcagtgagaagtcagggagacatcaaataggagctgaaccttttgttgtttcctgatgtgaggcctccctacagggaatggagggcaaacttgtaatgacttacaatctttgtatcttaaaatgttagtcctggaaaggaattagagatcattctagttcaattctttcattttacaaaatagaaaactaagcctccaccttaccttgaaaattcccttcttcctgatgcttagaccaggattatttccattgcacaccatctccaatatgcaactagttattaaggtctgtgggtgcacttgcattgaattattactcatacccacatcttcctgacctgggtccaaacccccaacattataagtttggactagtacaacaatctcatagtctatcttcctctattttttttctgacccctaatcttctctaaacactgatcccagattagccttctaaaagtgtccactgaataatgccttatttgctcaaaaacccattaatggctgctgtgtacagaagagtggtagcaatacctgcctgccttatctgagttatggtatattctctgttcctaaggggatgacactgtatgccatcatccctagtgttccagttctagaaagggattgacaaaaatgataaatgcaccactttcctgggtttgctgttcatcttaaaaagaaatccaattacagtttgcaattgcattttggtaaaacataatgagctctccttggagttgccttattcagatcaaattacttcttggtaatttaaagtacattacatctcccagatacctctcaatacacccacagtgtttgaggccttgtgtaactattgcacaaacactggccagtcaactctagatgagttcataaccaaaggattattacatgtttacccacatacaagtcactcttcatttccctcatgcagggaggtcaaaggtcatgtaactctgccagagcaagttacttctcagggactgaaaatgagagttaaggagagctttcttctaaaaacattactgcagagaggtctaaatgtgtgtgtatgaatgatcaacattatcagtcaatgaactttctcggtcagttactctcatgtattgacataaatgacactgagccatctgatgactaataaaaatgacaaaccctgaaacattgaccaaaactcacaagaatgacatttcctaaagcatttccatttatagaaaaagttagaaaaaagcaaagaggaaaaaaaagtatatgatgagaagctgtaacagtaagagaaaagaagtagacctgaaactttataaaatggcacattgtcccctgatttctccaagaaagttcaatatgtaaaatgtcaacagatctgggtatcactaaaattttctccactaatttctacaggccagaaaggtcatctaagactttaaaagtgcagaatgatgtaagttttcgggagtattattcagccaagagtctcatcaagatagctcccccccactccccatgcaatgagaacaatagccctcaagagcttttactcttgacatttgcacctttatttacaagatggtatgtcatttgggctttataaactttacatttatcttctttttgtttgttttttcatttttctctttatacacactatatcaatgtatatatttagaattgtttttctttttcttttattattataccttaagttctgggatacatgtgcagaacgtgcaggtttgttacatacgtatacatgtgccatggtggtttcctgcacctatcaacccgtcatttacattaggtatctctgctaatgcaatccctcccctagcctcccacccccttacaggccccagtgtgtgatgttcccctccctgtgtccatgtgtcctcattgttcaactcccacttatgagtgagaacatgcagtatttggttttctgttcctgt

SEQ ID NO: 51233 - DNA, 1499 bp, Homo sapiens
ccattatgaaaccacaacacccccactttccatccatgcaatcaacatgggatttccttactaccccatccaagtatagactcacctatgactcaggctttgctaataagaggcaccgtgattgattccaagatggacacctgatgcaattcagctgatgacatgcctttcatcctcttacaccctttgggaaagcagttttctctttccgtcggacttgtggagctggtaaaataaagacttgaagcaactagtggctttctctgccaccctctaaaggaaacctcataatgaaccaacacagaaaaaataatagaactaagagatgacaacagagaaacactgagtcctgaagacatcatgagccactggactgagccacgcctaaagcttgtcatcttttgaattggccagtaaatgaaatctcttcttacttacatttccactgacacactttcccgtttattaattagcgttgggtttctgttacttgcaaccaaaaccaaaaccctgaaaaacacaagacagtaatctctaattatggggaaaaaatccaaaaataactaaccccttcttacctcattagtcttcatgaaaactgaacaaatggggtcattggaaatgccactgcttccaagctcttcaatactaacctgctcaatcctttttactttgtgttggaatgcaaagaccaaggatttggggactgatactgtaatgagtaacagaacagagagtattgttcattactttcagaagcagcaacttaagtcttgaagccaagtttttctaagggaccccaggtgtgcaatttgcaagcaaatgacaatctacatgactattgattgctttgaccagctaattatgagtctgtaatttcctgggccctaggatttctctcctatttcctatattggaactccccttggatctcatttgtttgccccaaatgatccctagagaggaacttctcctctcatcagccttccccacgtccttctccatcctgctggcctctcaataactgtgtcaccagatttcaaagggactttcagcttattgcataatcagttcttcctctgagacatcccccacccccatcattacctcagggtgttggaactttgctgtaagctgctcacagatcattaaagatcccagctgttcctggtccataacaacccctttcaactgggtctccttccaggaacagctgcaaaagctccagaaaggaagggaggagacacatttagcatgataacaaatcagtagggagtggccagtttacccagaaaggctgtgatgcagttatatccacccagcaactctccccaccctctaggagagagacaaattcgtgctgcctctgtgtgaaaactcttcatatctaaaggaatgaaatcaagaatcacaacccacccctgctccctggagaggaacctggacaaggttcttgctttttccatcatcattcacaaaaaggcctgtcagtggttaca

SEQ ID NO: 51234 - DNA, 2386 bp, Homo sapiens
tcaaacaaagaagttaaactattaaaatctgaaaaatactaaaaatatttttaattcaaaatataattttcaattaagcagagacttcacctcagagataactgataaaaactgaggcacagagaagttaagtggctgaccaaggtgacacagctggtgaaggacacagccaggactctaaccagctccacatcacaaacgtgctgtaatgagctactggctgcccagccagccgactgaacaggttgtttataaaatggagcaaatactatcaatcccacttgcccttagaaatgcccagagaattaaccaagctcaaggacagtggggatggcacagaactgactgtacaggtgtaaagtgtgatgatttatgcaggaactagctatcaaagttacggaaacctagaattttatccattgttgggtatctcccagtagtgcatgattagccattcttgacgatgattctgtgagctgttagaagtttttgtgtgtctaagtagatctgtctgaaactattttcaggttgtatgaatctttgtctaggaatttgcttccctggcctacccaaaaaaaaaaaaaaaaaaaaaatgaagtgcattttgttctgttcacagatagctttctttcttgctactcttggccataagaccaactctaaaaacattggtgaccctgaaaatgtctcaaggacattcagtttactttccttgcctctaagccactccttcttttaaaaaagaaagcttgaggaggctgggtacagtggctcacgcctgtaatcccagcactttgggaggccaaggtgggtggatcgcgaggtcaggagttcaagaccagcctggccaaagtagtgaaacctcgtctctactaaaaatacaaaaattcgctggacatgatggtgcgtgcctgtagttctagctacttgggaggctgaggcagaagaactgcttgaacccaggaggcagaaggtgcagtgggccgagattgcaccactgtactccagcctgggcgacagagtgagactccacctcagaaaaaaaaaaaaagcttgaggaaatttatagcccaggaaaatgagtggggaagagatgctatttaaatgtaaaatcactcctgctagaggtagtggtgggagtggggagagatgaaagaatggggtgggtagaagaaaatgtccgtccatgggcaattccatttttggctattccatggagacaaaccaattagtgtggattttcaaggtggtttgtgtgaactggctacctgcccattatgaattggactgggattaactagctcattccaaacactccaccaaacagcaaatggtcacaggaaaatgatttttagtcaccaacaacctggctggattggaaacttggagatgaaagccttgataacctcctaccaatctacaaagagactgtgactccttcagatctacccacttctaaatacctttttctccctgccctcttcattctttgcttttattccttaaaaagctcttttgcagttcggaggctgtttgtttttctgaacataaacatacctatcaaccaaccagcctggtaatggtcaatgtgtatgaacaccaccatttatgtgtttcatcatatgagcttgcatgactgcctcatctataagtttaattcaacccccggttctagaaaccagtttacttctaatagagaagccctgagaaacttgggctcaatattgagggcttcagcacacgactaatgccataagcacttttaattatctgtctcagcttcttacagctggaatttcccttgttccagacacaaagtccttaactttatattccaggctcaggaacttggctccagggatcaccaccagccaccagcatgttcattcattcttttctccaagcaaatgatccctacaccagggttaacaacctcatcaagagaggctaaggcgatttcagctgcaaccctctgtatgtggcatccctgtggcttcccaccttagataattgctatcctcctttccctcacctattcccttatggggagccactcagtccctttggcttaggtgggactgatcaccactcctagggtgcagcatgtgatctaagtataagccacaagcacatcatcatatttcccaggccacagtttttcagggatggtgttgggaatcattgaagccaatatggctggtcagcttctttaattttaatttaaaaatgttttgtttgtttgtttttgagacagggtctcattctgtcacccaagccagagtggagtggcacaatcatagcttaccacagcctcaacctaccaggctcaagaaatcctcccacctcagcctcctgagtagctgggacctcagtacatgccaccatg

SEQ ID NO: 51235 - DNA, 1396 bp, Homo sapiens
agaaagaaagaaatctagaatgtcatctttgagacacagtgatgaagacacatgtcagtgcctcctacaggtacaaaatggtaacataccattagaggaggggaaactatttcttggcttaaaatgtgatactgaagttcttcaagagactcctaccaacttgttccaccaagacttttcttcctgtcctgtctctgtatttttgatagccattcacatattctgaggaaatttagagcttctccctagtagatatcctatgaaagaattcattaatctttttccttctctcatatgtcactataatccacatgtacacctgggggcttcccaactccattatctctgtaaaagccagcatttctgtggactgctccagtggacattggccctttgacctttaatcaagggctggcaggagatcctagagtatggtggaatgagcttagaattttgagcctattgaacctggtttcaaataccagttaaaagttgcatgactgtgtgcaagccaattgtgtgacctctccctgaatctcagttttaaaatgtatacgatggaacaaataataaacacttcacgaatgagatgaatatatttactaaatacctgacatataaagatcaaaaaatagcaaaaaatagcaaaaatagcagtatatataaaattgtaccttgtaaatgagctggcttcagaataaagtttttgtttgtttgttttgttttttggtatttcaggaattaaatcctctttgatgtagtacaaaatggaaaccaccttatactgcactgaattcattctcatggtgaatgctattcactagggttccagtgttctgttagtttctttccattccagtgggagctctactagaaatactactacacaagtggcatgccagtcaatttgatgacacaaatacttggtgctacctgctatgtcccccaaatataaatgagcatgaatactcctactttcaaagacaaagcagttaggttgttgacttagtaaatagctactaaaacaaattgccacactactcaacttatgtgacggatgattctcctgcaagttggctaagcaccaaaatgtcaaattccaaagaaaagctacactttagagataaaaactagatatttacccagtcatcagccaccactgggcaaaatcctgcagaaactcctagatctctgccatctgcctgttcgtctcattccatgttcaaggcaattatgtccattcccatttgtcaatttcagaaggggtggtttctacctgctatgaagtggtgcttaaatgggcaaaattattcaagggcttcaatcttcctagctggaaaacccaaataatataggacagaggttaaaagcttaagatttaaaaaaagaaaaaaag

SEQ ID NO: 51236 - DNA, 486 bp, Homo sapiens
ttgaaaaattcacgaattaaaaatgtcttacagggaaagcagttgtctccttgggaaagaatggtgtatggtttacacctattttaaggagaatgatggtggcatgagcaggtgtcagatctcagagcagaaggcagaggtcttgtcatacaggtcttactccaccccacaaaccccatccaatattgcttgactaatttggaatggctattactcaacatttggagaatcagaattccaagcagagaaagcaaacaagaaaaaaggaacagtttgctgtagcatatctccctcaccccacgaaattaagatggcccaaaccatggctgaccatgcacattcacttacatacagccctgacttctctataaaggatgtagctttcctcaaggtatcccttcttccttttctccatcccccaaacaattctcagatcaaacaacaaagctgcctctgcaaagtctactaatatcctgattattctcc

SEQ ID NO: 51237 - DNA, 413 bp, Homo sapiens
gccaccgcaccagcattaattcttttacaagctgtccaggatgggccctaatacactatccccatgataagcataacttgcattccatttcctctaataagggtgtctccacagtggattaaatgcctcagccagatgcacaatagactagtcatcattttcacaagctccagttaaaccacacgagtaagggcataggaggtcaaagggggctgctgatgatgaagaaaccgggctgccaggaggaaggcaaataagagcaagagtgttttccactagtaggtcaccttacagatactgacatatctgtctcctggctaggcactccttcctctccaccactccaggaaagatggtccacccggtgtgggatccaaccacagcttacagacacaacaaaaacttcctgtgag

SEQ ID NO: 51238 - DNA, 3015 bp, Homo sapiens
gaaatggatctaagctgaccattgctttacagcctataatcctagggattaaaactcgagtgagttccttttaagacagaccaggtaaaaccccagagagggcctcttccatgtccatctaactgattgctcttcagataaatttctcccactttttaaaaaagccattttttctttcaggctgaatcactaatgcagggagtcatggctagaagtgggatgcagcggaggtgcccaagaactgaatccacaaaaagtcattaattgccaaaatgactgagcaaattcaaatgacccaaatgcattcgctcgtaagggcaatttgcttctaggaaactggaaggagagaggggtcactgaagccgaagccacatagcggatgacaaacaggataaggaaaagcaagaaggcagacagttcaactctgtcagcatcaaagattcagacccaacaaaaacgcttatataaaaggctttgcctataaacatgtttatttaccttctatttggatggatttctaaattttcctggagagtccaggttattgaaaataactgcactgccagtgtctcttggtttaaaggtctgctaaaaattctacaaaaaaactagcaacaaaagccttgaatgtctcaacatatttcatccgtctcatctcagaggtttcaccaacacccaaatgtccagctgtttacatgtgcaatttatgactccttcagtgtgtcgtcctcttttgggttctctgctgtgtgggataggcacagtaataactgtcccctacataagaaaaccatttatttaaaatatcacacaggataaaggcagagttacaaacactgcaagtctgtcaattccactcactgatttttcttggctctccccagccggctatcatctttcatgaagtgccaactagcaacaaaaatactgacttgtgttacatcaaaaaggttttttggaaaaaaaaagaaaaaaggcagaaactcactgtcttagtctttttacactgcataggcctagttttatttcagagcatttcatccaatggtccatctctgttcccacaaacaccttattaagtactattttggcttctttaagctagattcctctgggggaaaaaaaaaaaatcacaatttctccttgtgataaatgactattacattcactgcatttaacaaacacatcatgtcagtagtctagctgaggggaaaatcacaaattaggtaagctgtagtccttatctgaagggattcagactctcaaaagagaagatgggcacaggggtactgtcacttaaaataataatcttagtcataacagcaaaaataataacacattgtgagacagtaacataccactcaatctgcttacaaaatagaaagatacttctgcctttaatcagatccatttacaggtagggctgactttgtttgcctgtgacccatacggtgacactagagccctgtcttctcagaagggtgccatgcttcgtttaatgctctgctgtgtcttgaaatcctgaacaatttttgaacaaaaggtccacattttaattttgtgctagatcctgtaaattggtagttggtcctgcttgcaggctaaaacctgcaaaccttaatctcactggcttaggaacaccttcttttcatattagctcccatggttaaatgagaaaccttggaggcagaatagtgaatgttatttgtccagtacagcctccagttgagatggcaacttcctccttattgaacaggcctgctgtgaatgatactgttgatcttcactggatggcataccctttatcatacatatcttagacctttggagttgatagagaacatctaggccaatggactcattttgcaggtgaagagccaggacatttgggtgactcaccagagaatgaacagttagttcctgacaaagagggtaaaaccaaggccattgctctttcaaccactagaaattctatttgaatgagtgtgatgaactagggtgggagtctgtctgcccagcctattaccttaagtaggcacctgtccacagtgcctggcatgtaacaaatatttggttgaatgcaggcatgtacatatgcacgagcaaatacaaaaggtaataaaacaacaaattatgtcccactaggcacagaatcttaaactttttagttactagtttccttaacaagcttcaaactttcttaaaatcttcaatagtttttatctttcaaggaaagaatgctgttctgataaaaatactaaacagagaatgcaaaataattacgatgatgataatcacagcaataacatttacctggaacatagcaattgaaggaggctgagagatcttgcttgcaactggttcagatatcacatctaataatttccactggatgtgatatctgaagcaatgactggaaaagtgtatgtgcaaagcctgtgggttctcttgacatgtcagtcaatattaaaaaaaaaaaagatgaaaccactacactacagagtaggatttttttacttttagagaaaagtaaaattaaaatcatttccttacggagcaagtacttacgacaccgatgaaaaagggcatgaaaaagccaaggaccttgagttctgtgcccactaaaacaaacaacccaaaagcccacggccaaatagaaaacagaaataattgagcccaggttgattaaatagcttcccagatagtggatcatttgcattaagtctgaatcctttctcatccttagtttcttcaattggggtgataatgaagacacacatctcctaagttgctggaaagagcaagtgagttcatacatgtacagtgcatggaagagtgctatatatacagtaagtactcaataagtattttctgtctatgggctaagcctgaccaagcagtgcctgcaacactgagctcaaggaagaaatactccaaggaaggtaaagaaacgcacaggtagtagagaaactaacatgagctcaaaaaagatgaaaagatgatccacaggcagaa

SEQ ID NO: 51239 - DNA, 1014 bp, Homo sapiens
tggacacaggatatctctcccaaccacaggaacactcctgtgccttctacctcaacacgcactgcttcagcacagtgttttgaaaccctttagtctgagacacacctgtaaattttcagaacttccccattccccaccccacagatacagtaagagcagcaccaggcttgtcgggttttgttctcctccatgtgtttcccagcagcacttagcaaaaaaaagtattaaatgaaaaaaaaaaatggactgtttcttgctttcaggaacagcatggacgaaggatccagggaggcagagggatagaatggcccatagctggctttataagagaagggggaagcaggcgcagtccatgcgcctctggtagagagagagggttgagtctggggagcctgcctgcatgttgcaagaggccccccagggcttccgagcagaccaggacgtggtttcccattgatgtgccctgtgtaagctcctccagaggcagttcccactggggaaattccctccaaggagttgtcacgccccctttcccttccttctcatctggataaccctctttgcttccctgtatctcttcaaagggctcctgcctttcagcttctggctagagaatgaaatctgaaatgcagccagttcacaggaagccagccagctgggtgcgcaaagaacccagaactgtttcacacctcaggctcctttcacaatgcaaatggatacctgactcaggcactgcggtacaggacagcaatgtgcacgcttcttttatgtacgtattttttttaagcacagaatctcttcttccaagaaaatggtatgcagaaactcaggatagaaaaccagttaggagcagaggttgggaatctcaaagccactccagccctttcgccctgaattgatcctacacatgcatctatcctagagaatcttaggaacttagcagaacacagcttaaacagtgtcataagaaagaaagcatgtgagctttcttatcaagacagacctggcttgaaa

SEQ ID NO: 51240 - DNA, 861 bp, Homo sapiens
tagatttatgcttgtttggcatattttcccagagtggctgtatgtatttaatatgattaacagctttagtcattaaacagcatttctttaagaggattgcacgagattacccttagggtcttgggctgaaatcattgcacttgtacacaaccagtgtaggtaatggaagttcatcataatgtaacaagttcactcagtacttaatataatcgaggacacaatccataaaaatattcttcctaaactaatcaaatcattaaaatgtcagcttctacacagacgctccatggcactcctgcccctggcccagattcaattcaaatggaattttgctgaatcgccctgatttatgaagtctgtgtttcttcatcctgccccctccctgttgcttaactctgctgcctgaatatagttgtcccagcaagaaaataaactggctggaagccagaagccatgacacaaagcaagctcttgtcaaacggtttccttattagctgttcacatacaataaagactgtaaggtttttcccctgtatgcaacgcgttcagagcattttcccatttgttggaaaactgagatcaggaagaaaaataactcttatgcactacatgccagagagagagcactggattcagtgagagagaaggagaaaaagagtgtgtgaatgtgtgtgtgtacacacattgcagcccatggtttattaacagggcctaattatgacaattgcttcctgtgggtctgtaatcagcctggtatttctcaaagcactctattggagcactgctcactctagtcacagattgcctgaatattctccaaaacaaaactgataaaaataaacagctcgttttgagggtatt

SEQ ID NO: 51241 - DNA, 2714 bp, Homo sapiens
gtggttatttatttcagatgttagacttgcccatgaaattctacatctacagaatatttgaaaaatatcaatgtacaagattactgtattatgttttgtttttgttttgttttgtttgagatgcgagttttgctccttttgcccaggctggagtgcaatggcgcaatctcagctcactgcaaccttcacctcctggattcaagtgattctcctgcctcagtctcctgagctgggattataggcgcgtgccaccatgcccggctaattttatatttttagtagagacgggattttgccatgttggccaggctggtctcgaacttctgacctcaggtaatctgcccgcctcggcattccaaagtgctgggattacaggtgtgagctaccgcgcctggcctagattactgtattatggatgaggaaactgtaatctaatatcaaaagtatgactggggtctagagggtcttcattttaatctgcatttgctaatgaggcatatttgactgtgtctaactcagttttccccttggcataaagacttgagtaatggttttttgttttttactttatgtcaacgctctgagggaggacgaataaaagggactgcaaagcacttagtgcacagtaaagtcctacataagcatttgtggcgcctaatcccagcactctccggggcctgctcctgaagctggtcacagagaaggaaggtacagacagaccagggcctgccaagacacaaccagggcgctgagcaacctacaggagcgggcaggcacgtagcttgggcgagcatggaaaacagacaaaagcgtcatccacaaatggagccaatcctatacacgaggaccagtcgtgggctcctagcttgtttcagcaaacagcaggcattgatccagggcagggtgggagggcccacggcctctgaattattaacttctcctgttcccacgtgaacttcaccatcagtgcttacaccaccacctggcaccgttcggagggattttccaccttcctctggggaaagtgaaacttatatggaggaatgaaacagaattgacttctggcttctctttgagaaggcttccttcttccacaattgcttcatcttcattttacagaggaaaacgtggatggctttgaggccagttttatgatatttatggggcggatttttgaggagtatatgggttacccgagccaagaattattataaaggagcctcctaagcctgaggcagagagatctgttctgtcttgttaaaagggaccacaataagttattaattccatttaggatttgaggcagaggaaagggcagacatgattacacacagatgtgtgtaatccacataaactaggaaataagccactcttgtgggtaaatacacttgattcccagctacagacaggtaaaatgttctgtctctccaactatggccaaacgatttagcagtttgttcagagctcaaacacataaattatatatacttgacatttatccaaagtcacttttttctttctttcctttaatttcttttgaggtaatgtttacatgaaaaatatacatctgcatcctataatttttaggcatcgactactgtgaattaaacttgatcagctctatttaaagggggatgtttatcgcttaagtgctggcaccacaaattgtcctgaaaaagcacaaatcatcactaagttcagaaactttccaaaagttgatgacactttcaccacaatctcctgaggctcactttagggtccttcacaatgcggataacttggggttcctagaaaggatggtcaaaagttgcctaacttgcaacaatgtgagattaacatcttaatcattaacttaaatggcattcctgactattctgtgaaaagcattgcctcaagaacaaatgatgaatagaaaggaagtgatagccttaattcttaaagagctcaaagtctaatgggggatacaagataaacaaaagcaaggacacaaccctattggaagcaaaaacacagagtgcaagtaattatatctgagtaattagcctcaagtaatactgggaaggcaggcattatcttagcttcactttggaggtcagccaaaatccctattcatcccttcgtgggcctctcatttaaggaggacttttcccaactgctatcagagaacaaatatttggaggtgatttttctgcctccagtgatgaatgaggaaatacctgctccccgtctctgtaatcagtccatcaacactctgagatcttggggaggtgtatgtttaatttatatcctacctctttccaaaaaagatttaaggtagcttacagtaaaggctcatatgcctagggcaatgtaaaaaaaaataagaaatatctaaatacattatagtaagaagagatagaggagggtgctctgaagtagtagcaggttggtcttgcaaggaagcaccaagtttggttggaagtatctggcatgcacagcgaggtgagaggcagaaagaagtcattctgactgcccttgccaaaaaaaaaaaaaaaaaaaaaggagtagtaacaatttatgagatgctaactttacttatcttaagtgacagagaacaaggtcaacaaatgttcaccctgctcaagcagcaggttgtattcttatattttaggatcacggactccattcagaatctaagaacgttctggacctatttcccccataaactcataacc

SEQ ID NO: 51242 - DNA, 1983 bp, Homo sapiens
attgtgccactgcataccagcctgggcaatagagcaagactctgtctcaaaataaaaaaaaaaaaaaaagaccatatatccaagggcccactcagcagagacatcaggtatatcacaaagtaggaaaataaagtgttagtaggaaaagaagttgtcagatgtgaaatgaagttagaatgagttaatgattttagaggtaaagatgatgtggggctcacagtagaccacaagcaattttaaatatgtcagctggatacaaagaacatacataaaaggggagaataatatagacactagacagggcaaattaatccttgcatgaaagaaaatgctggggtgtccctcagttgggttgtggggtcctcctaatcattgcctggcctggctatctaatccatggagggtcagatgagacagagtgagatccacataaatgtctccatacccactacccatgaccagtggcctggtgggtacataataaagaatttaaatttaaggactaaacagtgaagttagccactagggtttctttctccaccaaacttagaaagtccctaaggggagctacgtattgtccagaaatttaacaaaaatgtaaataaggaaacacacagtgctaatgcaggtttcatttcaaagaaaagaattcctgaccacaataattaagagtgaggttgtcttaactcagggtctaaaatcttttgaaaagtatctatttgaaagaaggcaatggaatgcatgtcttctatctgctctgtccccaggatgtacaggtgtccctttgctgatgaaaggtgtaggtggcatgcaataaatggaaatgtcatataccctgcttcctgggtaaggtggccagaattagtatacagcaataaagggtgcccagtgaaatgtgaatgtctggcaaacttttgctcagttatttctgaacaaccacattctggctttaactaaaaccacattgttacgctcatattttacacaaatatttattccaagtggttacaaaatagaaactgagtaataagttcatgactttctccccatcctccatctgcaggctttcttcagccagtaagcacatcatctctttggaatccagaggtcacattcaactatgtaaaagtacttcttatctgaacttttctccctaaaattcataacttatctaaattaatgaaaaaaaaaagactgggtcatatttctgtttgaggattatgaggtggagtagggaagagatgtccttctctggatgacctatataggaataataaactaaaaattcccaggaaagcccagaaaggtttctttacaaatgtatcacagctgcgtgactcacgcttttagttttgacctaatggtacttgtttgaaagcagtgattatcaccagaacatagactccacaaaggctagctttggtttggggtatccccgttcactctcagaatagtccagaaataaagttaacaactacctgtggcgacagtgtgctgtaccacactgataatgccaactcatgttaaattttccctctgaccttgtaatggaggtaggatgggtattgttattatgttaaacatgaagaaacagaaggccagagctggaaaccagcagacctcagagtggacccctagaaatgactccaagtgacatgcctgtcccaccatcagtttccaggccatggccccaagaagaagatgttactatgttgagttaaaaagcaaatgctcggccaggcacggtggctcatgcctgtaatcctagcacttcaagaggccgaggcagacagatcatgaggtcaggagtttgagaccagcctggccaatatggtgaaatcccatctctactaaaaacacaaaaattggccgggcactgggggggtgcacctgtagtcccagctactcgggaggctgaggcagaagaattgcttgaacccaggaggcagaggttgcactgagccgagattgcaccattgcact

SEQ ID NO: 51243 - DNA, 1773 bp, Homo sapiens
ggttactgtaggtgttatcaatgatgaactgggacaggagtcattaatgtgaccatggacaaggtagcaaagctataatgaagagatctccatggtgtaatgactgtggtttcctgtctaagatagctagaagtgtgttactaattcagagagggtcagcactccacatcaacacccagaggcttcaagatgccccacagagaattccacattgctggatgctggcactgactaatcaaagcatctcacatgcccattcccattttgcctgagtgataatatgagaaaagaacaaaggataagagaggaaagaaatgacctgagagtcatcctcgtccttccccctctcttttccccttttgcacccctcaggatgcaatctatccccaaccccagctgagacttcctccaaaatattgctctaatccatacccatctgccatcgccactgtcacctcccaattcaaatcagcaggagcacccatttcacttggaaggagacctccagtgatggggatcctttatccaacatacacaattaatcccactgctaaaatcttccttacaaactacactaacagcccttcagttagtttcctgtttttcaacgttgggctctcttccaacttaatatatggaaatcccactcggaaagtttgcagaagaacaactattctcattaccatctgggttctgacccagtggtctgtactttaacccagatggtcttttatgagggaaggtttgtttgttcgggtgttggtggtttttttttttttttttttttttttttttttttccagtgtgagttcttcagtggaaacttcgctctggttttccaacactgttttcacagcagctggagggcagaggctgctgtcctctctcttgtaaacaaaaaggccaagccgcagtccccggccaccaggacaaacacacactcccgctgcgagggcacccccatgcagcgtgagcacggcagggcagtggtggcggaggaagccgttgtctgctttcttattactgcgctgtcattcatgcagaagtcagcccacagatgcatcagtggcttcctttcaaaagggccattttcttgaatttattgactgtgcttataagcttcttgtgtaaagatgctttgcacaagcttcaagaaagagaacttatttatacaaacccatttaaatactgcctctgtagaaaaatgtgtacggacatcaaaatattcaaaaacaactatctctttatatgaagtcagcagcatggggggttttaaatgctttatttactgtttatatttttaagattatcaatgccaactctactaattcagaaagtacagtaattcagacagtaggagggctgtaactaatctttgcactgcctatgaacaaaggattgctaagcaaattataatgcatgagtaaggttgttccaagaatagataaatatttggcaagaactattttaggtctattctagtactttggagctacccactaatttataaatacttgatctactaattacaacacttcttatctattcatttaaccaggtctcaaaggggcaaggcaagcagcatggagcttgatcccattggtgatgtatgttggtcatttgttcttgaaaaagtactttctgctgggcatggtggctcatggctgtaatcccatgggagatccctccctctttgggaggccaaggcaggcagatcacttgaggtcaggagttcaagaccagcctggccaacatggcgaaaccccagttcta

SEQ ID NO: 51244 - DNA, 2088 bp, Homo sapiens
actaaattagggaggtcattacaaagtgtagattcctgggcccagtccaagtgattctgagtaggtctagagtaaggcccagagcctgcagttttaataattatctcaggtgattctgatgcaaaagacgctcagaccacactttgagaaccactgctgtaaaggtaaccacagcatcagcaaagacagtggtagctgctaggaacagagaggggtcaggatcggccgggcagagaggaaaacagtgcaggcctgagcttcccacctccctccacctccagcaccctcccaaccccaatgtcaagagaggcctgcaaggtgcagcaggaacctcttcccatgctgcccccagggaagtctactccaatgcgaagaaggggatagtagaggcaatggacgcaaccgctgcctggtaatgccaaacactgaggtggtccctgtggacagatgagcacaggctcctgccggtccaacccagaattggacaagtggccacacagagacagtctagggggctctcctctaaaatccagtctgaggtgctcattcttttataactacttaaataacaactaaaaataaaaaatctgacaggtgcagtggctgatgcctgtcatcccagctactcaggaagctgaggcaggaggatcaatggggccaggagtttgagaccagcctgggccacacagctagacccctcctctcaaaaaaaaaaaaaaaaaaactattttattttaaccacaactctgtgaaatatctccctttttcagaggaaaacaaatgaaggttttaaagagaagttaagtaacatacctaagccatagcagaggcaaaacctagcaagtcccattggctctagctctaaaatacaaaaggaattcctccccccacccccatcccactgcctcacctggctcctgcgtcggctaagccacattactatggtctggagtacatcaaaagccagcgaaggggtctccttgcttccactccactgcccctgccccccactatttgtgtttatttctgcttccatgttttttgtctgtctgcctccactcaattacacgctccttgagaacaaagacccttaagtgttcagttcattcctgtggccccagacctcataatggagcctgcagtactcaatagctcttttaaactgaccaactccaaagtccattctgtttgctaactgttcctctcatggggaagaacaacttggggaaagccctgttgagcaatcctttgcaaacggccaagtcatactggtatcttaggacagtcacccactcagccactcaaaagaaaaaagttcagaacaggaagtcagttttcagcatcaacatttatacaaaagagatccatctgggcgagatgttagctactcacatttgctgtccatgcctaaggacaacaggtgccatgccctgccagaagagccccactgctttctcacctacacggtcatgtgacagcaactatgccaaaaaaacaaatgcacttgcttatgtggaaaatgggaaaaagcaaatgatcccttagaacccagactggaggcgggcacagtggctcacgcctataattccagcactttgagaggccaagagtttgataccagcctggccaacatggtgaaacactgggtctactaaaaatacaaaatattagctgggtgtggtggtatgagcctgtaatcccagctactcgggaggctgaggcacgagaatcacttgagcccaggaggcagaggctgttatgagcagagattgcaccactgcactccagcctaggcgacagagcgagactccgcctaaaaaaaaagagaaaagaagaaaagaacccagactgggtctccctctcttcctatagagaaagttatctcttcctgcccttgaagacagaagcaattaagaaaaggagagtaattctgtttgtagaactgtctatagcagacaaggaaaaactttcattttaaactaattccagagaactgagacaatctgacagctgggcacagcatctatagaaccagatttcacaaaaaaagttggagaagaaggaaaagccaactcagctgaagcgata

SEQ ID NO: 51245 - DNA, 829 bp, Homo sapiens
ctgtgtgtataaaagacagatggaagggagggaagggcatcagcattaggaaacatgagccagtccatctcacctagacaaaacctttgcagcaaacatgcagatatctacagaggtttcaaaatgaacaatccctgactaccttgacaaaggctgagtttagaaaaatgcatagcatcatgggcatgtctcaaagccttgcagccaccccaaataagctgaaatcctgacaaacacaagggatgcctagagttgcaagccttggttccactttacacacctctctgtgtaaacgaaagttgcccgaggtgatctcttgtcttcctgcctaagaggcaatgtcttagctgtagctaggaactgtttaacttcttattggtcaataacatgccccagcaagcaataaatacgccctgacctcgcagctgccctttagcactgcacgcatcattgatcctgtgggtccttgggaaacaagccaatctgaataaagctaagtggaggccaagtaccatttcccaatgtcttcttgcaattccctagtagctgtaactagaaatagagcacctggcaaatcatcacatcatggatgtcagagttagattattatctccacgagagaaagaaaagagcaagagagactgagattctatctacacaaagaaagtgatgtgatccctaatgtagcaaaatctcccagtcttcacaattaaaactggggagcccaacatatgctagacgaggagagctgaaaagatagattaagagaaaaataattccccattgtcctatacgctttcttcattcgataataaaaatgcacttcatt

SEQ ID NO: 51246 - DNA, 1316 bp, Homo sapiens
ccttttccaccacttgaatgattattttcagtccttgtatctgggatttcacttcctgagtattccagtctcttgagcttcccttacatcacaaactcaggaaattccttttgatttaatctcaagccagtcaccccatgcctggatgcaattagtccacccacattctccatgtaatatgcaaactgcgttattggtctccaaatatgctgatgattctaggcaacaatattgccttaggagttagggtgaagtattttgatttaccggatatgaggccagaatttttcattcacaataatactgagagctgcagccactttctaagcacctacttggccaccacactccgtaggacatttagtaaacatggtctatttattctccaccctgatcctggaaaatgatgttatcatcccacttttacatgggggtgagggagacaaagtcctgagacaaagtgatttgcatgagatcacagagctggagagtggcagtcaggacttgaggtccaaagctctctacctaacttttgacagctggggtttttcatacaagttaaagggcccagcctcagagaccatcacatgcttaatgatgcttctcatgactgacagatatcccagacttgcttgcagctaggcagactattagggattagtctaaacccctcatgttatagtgctcagcccaaagggtacacatatacaacttccatgcctaggttcccaccagtttcttagctctagttacaaagctcgatttgctacagcatagcaactgaggaataggcacctcaacaatgattaaaaacagcaaaacaaaacagcagcagtagctaatacctatgcactatttagtatatgccaggctcttcctaagaatgtttcacgtgcaattagctgactttcacagcaactctatcggatatgaattgtctaatcttttcatttaacagaggagaaaactgaggcaacaaagggttacataaactaatgatctaaggtcacacaagctgctaagtgattgagccaggatttaaaactggcagactggctacaagtccagcatttcaccactacgcaaagtgtcttttatgataattggccctctctgtactttttcttctacgtcacatgtaggtgaagattgcaaaatgattgcaaactctgcaatgggaaaaggaccatccaggaaaataacacaccctatgtatgcttcttcatttattacagagtcttcactttacaaatttggccaccaatacacagccctaataaatatgcatcaaatatactacggcttacaagaagtgt

SEQ ID NO: 51247 - DNA, 4981 bp, Homo sapiens
agctccctgcaacctccacctccctggttcaagcgattctcctgcctcagccttccaagtagctgggattatagacgcccaccaccatgcctggctaactttttgtatttttagtaaagacagggtttcagcaggttggccaggctggtctcgaactaggtgatccacccgcctcagcctccaaaagtgctgggattacaggcctgagctaccatgcccagcctgcattttatatacagacttacttgttttcacttcatgtattatggagggatttccacgctattatatgaagatattcaataccatttttctgtggctgcacagtatcctatggtattggcaataaagcattatgtatttaattagacacacattgattacattgtttctaatcttttcttattaaaaccacagctgcaattaaaaaaaaatacacctttggttacattttactttcttcctgcttaaattgccttatctgaaaatgaagatactatcagtcccacctcacagagttttttaaagaatgaaatacatgaaaaatatgtaaaattcttagttccagaaaccaggtaaatcctcagcaagtgttagatgtgattgctattatgaaatgggtcatctcttatctacgcaagtatatctgtagaatgcattccaagcagtagaactgccaggagatttaaaaggaaacgggaaagtaggtattaatgtggaggtcccagaaaattgggggaaaccaacatgggaaatgaagcagccattggcttaccagggacagaggttgaaggtgtcccagaagccacatcgcaatagggacttgagaagtctgtgagtcctatctggtgaaagggtcccctgagctacactgggaatgtgagcacgcctcccagactaacattctcctctgttgttctaatcaaccagcaatgtgtctaggaaaggccaaattcttggcagccaaactacatttcccagattacttcagtcctggaagaaacaacaaaaactatgccaggtcacatgtctccattttcaggactggaaaatgagggcatagatttgtggctctaatccacagagggaaagttgagaaaaggacgtggagaaagggtgagtcaaagcaagtgaatgaccagacagtggccaacatttccagactccaaaagggcaagcaatatttgcatataccaacactgggtctgcagcagggggccccaacccttgggcagcagaccgaccctagtccgtggcctgttaggaaccgggctgcaaagcaggaagcgagtgacaggcaagcgaggattaccacctgagctctgcctcctgtcagatcactggtggcattagaatctcataggagagtgaaccctattgtgaactgtgcacgtgagggatctgggttgcacgctccttatgagagtctaactactgcctgatgatctcaggtggaacagtttcatcctgaaaccatccccacaccaccctcctggtccgtgaaaaaattgtcttccacgaaaccggttcctggtgccaaaaaggttgggaaccgctagtctatactcacctggaccaaatgcgtatttagtgcaaaacaaggaggtcttcaactgctgagggaattgggttctaagaagtggctaagagctaacaggtaggctaaagagctaataaaaccaaatccctgagctcagataaaaagtaagaataacctttgtccatcagtgtcttcatttgcctattgcaagatggatgttaggacttagagttggcaggatataagtatattttcacactttgggaggcagaggcgggcggatcacgaggtcaggagctcgagaccatcctggctaacacagtgaaaccccatctctactaaaaatacaaaaaattagccgggcgtggtggcgggcacctgtagtcccagctactcgggaggctgaggcaggagaatggagtgatcccgggagacggagcttgcagtgagctgagattgcgccactgcactccagcctgagcgacagagggagactccgtctcaaaaaaaaaaaaaaaaaaaagtatattttcaaattttttggcctactttcaccccccacctctatttcacctctacccaaatctcatcaaaacaagcaaaaaagagcactttgaccactcactgggaagaattccaactgcaacagtttacaaagaaaaccaacataaatttcacttgaatgtgttacgctgacctcccaaaatccatctcagctaattaaaagaagctgcagagcagttcctatggatattagcattcaggtcctttaggagcatgtttacgtggcacatcaccttgctgggaggctcccagtaccctgggctgaaggcatcaattctcactggcaacggcacggccgcaagagtgtgatcgcaggctctgtggaacctcatgaaatgtttaaggactctcttggctcacatctcactcttcctcactctaccccatctcaggcttcaccttctccccttgctagaagccacttccgtggcagacgctctgggtgccaaggtttacagtaacaccccaatgggacagcaagattaatgaaagctttctgtgggtaattcaactctgttcagtaatatgacactgagaggacaacaggagcttgcaggaaagaagaggggtaaggaaatgggagagccatcaagatgtgcacatgaaaacctgtttgcaatgtgggaaggactcatctggtcagctatggctatttgtcagcatagcatagcagccacttcaccatgagaaagtgttatatgcaaacgacacctcctcaaagaggccctcacagactaccacagccaaatcctctcatatctcttttccctgcctgacattaaaagtgtactccctctgctgctttgtctgttaccgacttcccggtccagaatggaagctacaaagaggcaggactcgtgtctgtctcataatactccattccccagccacttaaagtgagcctggaacgtagtaggcacccactaaccttatgaacaccagtgaatgactagctggaattctgcaatagcttttaattttaaaatgtgcctacaaaatccatcaaaatccattttccattaccatattagggtatgaagaggggaaaaagtatcgagtaaatactggatctgagtcaccatgcctggcattttatacataatagtcacttaatttctaggactctctgaggtcggcatgactaatgctatttcagattaggaaaactgaggttcacagatacaaacacaactcacccaaagtcgcatatgtggaaagtgatcatttctggtttgtctgatccaaaattccctgcatctgtcactccccaccctgatcgctctctggctcctaaggctttcatttggttttcccaagatcgggctcccctgtgacatgtctccatgacaagccgttagtattcactcagagacaaattccaaacgcatctttgatctcactacttcaaggaatccctttagtcacttagaaatggaaacagtctgtttttataaatggctcaggaagggaggacagtcatcgcaggcagagtcctacagagagcgcgagagaacatgggaagcagccgaccactggtgcaaggaaggggctcccagcagcagcagcaggaggagccccagggaccaacttgggagaggtttgttctcagatccagtgctccctttcttcacacagcaagaactaccaccacggacgtgtctcctttctttaaagtgctttgttatcatttactaataaaggaaaactcacagacccaggccttcaaaagctctcgccaaaagtagggaaccctcaatgaagcgcaggccagatgccagttttcggtgcaaagcgatcctgtgatcatcaagaatttagaagccttgctgaaagtttccactgcacacagaagaccacacaggacagagtttcttccacggggctaaggcctaattcccgaagaagccactgcggcttcctagtttggcacaggtgtcaaaagccacttttggattgaccctttttgtccgggaaggtgaagcttcctaaggctagatggaacaagctgctggtgcagtgtctgcctccccaagccaaagagcagatttccacaaggccacccgacaaggcagtctctaggacagagaccaggcccagataaaaggctttagccttggcagcacagtgcactaagaacaggcctccagggtggagacacctggctgaaattccagctctgcgtctcactgctgtttgacctggggctgtgcacatcacatctctatcagtttccacatctttaaaatggggctgataaaaataactacctctcagggcagcctgcaacaatgatgcatgtaaattgcctggcacataatggacattcaatctaacattaaccaaaacattattatttttctcacaaaaaagaccccaggaggttctgttgttccattttctaactcacccttattgctctgactgtaatcatacccaaaataaaagccttttcctaaatttgttgtagcagaatggtggcctgattctttctatcgttagtaaggcaactaactggctctcactccttcgtctctaaaattaagcaaatgaaaacatgcataatgtgggtgaagaaaaggtgaactacttctatgtgttcactgatgttttttttttctttgagacagaatctctctctgttgcccaggctggagtacagtggcacaatcacagctcactgcacctcaacatcccaggctcaggcgatcctcccacctcatcctctctagtagctgggattacaagcatgggccaccacacctggctactttgttgttgttgttgttgctgttgttgagacagagtctcactctgtcaccaggctggagtgcagtggcgcaatcttagctcactgcaatcttcattttctaggtttga

SEQ ID NO: 51248 - DNA, 3202 bp, Homo sapiens
acaagccaagctttccatgccatcacaaaattctgagtcagtgactggaacagacacaagcagcctctggagttctggtgacattcgatttcttgatcttggtgctggttatagacgtgttcactttgtgaaaaattatcgagttgaatctttgtgatgcacgaacttctctgtatgcatggtacgtgtataaaatttccaatgaacttccaatgaaagaaggaaggaatatgtaacatttagcatcttgttctcccagacggaccggtataatcatttataaagataagatgtccatcatcttgaacggaaaatactgctatccgttagtctgcttgaatctgaatctgatcaccataggataagtttttaaatctccaagacattactaagtaaaacctacctcattctccttatacattatcctctctttttaggctaattaaaaagcttgtctcagctggcctgggttaataatagaacactatttcttatttaaacaacaaatctcacttttaagaggttttgtctcttgcaaaacctcaggttttatatgaaacaaaagagttatttgacgcatgtttttacctgagttgctaaagtaaacagtaacaaagtcagcactgagtcctcaagaaagctaagtctgattcagggacttatctcccctcaccactgtatctcccctccaccactgtatctcccctcaccacactggtatgcagacactcttgccattggtttagaaagcagatgataaatatttaaaatgggtccacagtccaatgaacaaaacagatatcaggtagaaaatctcctaattggcagattacatttttagttataaccccaaaatggcttttgcaaattatcaaagcaactcaaatctgcataatcttaatttaaagcaacataattcgagactgtgaggaatctaattgccagctaaacaactgtttccaaccgtaattggcttcccacaaccctgcacacgatcatgtacacacatgcttaaaccacctgatgtggaaggcatctggaccgagcccagcactgccaaaagaatctttgaaaaaatgcaacaaaaggaatgagctcttgcacagaattttccacacattggctcagagcaatttcgctttccagaatgattcccttaactgtcaagaaggggattatagtgctattcattgcacaagcaattttttcttacaattaattttcacccttctccaatgtatagaacagtgtgatatatacatatccactaaagacagatctataggtgtatgttactagttgagctgtgtcctctgcaaaattcataagttgaagacccagcctccaagtacctccaaatatgtccttatttggaaatagggtcattgcagatgtaattagttaagttagaatgaggtcataccagagtagggtgggtgcctaagccaatatgaatggtgtccttataggaaggggaaaaattggaaaaacacacacacatgtatgcacatacacacgggaaaaaacaggtgaagatgaaagcagggatcaggatgatgtttctataaagccagaaacaccaaagattgccagaaaatccccagaagctaggcaagagatatggaacagactccctctaacagcccacggaaggaaaacagccctggcaacaccttgatcttgacttctggcctccagaactgtgaggtttgggttatttaatccaccaagtttatagactttgttacagcagacctaggaaactaatacagtgtataacaacaatctttaagtaaaaatctgtgtgtgccactctgtcttacttgtatacgcacatacattgagagttatcttccaggaaataataaatttcgttattactaagcccttggatgtttgatttacaacagttgtgggtgcatgaggttaatcacaggactggggaaattctgactcacaatcccaaaaggctgaagttccaaattttgtcacgcaaccctgaattcactccagctctgggaaacctcaaatcccaaagaaaacacaacctggttttctctctcttttttccaatacagacataggtataatttaataatagtaccctgcttcccaaatgcaattaaaaatggccttcattactcctctgaatgagtgtgttttataatgctgcaatctacggttcaataaaaaagcaactactgcacctatcatggcaaagctgtaaaaactgatcagtgtgcttttggtagctctagaggcagaggaaaaaaagaaaaaaaaaaacttaaaggaacaggcacaaaataagttggtacaatgtgagtgctttagaaatccagtttttcatttctgaaacctttgatttccctaactttgattcttttcccctttcacttaggaagcagtaagacatagcagtacgattgaaagaaagaaagaaagaaagaaagaaagaaagaaagaggaaatgggagtaattgagattcaaacttttatacagagagaggtaagtcttgagcacatgtatctctaaatcgtcttctgtgctgttgtactcaaaaagtgtgtgtttgtggacagagagaaagacaggcagagagagagaatacgactcagagccatgcttcttaaaacaggaagaatcattaaaattagcaactcagcactaaacagtgagcagaaccacaaggtaaatggtgggtccagattctatcgcagaaaagagtcatttcctgtgactattcatcgtacatcgtcttggaccagaaaaggaaccttgaagtcatctctaagatcttagtgtctttcttttcccaccatacccaacaatgctcacagggtgacctgaacagaatgaagttttctgtgtgtcacacacaattttaagcactcgctatgtattaagtattgtcaacatcccctttttattgttggaggaactgagacaaaacttaaataactctgaccaaagttacccacttggtaagtggtggtggcagattccagactctgccctcttagccaccaggaacactgcctttcaataaatggtgcttggtgaaataaccaagcaataaacccattgcatgaggaatgcttctttcatagtctcatgtttcagagccctgagcagttcaatgtgcaaaagatgcccagcaatgttgctcacccctggttattttggggttgctcaaagtct

SEQ ID NO: 51249 - DNA, 593 bp, Homo sapiens
aaaaggcactgcagatagtggttgcttctgaggaaagaaactgagaaaggacaagctaggagaagcaggaattccctgtcactgtactgggggtcagagtgggaagggacaggagtcatttgctataagaagttttctctgacctagaaagagacacaggactaaggtaggtaaagaaacaaaaacaaaactctacagatgaaggaaccagatccactcctggctcaccgctgtgggcttcaccatgaggaggagaactccaaagtacaggagcagacttctaagttttgacctcagccaaagacctggagagccaacattccagccaaagaatgttggctcatggaataaaaacaaaaacaaaacaaaccgcactaggtcaagataacaaaatgagagaagagcttgctattattatctattcatgccccaccggatataccttgaaagacagctgaagggaaagcttagaaactttctccaaagggctactttcgaaagcttttatcatctggactaaaaaaggcccaaacaagcaaaagaaaagccccagtaaatgcaggcacaagactgtaaaaggagagtgaggagac

SEQ ID NO: 51250 - DNA, 1215 bp, Homo sapiens
taataagttatctgaaatgtgaggtcaggtagatctgagactaaattatagccccctttgagctatgagaccaccacaaagtaactaacttctccaagagtcaatttccccatctcacaggtcagggtcttatagtgctaaagttctgtgttgtactatgtggcacaaagtaaacacttaacaaatcttagtgactattcatctgcagatgaacttgatctgaatgtgataggccaataatgtcaaagtcttgccacccatccactttgctcgttttacttactactgacaaatgccactttgtactagcttcagctgcaaactacagctctcagagtgagggcatcctacttgcacattccttattgattttgagcacaaatattttcccacaagtatttgctttcctcaaggttaaattacaagttcaaccaaactcttgcaacacattatttgaacttcactaaacagttttatgccccatacaatgtgggtggcctaaattctgcacactgccaaaacttgagaatgatatttatccagaaaattcccagggatatctctcatgaaggttgcaaaagtatttagctctcactctgataatgattagatttaaaaccgtgcttttctctctgaggctctacaaacatctccctctttccaccaccctcaaataaaataaccacagagtggttgagagaggtgattttgtgagaagggattacttctaaactatgttttcccatacttagaaaaaaaaaaaaaggctaaggatataaaagccagcctgggcagggctgacacaagaggctgagagaagagcaatgggaaaagaaacactgaagtgacaaataaataacagtattctgaaaagaaaagtgcgtacaccatataaatagtaattaaacctcctaggagcatgtatgcttttatcaggaataaactcatctagataccaggtctacagtttagaaagagaaattagagggttttttttgtttgtttgttttttaaatggagtttcactctgttgcccaggctggagtccagtggcacaatctcagctcactgcaaccaccacctcctgggttcaagtgattctcctggcttagcctcccgaatagctgggattacagggatgtgccaccacgcccagctaatttttttgtacttagtagagatggggtttcaccatgttggtcaggctggtctcga

SEQ ID NO: 51251 - DNA, 1679 bp, Homo sapiens
ataaaatcaatataatagagcctccttcatagggctattgggaagattaaatgattattattattctcgcaaaatcttaatctcaaaccagtgtgtggcgagtgcttaataaatatgggctatgattactattaatcttaacatctattatgaaaaatgattaaccctcattatgccttcaaacagaaattcctatgatttctgccaaatttctctattcagattttaccttaagtgaccattctaccactatgacatcatatagcaaacaaatgatggtctaacacagggatgtccaatcttttggcttccctgggccacactggaagaagaactgtcttgggctacacataaaatacattaacacttgtgatagctgatgagctaggaaaaaaaaaatcacagaaaatatcataatgttttttaaaagtttacgaatttgtgttgggttgcattcaaagccattctgtgctgcaggtggcccacaggccacaggttggacaaacttggtctaacacaatgcttctcaaacctttttgaaaccctgccccctttagaaaaacaaaaatatatatacatcttgaaagaattgacacatggtgcctaaaaacacaccaatataacctttcccctgggtctaacaggacagcactagtgagaacatgctgcagtcttctaactagcagctccctgtgaatcatctgattactcattcatcagagagaaggaaatgaatggactcagtgaaacccaactagtttccaggaagcctgtgataaacatcccccctaccccggcttacattgcatcttaccacttactacctatcaggcccctaagatctaccccttgtattttcacacatgcgggcaagtctgaaaagggaccgtttgaaagagaagtacttggccctgggtgaaggagagaaaggtctgtaattcaagcctgggtgaccatccatgaggaaggctaggaaggagcctagtgctggggggtcctctggcctagacagtaagcttcccacaaaaagatggcaggtgtgataactagacatacacattatcagaagaacgctttgacaaggcaaattgtcaaggagttctaccagagaagagagcctggaagagaactttatgtatctttccaaccacagctgggaatgaagggcctggtgggcttggaaagcatagcttaagagcacaggatgacgactcagtcagacttaggagaacaactcctcacaaccaactatgccattaccaaaaagccatggaggtgtgacttggtttcctaaacacaggccctgggatacaggacaggaacgtcctccaggatgctcttccttatgatgatcataggtgaacacagacacgaaggacaggactgctctcctcctccaccccaaatcactgccctctctaaaaagcctttcctaaccctcatcacataatagatgctcaacagttatgtgctgaattgtgattggttaattcgtgaatgttcaacttccattcttatgttctacacctgggccataacaagtctcctaagagccttgaaaaggcagtcttggccaggcgcaatggctcacatctgtaatcccaacactttgggaggccgaggcaggtggatcacctgaggtcaggatttcaagactagcctggtcaacatggtgaaac

SEQ ID NO: 51252 - DNA, 1093 bp, Homo sapiens
tcagcctgtgtataacgcttataattttttaagcactgtttttcttttaaagagccttaggtcctggaggcattgggtgtggtatgttccagaaacagaatattcccataggcctttcatttctattctattggatcacagtgtctacctggggcagcagtcactctgatccccatccacctgcagcgacatctccagggttcactttcacttacaatcacagagggacaccctgcaggatgctatcagtaggggaaaggtcacacagacagaatgctaatcagcttcctcacttttcttagaagaaccctaggagagaattacaagcagaatctacatagaaacaattccaatgccccttgaacagaagagttgaaggagttcagtgcttaaatgtcaggtttaggagccacctttatgacatctctgagccaaactttttcctcgggaaacatgttcataaagtaaagcaatggaaaaaagatccatatacaaacacctgactcacgcttcacgtattaaaagttaatatgtaacagggagaaactctgtttgattctttaagatggtaacattttgtagaagagaatggactttggaatctaagtacccaggtaggaaccctgccattttctcactagatgtgacactgagcttgttactttactgtctcaggggcctacattctaatctgtaaaatggggatataacctaactcacactgttgttgaaaggttctatgaactaataaaagtaaattcaaataacaggtactcagcaaatcttctagtctggagggaatcctgtttattacaggagcctggtcaaggtggaagaggttttaaataaaaacaattataggttgaatatctgttatctgaaatgaatgctagttatcccttatctaaagaaagttaattccgcacaacctgaagcatgtacatgttccatgcagggggctggcacacctgttctgatgacatggccactgcatacaacattcacattatgacctcgagagaaaaaaaacgcactattttcttcttccagagtatgaaggaagcgctaggtaattattacatggcaatagcta

SEQ ID NO: 51253 - DNA, 6018 bp, Homo sapiens
atcaggctgcataaagtttgctccaaaggaaacttacaggtgattgcttgagggagcaaattaaactgaagctttttttttcccatggacacttgctaataagctagatggaaactgattgtgtttttacaagctattaccaaatgagtgcttagagcacccctgaagcagtctgaaacccactctgcaaaacccaaactaatgctcaaggtgactaatcaaaagtcacaccatgagtcagtatgagaagtcaaacttacacagatcacgtctacagacctaacttcaatatcgcctccacccaaaacgctagagagactggcatatcttgacttgaggagttctgcatctcacatatctaaggccatcttccagaaagcatcaatataagtagcacagtagttgctcttacgccagagcacgacacacgttgcttgctctgctagcgtatctccaaatttgagagttcttgcttcatcttcatgtgttccaaaaaaccaataataaatggcaataaagtttgtaagcaccatttctcaaagacaaataattctgctaacccactcagaggaatgagtcaaaactccaggtgtaccaggcgagtgaatgtaaacctttcgcagcaccatcccgggctacatgcaagtttagggctggaaggtatgccaaaggggaacataatgaaaatccagaagtgtccctgctaaagagatccctgcttgggagaaagagcaaacttgcttttctacgaaatgccacttttctgatcagacccaatcctgaggtcctgaccccttgtggtctttaaacataaaccaaagtgtgggtgtcatatttcttggcccgatcacaaagaggtcaaaaattagttaaatttagtaaaaattaaagttttaaagaaaccaacccctcccttcattgctgatctctagaaaatgcttccattccacagaaaacgtagaaacgtaatatttattttgggaataaaagggtaagaaagatattattcacttggattaagggtattttccaatatatataattcaaatttcctaagctgaaatctcagctttagcccttttagaaggatgaagaacagaatccttccacagaattctttgagactgctttagaagacactgaaaggttagacttcatctcgagttactccaccataaaccagacaaagaaattcctgaaaggctataagcatttttttcttacaagcacccacaggaataggtcaatgtaaatgtcgtataaacaaagcagttcattactaaccatagtttaaatgtcttttatgagaaaactgtaatccattgcaactgcacattcatacataactgcccctggatgagaggaaaatatggattcataattgatcttagtctccggcttttcttatgcctgaaaagcaaaaggtattgggggttggaaagctgaatctgagtgcttgatactttctccttcactctctatgatcaagtcttggaggactttaatttcccttccaatcactcctatagaggccctagtgtctgaaaaaatgcacagacgacaatcaaacctttcatttcaaggccagtttcccaccataccccttcctgttccaatcaggtttgcgaaacatttcccctattctgcatttcatgaatcaattgcaaaatctgccaacctctgccagttcctcttgtactcagctgagaggttccccttccttccctgggtagcacaaggctgctctggtttttaactggcgtaacgtggaaatgcactgtaggaactcactaactctttcacagccagatgtaagtgagagtctgggcggcaaccccacctactaggaaactggtccaccaagctcaggataaagcagatttgtggaatttagctttgactccaaatcccgtgtcagttactgtcacggggaaggaaaaaggaagagtgaaaaggtctacaaagtaaccaattcagttacttagcaactggacaaaacttgcctcactacagagggtaaggaggcatctcacacccattcaaagagtaacagtctacaatttacatgcaaatagataaagaaaaaagggaacgggaaatctaaattagcaactggagtttagacagtgagactgaggcccacatttaaaaaaaaaaaaaaagtttatcctaggaaagagacaggacatgtacagaaatgaatgaattaataaatgaatgaatgaatgaatgcatgcatgcatgcatgcatgcaaagccacaggcccaacaagtttacagtctcccttcataaaagtcaatgccacgggggagagaggaaagggccacacaaagttcgatacaatttaaacatttccacggctaacatgaattacaggcttacagaaaatgtgaagttgggaaaactcctgggaaagtaggtacccccgctcatgagaaaagcaaacaaaagcatcactcttggtggaaggtctctggactttgggtagatcacagcctctccgggtctctagataccctcagaaacaccctccagtacccatgcctgaaatgcagttactaaacttggatctaaccccgactcttaacaggagacacgccgccctgcaggtttcctaagcaagagggagatactgtcacctacttggctcgagaaggtgctccaggcttttcagtttgcccgaggagctccaactctctgtccccagcctctagctgcacacccgaaccggatttgctcagttccaggctcaaaggggaaagaggactgagggctcatccgccctcaccccatcccccaacttcacacctggaccaaggccggcagagcccaaggctgactcccaaagacacgccagcccagacacttacttctcatactcggtgttgtctctgtcacagcgagaatccttgtgcttttgccagtctttgccatgcttgcaggtggtgaggagcacaacgtcctccccgttatggacgtgatataaggcattcctggtgtctgatcctatccctgtcaggtacctcttccccttgaataccagcatgtacttcctgagaggagggatggtgttgaacttcaaaaaccccctctcccctcctgtcctgggatgatccttagaaaagaggggaatagaaacatcaaagttgggtcggaagttttcagtactgatgctggctttggccagcatcgcctggccgatgtcaaaccccacgtcctcggtgtagtcaggccaagtgccggaatataaattaaaaattaaatgattcctaccattgttccacaagtggagactctgcactttggatctcaaattgtgcacatactgaggtgacaactggtctctgtctaaagtatccagactcaggacaaagaggcacgcctggctggggtccgaggtgtagaacctggagccctcgatggccgctagaatgttttggtaactttcggcgattttctcccctttttgctgtgggtatacgtagactttgaagccgtttttcttgcaaagggtgaaatcgaagcaggactccatgcggcacttcttgcctttgtagatgctggagttggcatctcgcttctgccggggggaaatgtgcacgctggaatcctcgttttccaattgatcccaaggaacgaaggggcgcagagcgtccgggaagcggggccagaaatgatccggactggggtggtgcaagccattcctaccgctgtgttcttctctccggctgtggctcctcgatgccctaaactgcaagcctccgaaataaaacaaaagggcgagacaagagccagctgagagcaggatgaaatagcgttttttggcctgcatgtgtcctgcctgggtcaagaggattgtaaataaacacaagaatcacccaagtttcccaatcaacactttcagctccagtccgccatcttcccgcctgtaaagacttcaaactctccgctcccaccttctctggatgcctttccccaagccgtggactgatccagcgcatgtgggcgatttctttaactttctccccttcggtctttcatctttgggttgcacaatgcacgggagagagcggggctgaatatctcgcacccagggcgggcgagcagcggactgtaattttcttgcatgcaacaagacggaggaaaagaaagagagaggggagaaaaaaaaagctcccgatacccaatcaatggcaagacgaagtgattgccttgcctctcggattcctctcggcagcgtggaaaatgagccccgggaaggcaacttcaactcatccaccactctccgtgcagagcactccggttccaacaagtcagccgatcccgggttcagccggctagtgcatcttgcagctggggcgccgtaacctcacaaatccctgcatctctctttattcccttctgcagcggctccaagactccggcggtgtttactcctgcgctcgcggggccggcccccgggacgcgcggcggcccggctggaggcggcggcggcggcggcgctgggtggcggcggcggcgcgtcctccccgcgggcagtgccggccccgagcagcgcttcgcaggcccccgcgcgaacgctgccgaccgccgcgttcggtcgccgaatgttacccggttctgaatgttacacttacacattccattcccgacacgacagcgctgacctcatccatccacgcagcccgcgctgccattggccgagcgtcacgtccggggggggcggtgcttccgctgcgcccattcataacccccggccgcgggccgaggcgccggcgcggcgttgggggcgtagggggcgcagggagccggggctcccgggttgcaagctgccggcgggctgccgggcaggtggagcgcgggacggcccggtgcgagccccgcggcccctcggcgcgcccaggcccggatctcggcctgcgccgtgccggggaccagaggcgcctgcggaaacgcggcggccggggaaggaggcaccggcaggggccccgtgccgcgcggccccgggcgccctggagaatctggcctcctgggctgcctgccggaacgcctagagaaagatgctttgaaggagggaagcagggaggaaaggaagacttcatagaaagcgaccgccgatccgaaagctgcctctcccagccctccttccactctccgagacccagtatttcaattttctgctaagcattaaaacaatctccccttactcctcctctacatagcacatttttttaaaccaaagaaacaccccaatgcccaacaataaagaggaattattacaatcaagaggaattgttgcaattcttcatgcctgcctctgtgctaagagtgtaagacggctatcctaaatcctcattatctacttaggccgccttgcctgagccccctctgtctattatgaagaaagcttccaagagatccaatcacagagaaaaaataaattttctaatggctgcagggaaaccagttaatttaagcttgccccagtcctcaaagtgatgttattctcttggtggtggtggtggtggtggtggtgttaaagatatctcttaaggacatatgactggtagaattgccaactgtcccagctatagaaggaacacttgcatcaggaaaactaccttatgtacaattagtgccaaatagttggtccttccctcactgacctcccactccttggcccaagctcctgccactcccagtggaagaacttcattagataactcaggtaaccgaggagcagtcccgctaaagatcctccaggtccacaaagatgtgctaggctcccaaacagtatctctggtcaaagtcaaactccctggcctcagatcctgaacactgctttacagaaaacacctcccaccctctggcctagctaaagtctcagggctcgggcaagctagacagttgcctagggcagccggctgtttagtgattgtttattatgggagtgactgagagctaggagcagacacttcccggcttccctcaggctgcaaaaaccccagcggggtgtg

SEQ ID NO: 51254 - DNA, 1960 bp, Homo sapiens
tagtcctgggagtttttctaggatgcacagaggaaaaaaaaaaaaaaaaaaaaaaagaaagaaaaacccaacagttgtgggaaatgaatacaggtaatacttatgtaattaaacactcttggaagaccaacagaattaagactgctggtttaactactcacttaaggaagttataaaaatgtcaaccatctacctaggcttctgtgttctgacatgtgctttttagccatgtttgttagtgtctgtgaaggaatgaatcatttttttaatcagattctcccccatcctcccttctcatactctgtaaagagcactgctcttatgttcaattcacattgtgtaatttttcttcctctttctttcctagaacaaacaccaatttgcagtagttcatcaaaaaagtttgatgtggctgtctgcttcctgtgcctctcagtttggcacctccacactctgacgggtcttctccaacctgggattggcagtcttcaccttggtagatcatggagctctaaatctttgggaggtgaagaagtggaaataaatggacacctgggctgtggactctgcagactagcctcatatattagaaaaagtgtgtgtgtgtgtgtgtgtgtgcgtgtgtgtaaaatgctgattgttacttcttcatcattctgtttcctttgtaaatcccagaatggaggctcagaaataacagctctacagagaaagcctcaagtaagggaaaggaatcattgaataaagcctgcagcccagatcggcactctaattacacataagggatattggaggcacagtatagcttcttcccttagctcattttagcctccaaacaaccccatctgctaaggagggacagagagcaccccatactgaagagcagtggcccagagagactgggctatttctattagtctagcattcttgaattcaaaacattttcttcctttttatcagagcagtgtcaatctccacaaagttctaagaataactcaagtatataaaccacaacagatcgatattttcttttctcaggtgctttttactgttaatattaaattttgttacaagattgatcttttctaaaattttgtgcaaagctatttaatttagtgcctgatattaaataattacattaactgaaactacaatagtatgatttaatgatacaagagtttcagtggaattagtttccaaatatttgtgctggcttgacttttcagcagactggttccttctgtcccaatcatgactgtgacacacagtacaaagtcaagagcctggtattattcagctctctgcaatgtgagcttcttttactagttaaaccatggtcttctcagacatggccttgtaaggacaacatctttctattggtggaagaaaggtggtggtggagaaaccattcagagccccagagagccctaaaattgcctacgagcatgagtttaagcaaatagaaccccttttacccccagtgagggccaacacccaccaaagaggcctccctttctggtgatctgaggtgggaattgaataaaactaaaaaagacaagggtttcagcattcaaacatgaatttcctaccccactctacattcatctttaaggtttccatctgcaaccgaaggcctttttgatgtgaaaaagaactgggtcaggcacttcgaaacctctgcagcagctggtatgtgggaaaacataaccttggtcctctctcaaatgcactgtatggtatctggacataagcattgtcaaaagtagacatagagccagcaggcagttcccaacattaacacgctaaatgcactaaattgtggttgaaaaaaaatactggagattatatatatatatatatatatatatatatatatatatatatatatatatatatatagagagagagagagagagagagagagagagagagagagagtgagaaaagtagaactgattta

SEQ ID NO: 51255 - DNA, 952 bp, Homo sapiens
actctggcagaatggagaatgctgtctgaattcagttttcattgtggaaatggtggggtggtgataatgttggggaggaggagatacagtttcataagggcaggtggggagtctgctttgtggactgttgttgcccaagcacaatgcttggcacatagtagatgctcaacaaatgcttgctgaataaaggaaggaatgaaaggaagaagaagacctgctattagaactgaaccacatgagatgggcagtggagactggaatattgtgtccaagggtgttggcagctggagtttggcctcctaattatagatgtgaagagaattacggtctgcagagggcctggcagtcctggtgctgacctgccgaagggccagatcttggtggtgactgcaacttctctgagttccttgttggaagcccccttctctggctctgcagcctgccaggcttgtggtgagtcatcctgctgctgactcatttggaccttcctccctttccgtcaggtttccaaatctcaggcgtgggtggtttccaatgggctgtgtatttcctgagaccctgagcggaggcagacaatgcttatgtatctggagacaccctaaaacaccaagcttgcttgcgttggaagtcttccagaactggttacccatattttaaagcaaagcctctgatgcccgtcagtcccaggctgggacagtgggcacacagaacatactttgctgagctttccattcaaccaacttgatattttcaggaaaaaacatgctacagtgttatgtagcaagtcaatatgaacatgtctctaatgctcaaagacaagcaataattaagttgactggtttcccaggactgtgctttgtcgtaagacatagttaaaaaaaaaaaaattagtcacaggtataatcccagaaaggattaacaagggactagtaggttctaccctaagtaagga

SEQ ID NO: 51256 - DNA, 1216 bp, Homo sapiens
ggcactcaatataatggacacaagctttggatctgcattgggttagctgtgcaacttccgttaagttacttaacctctaagtttcagctatctgatttgtgaagtgggaataagaatatcttcttggcagggatgttgtaaagactgagaatgtgcatatatatatggcacatagtacatggtcattacatggaaattccttcctgacttccagcttccattctgcctctagtgactgccaggaaatgaagcaagcgagggacagcaaacttcaatccaaacatggatgtggaaatccatgcccttgtgcagaggaagccctgtaggtctttacattcattgttgactttctgactcactgttgcattctgttttaactccccctatcctgctcaggttgaactaatgtgggaaggttgacagtacaatgctgggaccttgtccactaggaaacatctcccagggctgctctgaggtcacagttccagggaaaaataccacaaaggcttgtgtcgtaggccaacttcgtaagaattacagctaccttctccttatgtgattagtatatgcttagcccagtgctgagcactttataaactttatcaaagtcagcccttgcaacattgtaagaggtagatataactattcccagtttaaagatgaggaaatagaggctaacatggctagtaaactgcagaagtgggatatgaactgggtttgttcctgagctcttaaccattgtttcctattgatcattcatcactctggaaatggaaacaacagaagaagagttcccagctctcatgtagaatagcactagcatgtgataaagaataggataacacaccatgtcatagctcgactagacagtaaagtccttgagggcagggacttgttttattctctttggtatctccattttttagtggaatgaaaggctctcagcaggagctcaatcactgggtcttggatgtacggtcacatgccacataatgacattttagtaaaaaatgaatcaatatacaatggtggtcccataagattatgatggagctgaaatattcttatcacctagtaacatcatcaccattgtaacattacagtactattattatatttttatatatttagtgtagtttaagtgtgcagtgtttataaagtgtacagcagtgttcaataatgtcttaggtcttcacattcactcaccactcactga

SEQ ID NO: 51257 - DNA, 1054 bp, Homo sapiens
ttattgagatctgtgctaataattactttgcaaaaatatcccttttaatcctgatagcaactctctgagctaggtatatgtgctcccattttacttaaaagaaaacttactttcagagagatctgtcatttgcctaaggttatacagggagtgagggacagtgctgggaggtcaacttagactcttcgactcccaagaccatggtgagccactctgtgatagtttattccactgttgacaaaagtaatgctggaaatggaagccggtgtagggcaccacctggccctgcaatgctgtttcgtagtctttcttagcacagcttttccctctcaagcccttttctgatattcatgcgaacaaaccttcatgagaagagacccatgatatatataaacgcccacctgcagctcagggagggaagcacccacaggatactttgagcctgcactttcagctctcttacttgatgataaacaaaacctaatgtgagtgaaaggcggaaatgtctagtgatcgagtgaccgcaccactccgatggcatacttgacacagatattctaatgattgctcggtttctattttcatacaggtccctcactggagcatcatactcagacatctaactgctttattgggtgtttcaaagggacctcaaacctcacatgtctcaaactgacctctctcatttccaggacaactctctgcttcatgcttcttcttcctcagcacaggtgcctccacatttgtggctgctcaggccaaccacctgcactcactcttaaagcgcccttctcctcccaaatgcaatccagtaccaagttctattgatcctatctgcaaacagatccacccccattcgctctggctatgacctcagttttaactgtcgcctgttcacttctacatttctgcaaaattggactatctgacctccttggtttcatttctgctctcatccaatccatctccacacagctgtcagtacaatcttttgaaaatgtaaatgggatctcatcactcccttgtttaaattgaaagggagaaataatcaaag

SEQ ID NO: 51258 - DNA, 1035 bp, Homo sapiens
tggaaattctgtgaagaaacaataacaaattctccctgactcctgtctgtcctaatagtaaggtggtctttcttctaatctccccatccatccacccatcaggaagcaatagggtaccttgtgtgagtaactgtagatttctgacttcttctcgcaccttcagctggagcacctgttgtaagatgtgctgccggaggttctcctgggcaatccccattcgctcgagctttttgtcagtaagtctcagcagggctcgccctgcagggttttaagaaataaaaggaaaagcaaatgaactacttgctgaagaaagatgtccattttggtcttgactaaccctgccatcacagaagtttctacctaaacacagacattttagaataaaggtcttccattattattgctgacacaaatggattatctgggtgaaaaaaatacacatatttaaaagagaaccctaacttttaattgaacattgggaaaccccactgactcacacattcagttagaatgtgtgactcatacattcagttagataaaataggaaaaccttaacctggatatttgggtcacaaattgcaggttgccatagaaacaatgctcttcactgggggctggattctcaggctggcccacaggagcccaagtcactgacaactcacttacaacccagctgaagaactggatgctctaacagtggtatatacagaaactctagcaatgtgtaacacaggatataataacatttctgagaaatatgcatttaaagtccagttttaatctgcaggcaactgacactcctgctgtacccctggcactgggctggaggttccatctctagctgttgggagctatgccttaatcccaattactggcctaatgcaagggttctagcagggctgagagggagaagagtggggtaaaagggcatccaaagagttcaaaaacaaggcacctagaggtgtgagtgcctgcagtgtgcagacaccctgggctatggtcagctggcatggcctctcttcaacctttctttcc

SEQ ID NO: 51259 - DNA, 3117 bp, Homo sapiens
tctatggctggtggactaatgggcccctaaagatgtccatgttctcatctctggaacctgttaatttcttaccttacatgacaaaagggactttgcaaatgtgattaaggtaaggaggatcttgagatgggagagtatctttcattatccaggtgagtccaatctaatcacaagcgtccttagaagtgaaagaggaagaagggagagccagagagacatgtgacaatggatgcagaggtcaaagtgaagcggccaagagccaaggaattcaggcagcctctaaaagctggaaaaggcaaggaaatgaattatctcccacaccccatagaaagcagctccactaagaagctgaatttagccctgtgagacccatttttggacttctgaccccgataagtgtaagacaataaatttgtgttgtttaaagccatgggagtttgtgataatctgttatagcagcagttggccctgtgactggaatttacatgttttcaagaagtcaaacagatggctttagatttcctttcctttccccatttctggctgctggcacacacaaaggtaaaaagtagaggaatgctaaggagaggtgagcctgagtgcctggcttgcaggatagccctgcagtccaatgctctgctcactgtcagaccttagtccagaagtttcactcagaaaacaaagaatacagcttaaatatcatttatatggataattggcctccaaataacagacatctacatctttatacatgtcataaacttataaatactgcataaaacactccctgaagctccgatgatcttaatccctcccaacataaaaatgtagatcaccctccctcctttctgttcccaattatttgggctgtggtttcacaagctgtggcatttcctagcaagagctgctgaggcactgataagacacatggctgcttttgtcttaagctggctgggccatcgttagaacacagtgttaaggcatcagagcgagggttttgttccagtgcatgcagctcaactttgctttgtttgatgccttcctgtaaacctgtagccccagcctttccaaaaatgcatctgattggtcaaagtatggatacatagccctactagaatgttatttctactttggtgggttaatagcattgggtttaaatatatgagtcagaaaattctgtcagttataaaagtttattcattttccgactgtgtgatacaatcatgcttatgaacagttcacatattaaatgtccaactgttcaaattatttaatccaaatcctgagaatataattatttctactctgttggaagagaaattgagaagttaaagaatatttaaaacatgagagctggttctaatttttcccactctatattcagttgcgctttatcttccttggtaggaaaataaaagggttagttttcaagaaagattaaggataaaatttattttaaaatttcctgataaaatcacttctagaaaagatcatgatctgtataccaaaaattttattaacaaaatccgattcacggtcttctttggatggtttctacagattgatggttctggaaaatttttgtaataattaaattatttctaggagtaaatgtcccattaatctcctattccaccacctcctgctgaatacaaaatgaacgaacatccaaataagtgtggtactgttttgatgaggtatcaaggaagtgataagcaatcatcaaattattttataatttatgttaatttttgttgtttatcataaaattcaattgttagttcaacaaacaattatagagcactcactaggcctctgttattttgacactccccctgggtacagtgatgaacacagcagacagggtcacttttgaagccttcaggctgacaaggaaggtagctcatggcaaatgtctacgagtatgtgatgaatgctaagaaaggcaaatataggagctcagaacagggtgatctaacctagtctgggcaccaggaagctgttaatgagtaatgaacatgtaacctaggacttaaggaggaagcaagagttagacaaaacctgatagagcaaatatttttttaaagttgccacatgaatgaaaaggggggctgccatcgtagacagacaacaggagcaccgtcccagcgtgaacattccctgcttctgctcacaggagtctcttggccaccttgctctgcggtcctctgccaatacagagaaggaccaaggagtgaaaaatcaactcaatctcaaacaagaagcaccaactgaattgcctgataccatcaaacttgttataacagtaattaggtgacctgggctgctgggcccttcaccaactcacagactcttgaggttagaagaagcttaaagtttttcacactgctcttactccctgccttttactcttttccattattaattatttattgatcaccattatgtacctgccactatttggggtgctgtgatatggagataagtagtgtcttctgcctgcatggagctcaccattcagtgtgggagaaaggtgacacacaagtaaaccgacaactagatctagatctagagacagacatatgatcccagatagtcataagtgctctgaagaaaaagcagaatgaaggggcagacagggacgcctattaaaaagatgagggctattgtagttggggtggttaggataggaaaggcctctctgaaggggtgaggctggaaccagaaaggagaatgagggaatagaagtgtcaacgcaattagaggaatgacagggagattagtgtcactagggcagagcaggtgagataagagaatggtcagaaattaggtctcagagaagacagggtcagatcacacagggcctcagaagccctagagaggactttggattttactcttctgaatatggaaagttttgagcaaggataacttgggcatgatatcaggtattaaaagaatccctctggtcactatgtggagaatggatttgaggcagaggtatatgtaggagcaaggaggagtccgcggactatcacagtcatctaagcaggaggtaatggtgtctttgtactggggtggcagggaagaagtaataagaaatagtaaaactctggc

SEQ ID NO: 51260 - DNA, 1092 bp, Homo sapiens
agaagttcagcatctgttccattgggctaacatcaacgtgtcggaagggccacactccttctggaagctgtaggacacgaaacattctctgatacgtctgtttctgccagctgccagtacccccttgcatgtggccacaaatctctgcctccattctcctatcaccttctcctcttgcgcgtgtataatctcactctgcctttgtcttacaaaggcacttgggattggatttggggcccatctgaacaacctgagataatcttcccttgtgaagatcctcaacttaatacatctgcaaagaccctttgtccttgtaacattttcaggtttcagggattaggacctgatgctgttgggtggatattattcagcctatcacagctgaaaggaacatttgagtttctgactacggcacagggttcattgtgctcctcatggagaagtgaggcacagagaaagtgtcctgcctaaaacagcacagaagatgaggtagagacttaggtctagaccatgtctccgactttcaagcccagcctggtctctggtctctattccaggtgcccttcatcttttgctcagagaattgcaacagacagcctggcacaacttttcaagataaatgactgcatgtcataaggcatgattggaaatgacaggggaagctggaggtgagccaagagtggcctcagaccctgtcctattgggaaatcttagtgccactgcatgtggttggggggtgccacttttcccagaataggatgaattacaacgcctcttttctgccagaaatagatcattggacagttccccaaataaatggccctttgtgcactgggttagctccaaaactgctctcaggtaaaggcctgggtcatgcaccaagcaaatgcctgttgctccatcccagtctggctggtccagagcagcaggcatggggcatacaaccagtgtcccctagcccaaacttatgtttctccaatcatgccattactccaaaattggaattttgggaacaaagaaacagagaggcaaaatcacaaaagcatgggatcacagctaacaggtgtagataaatgtctaggaaagcacaat

SEQ ID NO: 51261 - DNA, 725 bp, Homo sapiens
aatttaacttttaaccttccttcttccatgtccctccaactttcagtgcaaaggaattcaggcagccttgtttgcagggtttcggctgactttaggagtggactccaccaagttctgtgattccattctgtgtagcctattctaaatcaatagccaaccaagaccaagtctgagctagcccttcatttttcataacctagagatgcattgcaaatccagcttaagtgacccccagcccaacctctgatttcctgaaggtgactacgaatcacccaataccagagctagcaaggacttaaaggtcagccaacccattgcctcatttcctggcaagaatacacacaaaaccttccaagaccaataagtctcctctcacttctacctgagagcgctgcccaccgtcaagtccggtcactcacttggttacatttagatgattagcagttaattgaaggccccttctctgggccaaggaagagaagggttaatggaaatttgcactgcagttactgtaatttaccatactgatgggaactctatattgatttttttttacctgtcttgggtaaaaatactattttagacaatctattattttggctgaatatattcaggttaataggagaaaattggaataacattaattcccacctgaaatataaattcagaaagaaatatattacagtgcttttcaaacagaaaatgtgaccctgcattgtttttag

SEQ ID NO: 51262 - DNA, 778 bp, Homo sapiens
tagacattttttaaaaagcattttcctacttagaaaccttttctacttggaagatctacatagtgatcctgtagccaagttcatgtgaaagacttccttctttcctttctctatgattggcatgctcttattttctctaggatcccccaaccctgcaccctgattcccatatacttttacaatggatgctaaaatccacagttttctataataaccatgtatgtttgttaaatagcatggctcacatggatctggaatttatcacccctttggaagtaaacccatgccagaaaatttcagcaggaagatgttgtttcatggtaagggtatgggaaaggctatcgtgactgggagaaagaaaaggagtgaaatatctgggatactgcatactttaccagttatgtcatgctgtttgaatgactcactgtagatctgatactgattcggacaatgtttcttcaaccacttgcagacatcctgctgggtccatagagccaccggtttagatagcttcaccgtagctgactataaataaagaaggaagatctgtcaatgctggccccatgcctaggaagacactatagttaaaagtcttagagtgtgttaaaggctacagactggattccctgaagataaatatctagttcttgtctttctcctaacctctgtagaccttctcaatactgctgaaaagcacaaagaaaggtccaggtggagaagctgtgaaaatgatctaaccatctctgctaagaaaaaatcccaaggaatccctaggaag

SEQ ID NO: 51263 - DNA, 1056 bp, Homo sapiens
ctttcaactaccctgctattattgccattggctcagaaatgcctctagtaaataacccaatgcaaagagagagccagtgaggcacacggttcttcagagagctctgttgatatgaagcaatgttctatttttaatatgaaagttttcagtgagctgggagttgatcttataacctgattgtccctttcactcttttctctccttgactcaagcacctggcagaatgctgggcacacagctgttcgaatgagttcaattgaaatgtggcttccttgtggcaacatactagatttttcacctctgttacaacttgatcactgacctttttatgaacactatgccctgctagaggaatatgcacaacttttggtagtttatccatgggtgtattaattcttgtcactgtgcagagaagggaggtacaaaaagcaattgccaagctaaggagatatagcacggtagcttattttgctgatgactaacgagatgcaaaggcaaagttttaatccaaaagtattaagttgcagtgagaggctgctgcttcatcatatcatataggattctgctggattttactcctttcccatcacattcatctcctttctctgccttggtccgcactattctttctgcctggaaggcagcccagcacatttctgcctgtccactagcaggtcaaggttcagtcttccgcccttcctccacacagcagccagaagtccccttgtcatctctcaccttttaaaactacccatgccattcagatgccccttagcctttactaccttgttgtgtactttttttgtggacctatcttatccatggaagaggacaaaatgctgcagagtggctaccatagctctatgctgcaggattttcagcagaactgtgaggtaagtgttatttcatccatttcataaatggagttcttggagagtctatttgcctagcctgtcacatgattggttcagtttcctttgcagagttaggcaaaaacaatgaaaatttaagcacacctatctttaaccttcctatctagggatctagcccacaagt

SEQ ID NO: 51264 - DNA, 1543 bp, Homo sapiens
aagttatgcccatgtcttaatccctgtagcctgcaagtgtgcctttacttagaaaaagtgtctttgctgatacaatgaagtcaaagaccttcagatgatgagaccatcccggattgtcctggtgggccccaaatccaatgacaagtgtctctatgggagaaagacatagagaggtttgagacagactaaggaagagaaaacacaaacatatagaagagaagacaaagtgaagacagagcagagacacatggccataagccaaggaaggccaacagctgctggaactagaagaggcaagggacagattctcccctagagcctccagagacagcatagccctagaaggtccagccacaagcacagcaggcctggctgttaatcattctcttacagctggtgtgactgggggatgtggctttgacttgctatttctaaaagttttaggatgatctggccagacattgactttggacttctggcctccagaactgtgaggtaattcatttctgttgctttaagctacccaatttgtgataacttgataaggtaggcacagaaaacttatacaaaggcatacatgtgcttcctctttctgtttctggttccaacttcttctgtatctggcactagttggaataagatggcatcacgatggaatctgagattgggttttcgtaagcaagagcacaggctcagtaagtctcagggctgactttgttctgctgttattcagacttaactcacattgggaattggtgctgctggcttctttagtatctattgtctcctttcttatgggcagagctctttttttttttttttttcagggcagtatcatggaaactacacatcccaggctcctttgcaactagccatatgattaagttctggtctgagagactgaagtgaagttgttaggttggcttctatgaaaaccgtttggaaagcaggcagactcttctgaaagtcacctttggctcttgggtctcacccctctcttctgacttgacatgcaaatatgatgagtcgaactgaaaccatgggaatgtaaaagccacatgctaaggaaggcagaggagaaagacagaaggagcctgtgacactgaagatactgtacatttgtgagtcagtcacgcattacatactctgggcttcatatctcgtaagacgtttaagccactgtttaattgggttttctgtaactatacccgatgtaattctaatatgtccaccagcttagaaaagcagaatgctttttgtgaattcacttaattactagaactctccacatcaggatttgtggggaagccacaaccaaaagtgatgcattactatgcctcccattttctagttgctaaaatatcttcctcaggccccagaacagaatttggatattccttggtgccctggacataatatcatccattatcatcccagtctgattatcatccctacaatgaaccttttagtaaaagttagctctcttgcttattgctctagtctctaacagaacttagtacccatacctgcagtcacattcatt

SEQ ID NO: 51265 - DNA, 1028 bp, Homo sapiens
ctagtaagtaaaacatctcatgaattctaatttgggtaaaactatgagccattttgaaggagcccattcccttctgacagtctctgtcttgcaagtattggtgctaattcccaattttccacggggagaagggaaactgggatagattgatcttcctactatgtcaacagtgtttatgagaactagaaaaagttacacaaccttttagtctgagtttatcaaaccataaatggattaaaaaaagtacctagtaaatgacttgaggcatgaagagtcatgtgtatttgataccatgaccagcgttggctgacaggcactagagtcacattccactgttagttttctaggctgacactatttacaaaataatcagccacagccaatttagaacatgttagcttttaacttagcctcaaacataatggcttctcatactagatgattacattggtgtggtggaaagtgtgactggctgggtgatggagaagtccacagctgatcaggaaccttcaaccactggatcactggcacatactgtctgccatcatgaagctgtctggcagtagtactgtcactcatgggagggtatggtggtcataaataaacaggttatgcacccttccaaattagtagagtgaaaatctattttccatggcttagagaccaaactttggaacataagacattctgtgtcttacataatcagtctagctacaaccaacttcatttttcccggtcttggcttatgtcactgcattccatgaattctacaacgcagtcacactgagcacctcattgataccttgtgccttcccatctttccagttctgcttgtacaatttcctccacctagaaagtctccccgacttgtttaaatattactcattttattcaaagctcaggtgaaatgacacagcctcctctgcgttagagtgatctctccctcctctgaactttaccatgtattaaattataatcacctgtatatatgtcccatattaattactagattagaaactccttgtaag

SEQ ID NO: 51266 - DNA, 881 bp, Homo sapiens
ccacaccactatacctgactaatcttctgtattttagtagagatggggtttcactgtgttgcccaggctggtctcgaactcctgagcttaggcaatccacccgcctcggcctcccaaagtgctgggattacaggcgtgagccaccgtgcccagctgatagttttctatttcagacaaatctattgattttctaacaggatttgtgcagaggtgctatttctacaagttccatattccaaaacagttctaagaaaatggagaatcttccttttttggctgactcttattctccttctaggggtaagtagccctccctacaaataatcagtggggaagaaatcattttcatttctgagttcctagctcaaagggggtataagatatcctagtcaccagggagaatagagtagttaaaaagcaaaggataagattctttgaactgcgcctgaataaagataaactgaaaccattttgggtacagacagattacatcagtgctctggggtcaggttcaaaggtcaatcacagttgtagcacttacctgcttaaccgggaaaattattttactgctctatacctcaatttcctcatttataaaatggggatagtaaaagtaccatctcccatacagctggagattggtttaaaggttacgatacaatagttctaacaatagttcttggtacataagtgactgagaaatgcttaaaacaacaatggaagggaagtatatcacatccatgagggcaacctgtcagaatcccagataatgtatcatccaagtgctgacagaacatgggattattagaaaaaccacaacggcccatgcagtctgctggtgctgcccatcaggaggatgtgaactgtcatataaaagatca

SEQ ID NO: 51267 - DNA, 694 bp, Homo sapiens
caacagatctgctttcagggcagatggcaatggagcaataaattagccctataaaatactttaaatttaaatgtttaatctctgttaattacaatgagacatttctagaagatttttttaatagcaggcaaaccacaattacaatgttgaactcactggaaagccccgctgcacctctctaaccccgcattcctccatttaggcacttcaacttgttacatttgggaatagctttattattcaaggtgatgatgtcagcctccacagatctgcaatatggggtgggacagaaggaatgcattacacagactcattgggaactgagcccagcaaacacttggtgcctggaagagaacagaaggccacatcagtttgctttacagtaggctcctagcaaacacaaaaccaaattcaggcatttaattaaggatacaaagatttccctcatccaagatcactgaaaaccatttttcttttctttcttaaaagaaggacaaaagccatactgaaaaagaatgtttacagaatattcagacttttgcttgagactcattcaggagtaaagaaatagaagctccaagttaggtaacagataaacgcagagatggcaaatattacagaatctaacctgtgaatactgaaagattagtgcgagcttgccactcgtgaccagggaaaaagttttacaacagca

SEQ ID NO: 51268 - DNA, 1098 bp, Homo sapiens
agccccggggccacccagcctgctccggagggagggggcagggaaaaagggcatctcggggccaaaacctcatgccggatcctccggctttccccccatttccaggatatcgtttcgcatcagggacactcgtctccacacctcctacctcaaagtcctacgcacctacccttcacgtctctccaaagcaactgaattaaagcgcctactggccttggcggcgcaggtgagtgccaagaggtggaggaggaaggggcccgctctccgccaccccctttcctcgcctccccacgatcgccaagcttcatcggggatgtgtgccttggggtgcgcgggttaagagggagcttaaaaatgccccaagcgtcccttaccttccacagccattctctcagagcttccctaacgcatgcataattttcttggccgaggtactcctcctgccccgcgctccccccttcctctcgctttcgcctaaatattctgcgcttatctgctccaggaccaacctgccgcggtcacgcaaagcgaggcagccggctcccggctcggcgcgcgcagggcgtcctgggaagtgtagttccctcccttcgctcggactggggagagcaccccgactcctccgcggagtgccgcctggccccgacacttggagagcaactccagcttcagctggccaggccgagcaatctctcctggggaagttgtgaggggaccagggatgcctggttgtggcggggcggggggggagggggggggggttcccgggaagcggtctggactacatctcccaggaggccgtgcgctgagataggttcgctgctaagagtagggacccgtgattgagcccttccctgtccattacaaggggtttggcacctagcaggtgtggtgaggtgggcaggtgacggtcagctgtgtgatgagctcctgcgagctcgtccgtgggcctctgccgccggtaccgccccgccccctggcctcctgaaccaccatttagtagggagagcaggaccactgtcctcctgtgtggttctccacctgggccagagaacgctgcccagggtgaggttgaaacttgttccttcgcaccctgag

SEQ ID NO: 51269 - DNA, 1203 bp, Homo sapiens
gactcagacctttgactttaattccagtgtcccctttcactacttcgtactgtttcctttggacagaaattaaatcctggtagataaaggggaagacgtaaggaagacaagacaagggactgaggaaatgttggggaagatgagaacacctcagaaaccacaattgaagaattcctaggacccccaggtaaagctgtttgggtgtgatacatccttgggcatattgttgactgatttttaggcttgagggaagatactctttgttttaaacaaggtggatggaaatgaaggtggagagaaacaccgtgagaaagattttaatgcaaagccaatccaagcaccatctcttagagccttatttcttttcagcagctctctggattgttctaagaagtgatgggtaattttataaaagtcttaagctgttgttaagagatctttttaaagctgaaggcaaaacaaacaaacatgatgtcctacaaagctgagaataagctccagagagagggaaggcagcagaaatagttactgggatggggaaagagatcgcaatgtaccttgtctcaagccctatgaacgctgtcgcctcaccctcctgcaaagtcccgtgggcagcccgagcttggctgagaggggaggcaacagagacgccaggatgggagagctcggagctatttcggactccaggccaacatccacggagaccttgagttacgtcatcggaactgtctggactttggtccccttatgccaaatgcggtttccagaaaaaggatccgcagcgtatttggaagctcatcaactaaaagttgtctcgtcactttcatgcgtgagatcttttcatttgtgaagagcatattattttgcttaattatgggctgcgaggaggtggcatagagcagtggaaaaagcctgggctctggagtcagagagacctagtctgaatcatggctctgccatccaccagctacgggacactggcctggtgggcctgtttccttgtccataaactgagaataatcttgcaataattaactatcttggagggaggttgttaggataagacgataaatgcatgtcaagaatcttgttctgctgttcagatatttaatcatcagtcgctgttattaataaagtatctgacttttcagtaacatttagcatatgagatttctcgttcactctaacagtatggctatagtg

SEQ ID NO: 51270 - DNA, 1375 bp, Homo sapiens
gaatctaagggaccacttctttgccactaataataaaagttcaagttcattaagcaaagatagtatggactacatgagggcgttaatattctgagatgaagacagaaggttaatgactaaaactttcaaacaagtttctctctctctctctctctccctctctctcgctgtctgtctctctcttgctgtcttccataaagtcagcaggaactttgcagcgtaaaaggacaccctaggggaagcatggcataacttgaaagcggtttcctgctccagcctaaccccaagcctctcctgggagggagcgagtggagccttctccccgccggtccgctgggaggttgggagaccaggtggcagcagcctccccaggcgccgggcacccgtcggctggcccagggacttaccacgagcgcgcagcacagcaagttgttcattgtggtccccggaaacctcaggggcttggaggcggcggctgggcgagcgctccggtgcgtctccgcagcccgtgcgctcatcacgttatatatagcgtcccggcaacaggaagtatcgcctgcctttgatcagtcatttttctatcctggaccaaactttgcacctttcttttttaggaagcttgggcgggagcggtcggggggtgtgcagaaagctccagggttaacgctttcagggctggggcggaaaggatcccccagggaggtggggcgtgaggggtggggcggtggtgtctggcccctgggagagcaggggaaaaaaaagccaccgggctgaggaacaaggcggctgctgtctccgcggggctctgaggtttcccggccccttcccgccagcggccagcctcctggcagccgggaccagcggtgggagggctgggcacacgctgggcagctgctgtgcttgtgtctcctccaccctgagagtccgatccagccaagatccggacgcagttggagtgtgtcccagacctttgtcctctcgctgggcgaaagctgtgagtttccgccgtacccggctgcctgaccccttcacttcgggttctgaaacctcaaattacagggcccctctttatgcatggcattgtctgagcccttttcggggagttcgcaatcattcatcttcaagtttacataaaccatgtagtaggaatttttctaactaatgtctgattggccctaaagcccgtgctattctgcattcactccttgttatctggggtagttagagccagagagaatctgcagagtgaaaattggactgcctggggcagggataaccttgcggagcactgttcccttcaccaaccccaccatcatcaaagggctattggtatcggagcttcctacgcgctgaacttctggagtagcctcctcga

SEQ ID NO: 51271 - DNA, 608 bp, Homo sapiens
aagaccttaagatttcaatgggaattttggttttggatattttttaatgccctactctgttcctaagaaatgaaaagaggctaaatcactttcaaagaagtattttgcaagttggcatgtcagctagtgggcctacagctgagctcatgttctccaaggcctacttgtctaaatgagtcagggaaaccaatcacccccctgttgttttgcatgacctaaaagccaacactcccacagggcagtggtggatgtaatttctggcacccatacaaaaatgttgtgaaacatttgcagtctctttagaatcttgtaaggtaaacagcataccacggtctgctggggcagcacgttgaagtccaactgagaagaataactgactgtggtagaggtttactagtatgatgaggaaagtccaaggcgagtaccaacctatgcattctatagactattcctgtgtattccagggaggaatagtgttctcctctgaaactattgccagttagtgtttaaaggaagttttgttgagtgcacagataaacgtctagtgtattcatcaccaaggctttaatgaaaacattccctttacctgaaaggtcatttatccaaca

SEQ ID NO: 51272 - DNA, 824 bp, Homo sapiens
cattctttccttcagttcttgatttagtctgttgacttcaaataatttacagtattcccttctttatccacgggggatacattccaattggatacttgaaaccgtggatagtattgaaccctatatatactatgtttttttctatacatacatagctatgataaaatttaatttataaattaggcacagtaagagcttaacagcaactaataataaaatggaacaattaaaacaacatgtcagcatcactattcttgtactttggagccatgatttagtacaataagcgttacttggacacaagctctgcaatattacaacagtatctctcatctccaagatgactactaagtgactaacgaccaggtagctagtcagaatggataggctggacaaaggagggattcatgtcccaggcagaatagagtaggatgatatgagatttcatcatgctactcagatggcacccaatttaaaaacctatgaattgcttatttctggaattttccatttaatattttcagactactgttgaactgaaaccattgaaagtgaaactgcagataagaggagactactgtattttaggaatgcaacttgtaaatgtcattatttgccaggggaattcttcagattgcaataatcagattgcaaacaggtcatataaagacgtttgtattttaaaagataagtgatgatgatattcatttaggaagcatgtaagagataaagagtcacttagcagagatgccgtggggctgggattggttagaagaacggaacacaaaaccaattttgagttgagctcggcggtacaatactaa

SEQ ID NO: 51273 - DNA, 1474 bp, Homo sapiens
ctaagtaaaaacagtatacctgctttgcgaacacagctttaaaatgattcttctctctctccttacttgctgtcacacacgtgtacacacctcccaccagtgttccatctccttctagcagaaaccccatcaatgaaaagaaggtcaagagatcacaaacagaaactgacaaggatttttcaaaacagtaagttattttatttcaaaatcaaaaatatggcacaatattgatcccaacaggaatttttagctggaagctgtttctaaaagatgcctacaatttcaatagaccacatctcccaggtgattgcctaacccctgggttagtgtgagcccttctctcctgcttctcacttccctttcaaagtgcgtgagtcacacccttttacctgttgtcttcattccctgccccagctgatagtgaataaggaagacagttgttgaaacggagaaaggaaagtactatttatggagcacctgttacaaggcatgttaggtattttcagataactttgctacattcattgtgatccttagggaaaccctgcaaggtaggtaaaaatccctattctgcatgtgagagaaattgagcttcatggtgattcatttcttttttctctgtgccaggcactagggcatgggctagaagctgagccatagaaacctgctttgggtcacagagcatgatgggggagggaattgaggtcagattcttcggctcatgcctttaccactacatcataaacagggctgggtctctgttatcaaggtctttcattgttggcacccgtgttcacacagcttgccgagtttctagttcgctggctggctctgcctttccctcccagtggcattctcagtttatggctgcctgccctctccacttgggagtcctcatgttactttgcgcttgggtgtctgtagcctcctgattcctgcctacccacctggatacacttcttctttggtttggggccagctgagaactgctcacctggctgtagtgtctaagctccattttgtcccctaaaccgcctatttgccaaatatagccctggcaggactcagtctcttcccagttccgaagcacctgtcacactctccaatccaaagcctgccagtcatttttatcatatcctttaccgagagaaatctttagaagctgctctgttttccttatctctaccatttagtatttttttaaatattgacttatttttccaaattaagtcataaagagatgcatgatgaagtactcatgctctctgtttttattaaagacttaggatcaaattagatctacttttttttttttaacaaattgaatacagacagtaaaaaatacatttgtgggtaaatttggtttaagcatattgtcagaaaattacaagactatgagattcctgaatgggcatttagcctaccttttacctccaggcaggaacatggctaacgtttactaaaggagagagag

SEQ ID NO: 51274 - DNA, 665 bp, Homo sapiens
ttgaggatatgggagtggtaagaagaaaggatatcctgcaaaagagaggagaatgtgtaaaggttggaggcaggaggtattgaagatgtaggtggatcaacaaggctggtgaggtgggagggctcatcagaagccacttgccagaaataccttgaatgcactccagggcatctgtaattgatcctgagaaaagtaaggaattggaggcgttttaagtagaggggtgactgataaattttctgttgagagatcattcagatagcagtgcagagaatataagagagggaaattcactgtcagaagcatattccttctgagaagagcattcactgtgagagggatagtgagtcagaacagtggaatggaaagtgcatatattctagaaaataaaatggtagaactgccagaacctggtgactgattaaatatgtgtcatgagaaggaggtaccaagggaaacacccaggtgtttgtcttggataactggattgatggcagtgtgaaacaagtattactggctagatgtcctaaaacttcttgtaagctaaaagaaactatggaagggtggaacagtctagatttgttttcattcgctgaacataagcctacttgtgacaggcacaaggacaggtaaaacaaaagaagctatgggataagaactgagag

SEQ ID NO: 51275 - DNA, 1978 bp, Homo sapiens
gcgatcaggggtatgggggtgcgcatggagacgcccgcggagcgctggcgctggccagcggagcaggaggtgaggtcggcggagctgggaggaccgcgcctggcggctgcaatagccgcacctgtgcacgtgatcgcgagcggctcgggcgccagggcggagcggcgctcacctgggcccacgtgacggggcggggctcgaggagccccacggccacgcctcctcccgcgcggcgcgcccggagcccgcggagctgagcggcggcggcggcggcggcaggagcccgggaggcggaggcgggaggcggcggcggcgcgcggagacgcagcagcggcagcggcagcatgtcggccggcggagcgtcagtcccgccgcccccgaaccccgccgtgtccttcccgccgccccggggtcaccctgcccgccggccccgacatcctgcggacctactcgggcgccttcgtctgcctggagattgtaagtggggccgccggagcgagggtcgcgcggggagcgaggacaggcggcggcatccttgtcccccgggctgtcttcctctgcgtccgcccccggcctccttcccttcgacgtggctttgtcctgcgctccctcccggggtcctctcggtgccccgcgccgccgcccgggccctccctcctagcacctgttacgcgggcacctgctcccccgcgggcgacggaaattgcctggggagggcgagtaggcggcccggcagggccgaacattggggacgtggaggaaagaaaggtgttggggctcagaggcgcctttagaaacccagggcatggccaggggccgcgcttggccggagcgagctcctggctctcggcctcgcctgttgctaacctgccattttgttgggtggtgcaaaggtgtagccgatgactgggtgacctggtggctgccacgctgtggaaagtgggggcgggaggcaacaggaagaggaagagggctgaggacttgaacatgctttttccccactcacccttgccatcattagtggcctttggattggaaagaggagctgggcaggaggcagggcaaggagaaaggtgagttatgtgccatgccctgggcagtttctaatccagtgggtgtgacaatggtgggggaaagatggaaacgtggctctcgagttcttctctgcctgcctttgcaccttctcacttcctggcctccttacgcaactccaaacctttttagcacactttgttgggcccaagtaaaggtggggttacctgcctgtcgtgcagcctttttaggtagcacttgaactttttaaatggaattttatggagttggaaactttcgaagctccttgtggacaagtagataatgtgcaaatataaattgggcaacctgaggttgcatcatgcctgagaatggcaaataaaaagtgaaatgttagcgagttagtgcctttccggcaggctggtattgtttgctcggtttaggattttcatctctcccctcaccctggcctttgagcttgcataacctttatttgggtcgctttggtttcacttttgtgcttgtggagctggatcaccttgtgagcactgttctattatgctcaggtagccacaccaccctaagttaagtttagcccggatttgaatctgaaagaggagacgtgagtgagttgcaggctatgacatcagtaatgggatcctgactgcgaggctggtttgagtttgagcctggttcagaagcatctgagtgcttgggatgaggtgcaggcatccatgtgggaagagcggagagacgatggcattgggctggctgccttgctgtgggagggagacacgtttagaactggaagatctgcaaagaacgatttcttaggttctcggctactttattccatgttctgcaagctccagttttttgcctacctctttgagaagtttttgccatatccgcattccacctgtactagaatttacagacagttcat

SEQ ID NO: 51276 - DNA, 576 bp, Homo sapiens
atagtgtagattcatgactttaacacttgcttataaaagaaataaaggttttatttaatcaattcttacctaaaaccccaataaatctagaagataaaagtgtaagtgctctagttgaagtggaggaagagggccttgaatgatgctcattctcttttcataaagctgcctctacccacccatatcatccctgaggatgatagaatccttgtgatccacattagaaaacccttggttttaacagctttacaaagcaaagttcagggactttcctatgctattagtcatcaattcccattgtatttgcctttatgtgtttcttacttccagtcccttcattttaacggtgcaggctagattcttgtatcttggatcattgaagtagccccaaatctattgacagtcaccctagaacctactttcacaagaatagtagctgctgaaatacgtgatggttgtctgaggtctttaatttgtcacctttgtcctaagggcctagttttccgtgttctccataatgtagttctgttctggctgcttctcttttgtgactttgtccctgttgtccttcccttt

SEQ ID NO: 51277 - DNA, 672 bp, Homo sapiens
agacatatgagaaaaagatgtcaaactaaatcacagttatggcttatattttcttagaaaatttattccacccatctcaccgtctcattaacctgaatgcccattgtatttacccaacagaattataagtagcttttctcatttcatatctcctaataaatctataaatcttttatgacctggtataaaaaatcctgttcagccattatttcctacgctaacaataaatccaggtaacaagtgtgttagttaattaattatgacagtctgtttgcactgccacaaccttgaaactaacaccccagtccatagtacagcagcgagggcatccatgtgtacagaacattctcagctattgttgaggactctgagaagctatggttactaaacaactgcatgcttttgaatggtggatctcactctgatcaatccgaagctagccatatatcaataccctttgtgttccttctatttgttgcacccttggagcactgagcttcccaggatttctttggcgcctaaaaatgttgttggaaataggcatggctgcctcctccccacctagtgtcttattcttacaggcttataaaattcacccagtattttctgatgggaaggcttttctaatggtcagaataaccagtcacatgtgtcaatcgagagagatccttt

SEQ ID NO: 51278 - DNA, 941 bp, Homo sapiens
gaaaatgccaatcagtcactgattctgaagatcaagcatgtcccccgtcattcctccgttctcccacctgacacgactggaacgagctcctccttgccatgtcgaggattcttggaaagccttttgcagcgtgttctctttgccttcacggagtgcactgctttgaggctctgggtttagtctattaactataagcaatcccacctgggaggttgacagactcctctgatttgtccagagcttgattacatcacagggtgttcacaaatcgcagctctgagcctaagaggcttaagctatcatcccccttatccccgcccccttacaggtccctcccctaacccacagacactttcatgtggtatcctctggcaacaggagggtttgttacattgccgtggcccataacagtgcatgttcattttcctttcctcacaaaaacatggtttgtcaaaaagaaaccaaatgcatttcatccgataaaaatgaaaacagggctgtgcaagggctttccaccagctttaagcttttaaggtttacaatgcagtcattcaatggcgtcaacctcaccactttatttttttaagcaaggaaagttttatcatttataaacctaataacgttcctgtctttcccatctatttattttgctggcagtttgagcgaccctgtccctagtatcacattctcagctacttctgcctccttgaaagtttctcatgatgaaatttcgcaaaattgtaactaacataaaagataacattattttccccatgctgtggttcaagtttagagaagtaacttttatcaaaatactggaaatgccagccacgcagcataaagtccttctgccctgggaggacggacaaaataacttcagtctctgcctcttcttcccgtaaagactgtcagcttgtttcgggcggggcggaggagggggc

SEQ ID NO: 51279 - DNA, 1765 bp, Homo sapiens
agcagcattaccaactgatgaatggataaacgaaatggggtatatccatacggtgaaatattactcagcaataaaaaggaatgaagcccttatatgtgcttcagcatcacaaaccttgaaaacattacgctgggtgaaagaagctagccacaaaagccacatgttttatgattccgtttatataaaacatctagaagaggcaaacccacaggggataaaaggtcaattagcagttgtcagatgatggggtattgaccgatatcgggtatgagtttttgttttggagtgatgaaatgtcctaaaattgcataatggtgatgtttgcacgtctctgtaaatatatttaaaaccactgaaatgtacagtttaaaagagtgaattgtataatatataaattatatcccaaaaaagctattttaaaaaagaaccgagattatacctgcagagaagcaaattccaaagcatctggatgcacagaaaaggaacattaaccctgattttcagttctcaggttcatgcattcaacgttgtccccagagtcaacccggttatcctctgaacctgatgattaacaggaggactgatgcatttgagtcatggtgtggactgctcttaacgagcccctgtgtgtgtgatgaaaccctctgcatcccccagaattagaagaactgggagtttgtcagagcaacttggccctctgccatatctctttcatcaggttttctgtttcattttacttttaaataaaacagcctagaagagaccctagttcttgcgtacacatctcaagtatcctgaaacttaatggcaacaaactgtaaacagagtttgtggggcagttgtgagaatttaagaacaataatacctttcatttggagaatacttctttaaaaaaaaaaaagccctatgaactagagttaatgtcagatagatcaaggctcactcactcttccaactttgcaatcaataaaacagaaaggctgtccatagatatgtcacagagctaaaggacctctgacagggagatcaggacagctcatatggcagatgggcatgtattataatggttaaattatagataggggatttttaagttgataaagaggggaagggcattgcaagcagaggaaattccaggagcaaagtctcaaaaatttcagaaagggagtagagaaaggaaaaagcaaacatgtatacatagtaccacatttgacatggaacagacattcttttaagtggtagctagtattcggtaattgtttgcactttgccaggcaacctactggggacatttacatagtgcataatttaatatttataaaatcttcacagtattatcattgtgaatagatatgaaaacaacttcaaatatatcaaacaacttgcccaagttcaagtgcctattaagtgggggaatcatcttttctcttgatttcccaataagaattacaaaactgggaagacctcaaaggaatgggaatttcaactgtgtgctgaaagaaacctgagtctactaaaggcagaggatctagtaaatgtttgatgagtcttgatacttgataatgtttcctaattcagaagataataggagccacagattaacctttgttgtaagctgaccttcttgtgacccccaaaaagaataggttgcaaatgaaaaagtgaccagaaccttgggcatcctggacatgtcatttcaaaatcctaagatctcagagagaatgctggtcattatcagacaattgcctaaattttggaaaccaga

SEQ ID NO: 51280 - DNA, 810 bp, Homo sapiens
ggctatacaacatctaagcttctttccaactctaagcatctactatttctctgtcttctttaaactctctcagagagctgagtcctctccctataataaccaaaaaagagttactcaaattcaattaaataatcagaatttggtcttactttttcctggataaatcaaaaggaaaggtaaggatctttatacataccttgttcttactatttcacctcctgaaggaaacagagagagaaagaaaatattggtatgcacaatttaatgtatgccaaatacacagaacacttgtcaagggtaagctaagaaaagaagaaagaaacacatttcacaaaatcctatgatggacttaagcaagagatgaagcaatggttttttggattgatcaagaagacagacatacgataagctgaccaagttgacctgacattgcctctctgacacgtctgtgtctctcataatcctttgtaaacagagagtcaccgcatatttgaaatacaattacctcagattgccaacagagtattatgcaagagaatgccggaagttctggaccttatgttgccctgctaagcttccattgctcttatgagagatgctatacaacttgttaattgctgaaaatctggactctctggcttgtttagaatcatgacttggatgctcactagctctatggacttgactgagttaggaaccctctctggaccttcatttcttcatatgtaaatgagaatgcatataatcccttcctcatagggttgctgtgggaattaaatacaataatccatgtagcactaattgctaata

SEQ ID NO: 51281 - DNA, 2022 bp, Homo sapiens
atggttttgctacaaggaggtcttcggcggccttgccaaaggttggccctcagaggtgagggcggacgccaggtgactgggtgtgaaggagcaaaccggtagtgaggagatgtcgggagacagcaaatgccacccactctttcaaggaatttggtgggaagaggagcagaaaactgaggtggcagccagaggtgaccactgcgggggaaaccggaagctccattaaatacctgatgagcagaagtgcagaaaacctgtgctccgtggaactgggtatgtgataaatacataagcaataccagaatcgggttccctctccatcctgctgggcactagagcggcttttgtttccattccctctatcagtgagaagcggctcttgcttcacttgttaaaatgaaaccagagtgtggaagcccagcaatcgctggaaccctttgaccccctctccgcacctgaagaccggctgtgcccactgcccctgcggacgctccccagtgttcgcccttggagatttccaagtccagatctaaagcacccataatcagttaagacccagggctccctctagtcttatccaaaattagccctatccgtttgaaaggcttgttcaaatagaaaaggacaaaggaccaagaaactggctgtgccgaattgtgcacgtcaatcaacatctttgtggagcctgcgatcggcgcgttgtggggaaggggctccctccttcagggagatgattctgtctcctggaggcaagtgtgggagttcagaggactttactaaacatattgttttaaaaatccccgtccttcttgccaagcccctgtcccacaggtaataaacaagaagccgggcccgtctcgccgcccaggagggcagagcttgcagtgccctgcggctggtaaggctgagggtcgcccgcttgcagtcgagccgtggtgaaccgagagtcctgcaagttggacgggctcgctttccagaaaccagagacaaactcgatatttacaaactcattctctggcaatgaaaacttgaaatgagttgagctccgcatttgcgcgcctgcaaattgctccagctgagtgcacgggaacacagcccaacagggactgctttccggcaaacctggaggccctttgcaaggtttttctgcttgacagaatggcagctgtgacctgggagcccaagcaatggaggacgggtagagagaggcgcataccgtacccgatcggcgtggcgggtcatgctgcgggagtctcggcgtctgttcctgcccgggcgctgcggacgcggcctgggctgcagccccgcgacctgggagctgtgctcgggacggctgctgcggactgctcttgtttgcactggccgtttgcttttgggatttctccagtgcagatgtagtcagggggccgctgtcccgggggacaatgattccattggaagctggcctttgacaagacacacacatgacctttgactaaaatggctttggggaaggaaagtgtcgggaggctgaagacggggcgtccagcgccgccatccacattcccacccccgacagtgcctagttaatttttcatctttcaaggagaacctctgtgaggtttggtttgctgtttctctttcattctgtaggattcagtctgtttccaaaaggagttcgcagcacaagtttcctgctgtgttgttaatgcattccctgaactagcatttccaggtcaaacaggggcaggcctatgctgtttaagttcctctgacgctctggaaaatatcaccaccatttttttttctaaaacacgctacagtttacaaagggcttttcacgatcatgctgtcatttggcctcccaaacaatgccgaggaggctctcctactactgccattttacacataaagaattagaagctcagaaaaatatttgccccatcacccaaccagaaagtgaaatccaggtcttcttaattggcatccagtccacatccacgaaaccacccaccaccctgctgagtgacccacactactaac

SEQ ID NO: 51282 - DNA, 434 bp, Homo sapiens
tttttgttcatcagggcattagagagtaaaggatggtaatatggtgttcagaacacctaccaagtcccagacatggagctgggtcctcagcacactttatacagtttaaacctcctaacagcccgcctaggaggtgttgattatgaccatttaatagacacagaaagagaaacttaaatgacatggtgaagtcatacacctagaaagcagagagctggaatttgcccttctaattccgatgtcctcactgtattacaccacactgtctccctccattgagcacattaaaaatgatttaattataagtgattaatcgttaagtacccacaccctgaattgattgagtgggcacttggtaaaagcgtgtccttttagaaaccaaaagcccacactatatgaatacttatgggacaatatttcccagaattgtgaat

SEQ ID NO: 51283 - DNA, 837 bp, Homo sapiens
gctaaaatatgtcttttaacaaaactcaaataaaaacaatcaaggctgtctatattgaagtcctgaaataaggactttataacctagattttcttatgcaacatgtagtcttgtctatgtacttactacctagtgtcaaaggaataatcacaagagtttggcaactagcaagaaactttaagacaatcttgttttatatttttcaaggaaactggctctagtgaggctgagtaatctattcaggacacagcactgagtgctcacggacttgggcatagaacacaggtttcctgttttccagagccatgatctctccacaacattgtttactcctctggctgataaaagtcaccttctgctttcatattcagttcaaaagtgcaaacagtgactggcagtggcaccagatggtgaagacagaataaacatcataaacaggctaatgacatgacccctgtcctcggtgactcataattgaatggaaaagagcactcacacattcaagtaacatgttttggggtaaaagtttatcttgagaaataataacattttttcaacctttttgatctacccaatttgctgagccttttgctctttttttctactgtattcttaatatctaatatgcatattacatagaatatctggtataggcaactagatatccttgttcaaaaatcaaaaaaggcctctagaggctgctcttcaatgtttgagagaaggaaaataaaatattttatcaaattgtctgctgtacaaaaccctgcttatcagcttatacactagcatgcaaacttatagttatcacaccaaacaagataaggatgtcactcaagt

SEQ ID NO: 51284 - DNA, 734 bp, Homo sapiens
agtgagtgagagatccctggggttccacactcctactaagaacttttacaatcctagcagcagggagccgacacctcttggcccctcaggcttccagtctaatacagtgagctgcccgaagactgtagagacgctgctggagtctacgtggaatcccacaggctttggcccctgagcagtcaggtgccagctgctactgccccaccagggaaggagcaggcagacccggcattttcacacaacccaaagacagatacggcagccacagtacagagcagcaggcagacagcagaatgtgaagaaagtctgcttcagctactgtttgctgaacaggtccctgcttcttcagcgctgggtccacagtgcagccgccctgccactgcatgtgtattttggctgtggcccagtgtagtgagagcccagccccaagaagccagggacctgccctttggctcctgccacagcagtttttgtcaccacaggccaccacagatgccacactgccacctcgaggccagggagagagggggaggctgagcacgtttgcatgtccccaacagcgaaatacacctccactcctataaaagggaagtgcaatcgggccacgcatcccacagctgccagcctcccttgctccagctgagggagtccgccttcctcagcgaaagaacagcagcacggccaccctgctcccacccaaccgtttcagctgccagctggagcccttctgagag

SEQ ID NO: 51285 - DNA, 1644 bp, Homo sapiens
aggaggctgagccaggagaaaagcttgaacccggcaggtggaggctgcagtgagccgagatcgcgccgttgcactccagcctgggcgactgagagactccgtcttaaaaattaaaaaattaaaaaaaaaaaaacactctaccaattgggataattttttaaaatctagcaacagtcacgaaaacagatttgacagaaatacaatctagtacttagacaaaaactttagtaacttgcaacgggaattaaatttgctgaataacctgtcattcaaaacatttttaccttacaaacaccatttccatcacagtgagtaaattctagtttcccactaggtttcccaggcccaccaagtcaatttcaagcaatcgcaaaatataattaatggcaacaaaaccaaaaggaaggaagggaaatgaaaaaatacttataatttatatggccttgggctttcaaagcccttgtctcctttcttcctgttcattctggcgggctctacaccagtcagcggcatgaagcggtcccgcggagcttggcttcccggcttcctagggggatacggggcattactagtctttggcacctcacactctccactcccctgcggtccccaagtcacgtctcgcagctggccggtgcccaggtgagcgacctgacgggtcgctgcccgcctcaacctcgctccttcgactagctcctagaagccgccgtcgacaagcttctgtcacagagatgctcctctccgcaagggctcgaagctaccatccgccgacatcttgtctgtaacctctgacctccgacgtcagcggaagtggaacggcggcgggggtagaaccaggaagtcttgtcaatgggcagggcttgcgatcttcgcatgtgtcttatcgtaaagaattgttaaaatttaggatagggaaaaaactatttaatggatgaagcgagaacagcaggaagaaaaggagggaaggtagttttctagtacaagcatattgagaagaatggaggacaaagtttgcgaagagccaggtataaataggctggggcagggtgctagtaactgggcggggtggggtggtgggaagtctcccgaaatcaggaggtgcgtgcctctggcttgctgtgtgaacagacacactgggtccggtgatttaagctgtaaaatatgtgattagactgcaggtagtctaaatgtcaaaactgcagcactccacagctctcactaggcactgctgccttagtatttattttaaaatatagattacaaggccgggcgcagtggctcactcctgtaatcccaacactttgggaggccgaggcgggccgatcatttgaggtcaggagttcgagaccagcctgaccaacatggtgaaaccccgtctctactaaaaattacacaaaattagctgggcgtggtggtgcacgcctgtaatcccagctacttgggaggctggggcaggagaattgcttgaacctgggagacggaagttgcagcgagctgagatcgttccactgcactccagcctgggcgacagagctgagactgtctcagaaaaaaaaaaaaagaataaaatatagactacaggccaggcgtggtggctcacgcctgtaatcctagcacttagggaaactgaggcagtcatatcac

SEQ ID NO: 51286 - DNA, 834 bp, Homo sapiens
gtagctgggatattaaaggcacataccatggcaccccctctctccagtgctttgacattcagttatctcacaataatcttgtcattccaaacagaaattaggaaatctgcagttggtacagtcatttcattagaatgtcatacaaatgaggtgaaggtcacaggttcaatattcatgataatctctgctgtgctgcactaccatagttataactctcatcagagctatcttgcagaggcatttctatactcatgaagaagtccagctcaccaaagagatgatagactctgaggtacaatgtggatgagggccaagttaagggctgggcttcataaagatccctttcctattcctgtgagagattatgacatgccattttatttatttatttatttatttatttatttatttatttatttatttatttgtgatggagtctcactctgttgcccaggctggaggcgtagtggcacgatctcagctcactgcaacctccacctcccgggttcaaatgattctcctgccttagcctcctgagtagctgggactataggcatgcgccaacatgcccggccaagttttttgtatttttactagacagggtttcaccatgttggccaggctggtctcgaactcccgacctcaggtggtccacttgccttggcctgcaaagggctgggactacaggcatgagccactatgcctggccatgaaatgccattttataattgatggcacgaccaccaccccagagaaagaaaagtatacatccaccatttctaaaggagaatgtttctattcttactctgaaaacataaagacaacatttaaaaa

SEQ ID NO: 51287 - DNA, 1468 bp, Homo sapiens
agagtccctgtaatcaccggtaactcttcaaaaacttcacggaggttgtattagtatttcctgacttgctcccgctgacacatgcctccaaggtcagctggaccagtgctactcatcaccgcagtgcagctaactggacggcccaccggaggcgtggactcctcgggaacaggcagcttgctatgagcccccggccaggtcagtgcatctctctggccctgttttcttatcccgactttccccgctgagaaaataacgtggccggccagaggctgggggcgccgcgtgaccagggctcacctgtgtccatcctccagctgctggcacagcgtgggctccagctccagcaggcagaagtcgccggctgcagcgccgctggccccagggccgaagcccaggcagtgcaccgccggcagcagctcggccgcattcagcttggcgatctgcagcgtcgcatccacctcgtcgcgggtcctcttcatcgcagcgccgggtctaggagtcccgccgcgcccgggtggctgcgggcttggcgggcaagaaagaagttcccaagcagccggaaggtaggaaacctgagcgtttgaaagcgcgccaaggcggccatgggcgtgtttccggggcggagcgcgctgcgggcccgcccgcgggaaggcctgccggcttctgggagcgcgagcccctccgtgccccacgccggaccgcgactgcaggaaggaaacgcggcttcccggggggcggtctcggcggaagctcgcaggggcagagctgcgactcggcgggttgggacacggatccctcgcccaccctttccgctgtccccttgcccgccccccatccccgatctccgtccctggtttccagccgatgctcccatttcctcgccgtccacattgtctcaccttccgccagtggcgggccctgtgataaccacttggcatgtataattccatgagcccgttgccacaaccctgtaaggtggtgccttggtcattcccttttgccaatgaggaagcaggctccttgctcgtgatggcagagtcaggaggtaacagagtctgactccagcctagccgactgtggctctaaaagcttcctgcggggttttgtgcaaataacccatgctcgggagcgaggccctgggaaggagtatctcgcttctttgggtcagggcaccatcatatctggagacaacggcgggactagtctattcgttgaatacctagtgttaaccgaaaagtgactgatgcaggtctcgttcaatagaggtttatttaagcaaggttgaggacgcacccgaagggaaaaacaagtcacaggagcatctgtgacttgtacattttccaaaggtttggggaacttcagtattaagagttttaagagaaaaggttttcactatgcacacatacatgaattgcttgtaacagcgtaatgtgtaaactttcccagagatgcttagggaatcgtt

SEQ ID NO: 51288 - DNA, 2142 bp, Homo sapiens
caccaatacctattttatgaattattgtaataattaaacgaggtaataccatacctgaagtatctttaatgcagcagatgtcaaaagtggtagccgcaattatttttattttgtaagggaggattaaacacatttaaataggacatcacaggagcggagctggatcccaggtcagcctgattcctaggccggcgttccttattgattacaacataaggcaaacaagtcgtctttggagagagaggttggggagagaagaatgtttaatttctccatgcccttcaatgacatgtataaccttcactgttgaccatttggccagattgttgaattatgttttgctctctggcaacttggggtgtggaacgtacaataaaaacgccttcacactaataacctccaggcctgtccccaggattctacagcatgagctttgtgggtaaagagagctcaccaaattcagcctccagcagcacacacagctcagtagcagcgccccgcccagatgtttatattttcctccatcggccccgccccccgaccatgaggggctctagccacgcccccaagctcaagtttctggggccggactagcccagcgcgtctgcctacccatagggattccctctccagccaatccagtcagagcagcggagctgccccgaacaaagatggcgcgggaagcgtctgtgagggcagactgatccgagcacccaaaccctcggcggacagcggagccagtggtagccgcacggccctaaaaccatggaggagggcggcagcactggcagtgctggcagtgacagcagcaccagcgggagtggcggggcgcagcaaagggagctggagcgcatggctgaggtcttggtcaccggggaacagctacggtaaggcaagagacacagcgggtgagctcacgatggcactgccaacgcgtgcccgctgcagtcctgcgcgcacgcgctccctggctcgtggcttgcgactcgcgtggggcgccggaacggctgcgggcgcgtggatggtcctcggtgcgcccgcgcttagctgctgcagcctcggtccctgaggactcgctcgccaagcggggctgcctggcagaagccgacgagcgggtggtgcgcgctgcgccctagcctggctgctgcagtcctgtgccgggcaaagtccctgccacccaccgcgctgtccgtcttcccgtgtacctggacgccgccaggcctcccggctgacagcctgcgcctcatccgcgaagagagcaagaggggtcgctgtggggtcccgaggcgaccccagcccctctactccttgataaaaggagcaagaccaacgatagtcttcactaggttttcctttttgctgacaagtcttccttcactcccctgagcctcggtgttttacatctgtaaaacagggctgattcaagggctttttgtgaggttaaactgagagagcatttctgaaaccctgcacctatcagttaattggcacatcgtcctcaatcatttgggtccgcaagggggcgtggaggcaccttgtcgggctgccttgaggctgtgccaactccccgggctcgcacgttttgggcagcaggatccatggggaccctggctcctgcaagaattaagacttgcggcgtctcacggaacttgggaacaaggacgacccccagaatcccccttgccattcccatccctgtatggtccttcctctagggctgtttgggaatagtacttatggtctaactggttctgcagctgcccttcgtgtggttataaatcagtttgccaggaaaaagaaaacccagctctgcagcgtttgagccacaacttgtacgcgggcccctgttacttctagttcttagcctgaattccccagcttgttttggtttctaaatgtctgtgtttcaggacctgaaagagtgtcttgcaaaggtctctgaaggagaccaatattggaagtcagaattaactgatttttaatgttacaaaaggcaaattgcacctatcgattctttgttgatttttaaaaatacgtggtcagaattaaagggaataaaaactttttttccttcatcaaaagtactttctaatgaaacctgtcacgcggtgcccgtgtgaagagaccaccgaacaagttttg

SEQ ID NO: 51289 - DNA, 1133 bp, Homo sapiens
tctggaggacaagtattttgaactcaggcacagaagagccttgggggcttgattgaagctgcagtttctgctgtggaaaggccaggctactagtcccagcccacccacagcctagcagatcaagctgagcctctgaggtcacatccaccaattccttgggtccctcctcagctggcatgtctgcacactttccaaggtgaggtatggtgtcctattcattcatatatccaggggttcctgcttaaaatccaggaagaggcataccattatttccatggtacaaatgcattttgacttacaccgatgctttgaaatgaggactttaaactttaccttatcttattagataaggatgtttagatcaaaggttaaactaggttatttttttaacctcttactctttttaattgtttaacactttttaacactctattttatgtccgccaagatacatggctaatttattccttgggagtaggttgtaaattttgttattatgctattttttttgcagtatttatggattttgtgttatgtagattttctttcaaccttctcaataaatagtaacaacaataataaaaataaaaaccagtatttattgaaccatactatgtgaccagtagtggcatgcagtttatttgaacagtatcatttaatcctggagtaagtatcattagtcccattttagaaatgagaaagcaaaggcttagaaagattaagaaacttgcccagggttacaaggtgagcaggtgggagctgggattgcagctccagtttccctccaaaggccatgctctttgatggttgaggacacagctgggctcagccctaagctgttggagtgtggcggtcagaggcggagatgccccagctattgtggacatggagcctggacctttgaactttgacttttctttgtttctttgtgtttttgttttgttttgttttgagcctgagtctcgctctgttgcccaagctggagtgcagtggcatcatctcagctcactgcaacctctacctcctgggttcaagtgattctcccgccttggcctcacgagtagctgggattacaggcaggtgccactgtctggctaatttttgtatttttagtagagacgaggtttcatcat

SEQ ID NO: 51290 - DNA, 789 bp, Homo sapiens
ggataaataggaaaagagggagagcatattctgaaaagggagtagcctaaatatagggaagaggcagaaaggaaggattgggctaaaattggaagaggaaaataatgttggatagattgagttttaacatattaaggaaactttgactggcatacacacacacaattccctaacatatagaatacaacatttccatttggaagaaacaacacctgtttcagttacataatccttgaactccagaaactgggccagcatgaacagttgtttaagctatgccaggtatgcagttgggaatcaataaatgtgtttcggttgagaaatttttgcaagccccttaactgcaagctgcctccgcgatagctgcggatgttcctgagaacacttctgaagatttgaaatatttttaaatccagagaaaccttgtctattctcaagttatagacgtgcaacactcaaagcctgtggcactttggcagcctcagcgtctgtcctgtgaactgaaaatagatgatcataaccctacacagtgtttgtacagcatgcttagcacaagattcactttaatgtgttcatccttgtttggaagcccaaaggaaatgagatttgctgttttgtgctccctggccttgtggcttacggtagatcttttcagtacaaaatgtgcccaacacagttggttctattttgatcttgtgtgtgaggatgtatcctagaggctgtcaacctaaaataataaaaaggatcagaatctagctttgtttttttgtttttgttttttgtttgttt

SEQ ID NO: 51291 - DNA, 909 bp, Homo sapiens
attatttaaataatgtttttatatttgatctttctatatattttgtctttgtctaaaattgtccctgagactgtttcttctcagggaagaagttttcagtttccaggactaaacatttcatggcaatgcagtgtctttctcaagagtgagtataatctgggtgtttccagaaatgacttgcagggctgtcacaaacagattctaggctagctctctcatcagcagtccactcttggttaaagcactagattagcaacttctgtttccacagtggcgctcaaccaatattctggtagcagtcaggaggtcaaggtttaactcttatctgggaaaagaggcaagttacctaacttctgtaagtctccgtttttccagctgtaaaacagtgatattggcaaggacttgaactagattgcctgacatttctttccagttaagacaattcagtgattttggttatcagttaggttgataccatagaagagatgaggttgattccagcaaacctcgcagtagggagtggccaagtactctctcacctggacttttctctgctttgacttaccactccaccagaagggctctctttctaatcctttaacaaaagagaacagccaagtctctccagtaattgccaatcaatttttccttgattcaggacttcatttgttaaaaaaaaaaaaaaaaaaaaaagctgaaatgctacttagtggcctcttgatggcacttctggcaaaatctgactctcatttaatcctctcaataaccctatgagacattctctatcattcccattttacagataagaaagtaaaggcactgagaagttgaatgctttgtccaaagttacacagtgaataacgggtggacgctggagtgcagtggcgcgatctcagctcactgcaacct

SEQ ID NO: 51292 - DNA, 2176 bp, Homo sapiens
tgtgtgtgtgtgtgtgtgtgtgtgtatgtgtatgtgtgtgtgttgtccaagaccaattgcttctggccctacagaatcacctgtgctctgtttatataaaccagttctattctctttccttcttatttctatctgtatttgttgttttgttctgatcaggttgggagaattcaagcattttcttgaagcaaaactacatgaaatgtgtattatgatcctatttcatgtaaaaaatatacaaatatagccatatgtgtacacatacctagaagatttctgtaagaatacataggcagctattatattaggttcctttggaaagtggaggtggaggaaagcctgaaacatattttttgcacagtaggtagaaacatatagtgacctcctatgtccccatctcctagcttcagcaatgatcagttcattgccagttaacccagctttaataattgtctcttcatctgaaccgagaaaagagacttttaatttcatttttatatatatttgaattattttctactgtgaggatatattattttgataatttaaaatctgaattagaaaataagttcagatattaaaaggaaatgcagtgtattatatttccattttgtttttttcttttagactcagagtctttcaacggtgtgtgataaagagtgactttccctgggttctcagatccccaaggacagatattggctgttgcagaacatctggaaaggaggagagctgtagtttaaagcatatctatgtcagtactgttgcccaaatcacaggctcacactgtcagccccactatttggcttgctgtgtttgttaaactgtttactttggctgagatttatgacgctgttttaaaatgagaatatgtggtttcaatctcccctttgttccctgagtcccacaatctgccacagttctctgcaagctatttttgaaaaacaatttctacatttcttatcagatggacagtgattttgcaggtattgttaacaccctgcacccagtaatgtttgttctcttagggctggaagaggaaatggtctgatgcaatttcagcagctggttagctggacaggaatagaacattacagaatcaccttgaatctaaagcctgtgaaccagctgtctgagatgaataataggaaggttttttttttcttaatttatatttcatagccagtgggattgaaaatgcagctaaaatacagatggtcactcttcccaatggtttaatgtgattgggactctgttgctcagaaaactattctatctatgcttcccaccatgctgaatacataatatgcacgaattaactttcacatcaatgagatttctatctcctactatttgctatgcactagaattgcaacaataaataagcagctcccctttagtatccctaatgtcatctagttgtaatacagtgcgatgaatgctttactgttggcgctaaaatattgtgggacaatagaggagagagaaggctgttttctggctttggaaggctgggaaaacgttcacagaggaggtgcccttgaaaagctgacccttgaagataagtcaaatggttatgaattattgaaggcaggaagaaggagcattctaagcagaggcatggagggtgattagcatgttcagaggctgaagaagagttcagaatattcagagtacaaagcaggaatgcatgtgattgggaggtgagagagacaaggaagctcaagaggcgatctagggtcagggtggaaggcctccttagctcctgggtaggtgaggttcttttggatccagggagtcgagtcccactcagccccctgaggggattggtagtgtcttggttattatacgagtgcacatggcttggaagagaaactggaaaactctaaggatctgaggaactcctgcaacttgttcctcttgcatccctcatttgctgcttcaggggcttcctgttgctttcttggcttctctgtgctgcccccactcccctctccttcctaatggtccagtttcctcgatgacttttagcactgaggttttttttttttttgagacagggtcttgctctgtcacctaggctggagtgcagtggtacaatctcagctcactgcaacctccatctcccaggctcaagggatcctcccgcctcagccggcatagtagctgggactaa

SEQ ID NO: 51293 - DNA, 455 bp, Homo sapiens
atatatgtactgagtattttatacagcaaacactctttctcaggatatattggagatttagttttgatgacaaaggaggttcttttcctgaacacaccttaattaagacattatttgtcttttgagggcagcctcctaagtctgtacaggttttagagattcatgccagaattatgtaagcaacaccacccccatgtgcttctgttagcacaagctttctgcggtcagagatggaagcacaggctgctgtcatggaatgcactgagcaaaataaaggagtgctctgtaaagaacttggctgaagtgtctattttcttagttccaggacctgacaactctctttttcttttgcatgtcattctgcttatgtgaatttttctctttgcctcttgggactccctatcttattctaaaatgtgcttttctcccttggggtgaaatactaaatttcttga

SEQ ID NO: 51294 - DNA, 1764 bp, Homo sapiens
aggatagagaggacccaacagggtagacttgagacaagggatgaggatatcagagaaaccaccaaaacttcctacaaatactagcccaaaatgtctttgccatgactatgaagagtggaaatgtccaatagatcaagactaggtaaattatcacttggggtgatcatatttgggattcttggttattccagaaagatcaaccccaattcttctgagcaccaatcatatgtattttaattgttcactcagctctcaatggtatagacatacaaatagctgcctatactattgaattattaaatgcacattgttgaatatatttttcgatcccccagtacctattcctattcttttgctaaacctgtattttgggagtaaattgcctttccttcattttgtgtggttcttgtgagatatctatcatggtgccccagtctctcctagtgaaaatgagtcccatacccaagctataccaattaacattcccttccaggactttgaattttgagcagaagaatataaaggtatagaaaagagttgaagtttattcacccaggtggttccccaggcctgtcttggttgctttcctctctgagcatggtcctagagcttttggatgaaatctgtggactatagtggcctttcgtgacgtagggagtaaataactcatgattaggacaaggtggttgagtaagcttggaagagcccacggtatcaattccacagaggaagtggagaccaagcaccagacacagaatcaggcatctgccaaagaattcaagcaagaatgcaagcaatcagattcagaaggtgtactgtggaaaagattgcctgattaattcagaaaagagtggtagatcagtcataatgtttcttgcttgcaagtgacagaaaaccagcttgaaccagttttaagagaaaagaaaaaggctgtattgctttagttaaccacattgcaacaggaacaatgattaaataatttatcatccacctggggcacttccgagactgaaagagctacacttctgagaaggaaagttaatgattaagctggaacaacaggtgtaaactgggacaaatgggccctatacccatttggatgtcttctcatcctagtgtaaggaagttatgatgaataaacctgaaaggctgcctgccaggggtctatctctctctctgtatctttctctttgtctctctctctttgtgtgtgtgtatgcacagctgacagaagctctgggctcgaattcttacaggttaccaatcagaaaggaaaggatacttcttttgtttgctccagtgtaaaatatcttgtccaagaattccaagtagtctgacctacatcacatactatccctgggccaatttctgtggataaagagatggattcctaacctaccatgggttcatctgggtcacatgtgtttactgtgttgaagacataggagtcctatgaatccatagtcccaataatttggagcagcacttccttgaaagaaaggcttttctggaagacaaaaccataaatatccactcaggcagccttttatagagtgtctctgccaagtccacttgcagtatgggaaccgttaagtgttacataaaacattctggagctacctgggaaaggattgaaccatgacccttgagaccttggaagccctttgcaatctgctttaacaaagagccatggggccgctctatccctttatagtcttgtatataattgcccattgcgggtatgtgagtccccagggctcagtg

SEQ ID NO: 51295 - DNA, 555 bp, Homo sapiens
tgaaacttggaacaaagagaggcgctactttttgccaccgtgataggatcctctctaccttgcagaagagttcttggtggctaaaactcaacaagaatctgcttgtccccagcccagactttctctgggagaaaaggaatggataaacgtatggaagattgattgagtgactgtgggctcccacccaaagagatgattcagtccagtggcagggagaagagtgagacccagtggaacgtgatttcgcaatgggcccgttgccacgacagggaacacactgtttactaaagagagctcttcaacctctcagtcatctttgccttccagaaaactgcagcctcaactctagtaagtaatccaccggctcagcccaagccctgttggagcggatagggctatccttgccacagtactgaacagcaggaatgttgctcgcaaagcctgccctttggaagtagccagcaaggctgaaagtgctcaaccactctttggaatgccacattgtatatgggaagttccataatgcgctactaataagtaaagtttctcttgctg

SEQ ID NO: 51296 - DNA, 1303 bp, Homo sapiens
gtccactcacgggactcctttaccaagtctcttgaattcttgcctaggccagtggagagagttatcccagagcctcagacctgcaggcacaccgactcccactgccttgcagaaagaggttcaggagcagtgtttttggtagtcgcttgaactatttcttctgggaacatcattatctctgttgtgattcctcagagcagtagtcaaggtctcagagtaaaggcctccctgcatacttgtggccacttatctcactgggcatgcgagacaatgtccaagttacgcaagacaggctgacgagcatcctattagcacgaaaacatgatgcaccctgggtggatgagtttggactcatagctggtccccaggcctaaacttcccagaagagtgggagaatcagtggcttccttttgaattcccaggcagtgtgcccggtcacaaggcattccccaggaagggtgaagctgtcttgggacgcagaagtttggaacaccatctgggaattaacaaagagataagattttcagttcaatggcattcaagttgatttatgcttcagtaccagggacttgatatcaagtccctagagaaatagggacataccgggactattagtgaatcaaacagaaaagaagaagtaggctaataagcatccttaggaaagggagggaggaaggctgtcctgctttcaacttaataaggagtttgtcctaagtaggaggacatttctctatgttcagcttttagcaaggctgtggctgttgtaatctgcaatctgttttctctctgcctggctagggcctgggctcctctttggctgtctcagtctcactttggctctttctggccctacagctaccctggttccaccatgtcttcctcctggccctctggctctgccacccacattcgggttctgccttggggcagccctatcctttgccgcagcgggcatgtaggacaccttcagggtctccacactgctgccttccaaggtctcttggagcctcaggatctcgtggaccctctacagaaaattgtctggggaagctcagagtcatttactttctctactaaccacgaaggacagccaggtttactttgaggtggccattgcctagttgggcagctaaggagtggccatcacttctagagtcctgagtatgaaggagggtagaaatctctcttcccattggctttcttcagccttcaggctctatttccaagaagaaaacccaaaacaaacacaccgaccacttcatcctcctcctttctttctgtataccttcttcccacagtccct

SEQ ID NO: 51297 - DNA, 903 bp, Homo sapiens
atcccagctatttgggaggccgaggctggagaattgcttgaaccagggaggcagaggttgcagtgagccgagatcgcgccactgtactccagcctgggtgacagagtgagaccctgtcccccctccaaaaaagaaaaaaatactcaattgatagtaggaagcattagtgacggtccttgttttgccactcttgagctctgtgacttaaggttacttaggatgactcacttgataacttctttgtttatttgtatatagctttaccccaaaaagctgagtcagcatttatttgtaatgttatgaaatgctgcccccttgtgtttttgcagggttcatttaatttctgttttgattttaaaataaatttttaatttaaaacttattgacctgttaaaaattttctttgtttctatcatttcttttttggctcactcatcttcctaactgccaaaatcaaacgagtagctactactacacctcattaagttaaaagctctcttacaatatccttggagaaatgtaaatatcattttaacaatagagaaaggcaatacttgctgtttcttattcctaagagaatcattcctggacttggaacatggacttgctggccccgctcagctcctattggactaaatattcctgacttttcgtttaaggaagagcaaagtcttcttctaaatgccaacctcattcccttagagtggtcattctttcatctggaatactgcagccactcagacaaactaccctgtaatagcccagatgtcacttggggatatcttgtcccttggagaattgtggagaacatggcccaggcacaaattttagtgcctaggatctgaaagactttaaaatgatttctattgcttggcttcctgagccacaataagtgtgacgttc

SEQ ID NO: 51298 - DNA, 1365 bp, Homo sapiens
atgtaatagtttgagttcctttaaaaagtagatgactttgtttgcccaaaaacaacttaatctactagtccttttctatatttataaatttataaatgttttctgaaactgaatactcacaggataccccatagcctacctaagaagactgacagtctaccagctgagtaaaataactctactagaattttaaattgtttattattaaactctgagcaacaaaggcactgatctgggaaactagccaggtatgctttgccatatcagccatctataacaataagaagataaactgcagagttttgtcactttgtttgtgaaatctctatccaaacataaaaactgcatccaaagtctgggaaataacaatctgatgacagctacacgcggctccagaatatacccttttctcctttggtatgtgactcaatatacgcaaagcagttcttagtaaagagacaccagtacattttaagaaacaatttattatcctatccagctggttcatataattacaaaagaggtggtggtaatgcaattggaaagaaatctaagttaatgccccacaagaagtctgcaactccactcaatagaattaaatgtgtttagtcacagtcaccagttgtttccacacaaaaggttaatttatttaattgaaatgaaatgacaataccacctttcagtggaatttagaagtaaaattgaatggtataatccaccacataaaggaatgtggacattgacctcaaagcaaatttcctctttgtcttttctctgcctggcaaccatgactaatctttcaaaatccacctcaaacgttacattttctgtcaagctcttcacaacaattcctttctaacacagactgggctcctttctctaggattgccagaaagcttaatgcatgcttctactacaatgtttctctaatcatactggctcttccttgtaaataacacatgctgagtgctcattagatgccacaaagtataataaagacttcacatgaattattttatcctcacaactactttgtaagaaagacactgttattagtttcattctacagtgacaaaacttaggctcagagtagctcagtaacttggctaaggatacacagctaggaggtagatggcagggatctgagtgtaaacaatttgactccggtgcttgcaagcaccattttattctatatgatgcctcttaggctgccagtcctttgaaggcagggccctgatatgattatcttatactcccagcagccacggtaatgcctgatacacagtggatgcctagtatatctgagcacagtacagagtacagtgacccccttgaaaatgccacttcatgtgcaaattcatcttt

SEQ ID NO: 51299 - DNA, 1620 bp, Homo sapiens
gctgaaaaaggttttaaaatttttattttacttcctgtatttatctcatcacagacaggcaacaaacagcccaaggaaggaaccatacttggagcggcactgagttgagagtcatcttagaccgatataacccaaactaactcctattcttccacctgaaacctggttcaatctcagccttccctatctcagttgatgacacaccctccagttggacaaaccaaaaaaccttggggtaatccttgtttcttcttttgctgttggcctatactcaatattcaggaagtcctactggctccaccttcaaacaaaacctgaccactttcaacacactccatagtatttctagcgtggcctctgcaccatcacgtctcgcctggattactgtaacaccctccaaacatattctttgcttctgtcctctactaacccctatttctgaacagtctattctcgacccagcagccagagtgctccttttgacaccaggtcagatcctgttactccgtggatcaaaaccctccaaaaggtccccattttactcagtcaaaaaacaaattattgcaagggcctacaatgccctatgtgatccaccttattacctctccgatctgctctaatcctcttccccccgcccccccaagaaagacatgaaaagggcagattgaaaagaagaggggacgagtaacagacgaacgacattaagtgcttgccagactgacgaccctcttgtgctttcccaagtcacctcttggccgagggtctcggcttccctgccgccccagcttcactacttaatctgccggaaccaacgctctccttctgccagtataatgaaccccatcaagccataagagtccgagctcacctggggcgccctagagaaactcgacatattcctctactagcaggaccgtacgtccttctcctagtagccacgccgggtcactcagccttactggcccggcgggaaacgctaacacccaagcaggacagttcctagcccgtcgagcacttgtcggcttctccctcttcctcgagtttcctccagtcttctccacggcagcaatttcgtcatgaaaggagcatataatgcagttatttagggaataactcccaaaaatatctcgcttggtggaaaaactgcggaaaaccgacggaggacataatttccagccgacctaaacgaagggaaccggaaatgcgtcatagcgcgcgtctgtttggatgtggaagccgagacctaaagttggggggtgatctctgaggagatggatcggtacctgctgctggtgatctggggggaaggaaaattcccgtcggcggccagtagggaggcagaacatgggccagaggtgtcgtcgggtgagggtactgagaatcagccgggtaagcgctgggatgagaaagagcgggaacggcttgtggagaggggaagaagtttgagttttgtgatcaagttctgctgaagagggatcaatatgtagttgtcccacgaagctgggactctatctgggatagagttaatgagggctgcaaaaatagcatcttcatggaaaaacagggacaaatttgtggatgcaagattccagcccttagaagttcttggcatagtaaatg

SEQ ID NO: 51300 - DNA, 659 bp, Homo sapiens
tagaatcataaagccactcatgtggctcatgtgtggagctcagctggactgtctcctctcagctggagtgcacaggcccagctcagtgcaactgtgcagcaggccatgcttctctttggagctcttctttctgtcgttctttcctgcctcctggcatgtgaggcttcactcaggccagatgtcaatattttgatccaaatatctaaatttccctcttaataatcaaaactctttattccctaagcctcacatctgcttaaagtaattcaagactaaggtggaaatgagtcataaccgttaatatgttgttccagtaagagacctttctatttataacaagtagctggggcaaaattggtcccttatgtttactctttattgcacaattgaagggctagtaaatgaaacatagtctgttctctaaaggaggtgaaacatttccatcattctatcaattcagtttgcatgattctgttactttagcaaatcctgttttttttgctggtgttttttgctcaccccagggcagatgtttgcaagtttctaaaacagtgaagccaatgtaatatgctgtgcagtttaaaatcaaacatgtcatatgtttaacaacatataacatgaatacagtgggttatgaaacagcattggaataactacca

SEQ ID NO: 51301 - DNA, 1095 bp, Homo sapiens
attatgaatacattattttatgcttttattgaaagatcatttttatactaatttaaaattgccttttaaaatcaattttatataaactttagaaaggtgttcttataatttacagttcattaaatatggagttacttctacaagattcataatggggtattggtgaaaattatacatatatatatatagagagagagagagagagagaaagagacagagagagagaaagagagagatttcattttcagggaacttggaattgatttacgttaactctgacttatgacctcttttccagacatgaagtaatatgttctttatttcaggaccttgtgaaattagacagcaggtcatctatgatccatttgaagcttttaaatctttccccttttgaagactattcagcctgatttttcccatcaagctctctttggaaaccccatttcacacagtgcattctgcctccctaattttgtcagcactattgttaagtattgattttgattctttattaagttcagtttttactctaccatttacggtagatctttggccttcatgatttaatacagtttttactctgtgtgaccttgaatgctgatgacttgcactaatttgtcattgtgttaagggccagttttgaagtgtggtctgacactcagacctggaggaggcccagataaccccctctctaggcatgtcagcatggctctgctgtcctacccttgcatgaaggcatgaaagacacacacatttttgtaaaatggcctaaaaagccaaacgatggtgttgatggaagttctgtgaagatgatagttctttgccagaaaatagaagttagggataaattaaagaatagaatattggatcagtagttctgagccatttggtaaatcaatatttcagtaaaaaaagtccagtacaactcatttttattgcacttaatagaagaaagtgtgtgtgtgtgcacacacacacatatagtagcattcacaaatttggagatttctagaggcctctatacaaactccattccaaaaatactccaaaagtaactgctacttttctaataagacatgcaagctagagagctga

SEQ ID NO: 51302 - DNA, 1803 bp, Homo sapiens
aaggataagtacttgttccatgaagaggcaaactccaccaccatacttgttcacttttctcattttatcctcacaccatcctatgaggtgaatggtattaatgtgtctatttcacagataagaagatggtgtcttagtggggtagcccatcctgcctcttcccattagtaagaggtaaaactggaactagaaccaaagttcattgaactccaaagcccatgtcttaatcattatgctccatctagcaggatggttataaaatgtggtgttttgaaagcagggaacatattttatgttggttgctgttcaatatcttttgaatacccatcctgtgtatttggaaaattttccaaattacatgttgagcttcccaaagatagaagccagaatccaagttcccagccttccttgttgctcaaggacagaaccactcacactgaatggcaattctgaaggaggcaacatcaggaagtaaatgtgcatagacatgcatagactccatcatctggaaggcaggaaggaggaggcaccccacttttaggtagagcttggccaatctcaggtgtcattggtgtgggcttaggcagtgtgtgagttgtgagacagttgttaaggaggtgacaacaggggtattttccctagagcagcattcacagtgtggttggtgttgagcctgttttttttgaaattttgaggaaatccgtgaacaccataatatccttaactagagttggagttgattctattgcctgaaactacaatcctcagctaagaatgtggatttaggaagcaggttgccatgatgggggctaaggagatcatttaaggaatgtgtcaagtgtgagcagttaatgaaaaagaaaccagaagaggtgttctgctatttttcacaaaatcccatttcaaaaacaggtcatgcatgatatagtattctgctaagctctgagggaaactgacaatatctcttgtgttggctagatttcagtttttcagtgacacatacatttacaaaatatgtggagaatttcagcactttgacctttcctggggaaatgatatcattattagttttagatgaaaagtcagctaatgtcaaaactaaagaaaatattttgttttctcactatgcatatcatctatacctcccaaaatattctgtggttttatcttgctcagctgatttaaaaaaataataaggcatctaaatagacaaggtgctatgcagggcaaataaatgtgcatttgtcttataatcttagtacttacattgataaataatctatcctacagcccaatctagatcatagcatttagagtctgagggcctatttttgcttcttttgaattagattattttaaactagggttgccagagttagcaaataaaaatgtttgatgcccagttaaaattgagtttcagataaacacggaataattttttagcattagtatgtcccatgtaatatctagtggtggagatggcataaagtacatgagttagaaaaaggtatagaaaataaaactgacaggatgttatgatagataaactgtgaggtggcagggaagagagaagtgtcaaggtgatgcctaggttttgagcttagacaactaaattaatgacagtgctatttactacgataaaaaactgaaaatgattcagagttggaaagaaacattgtgagtttggttaaatatctccattttcatttggatgtctttttacaatctcagacttatagtatatacatgtacaagctactcttcaagagtctgtttatcctatggttattttgttttaatgca

SEQ ID NO: 51303 - DNA, 476 bp, Homo sapiens
ccttagtaaaaagacttaggggcagaagttgaaactctggggagaaatactttatgccgatgagctgttgctttctctgtttcatgctattactctattcccataaccataatagaaagttggctcaacttcagataggagaaaatgaagcttcaaacggctccaccttagaagctgaggggatgaatcaggctgggacaagggcataagactgatgacatcatggggttggactgcatacaaccatcaaccatctccatgggggctccagctttgagatgagcatttcataaaatgtttgaggcaattcattgacctttcatgagttggagcagttgacattttgcctggatctgagccagagtgggcgctattctaaatgagaaaacagttatcccatctgcactaaaggaactttttctgatcctttgttcaagctttatttccaaggcactgagtgaatttaattaatttca

SEQ ID NO: 51304 - DNA, 1000 bp, Homo sapiens
aaacgactactcagagtaggtaatatccgtatgaggactgaaggatgaccacaggcttgtgaagtagatgttaggggttggtgggtagggaagtgagaggatgattgtaagcagaagatgtcactaaggtgtcaaataacctatttctctatttacttagtattttgtaataagtgtgcaaatattatagctttgtaagtagatcaaattaaaactctcctgggggaacctagatctttaaatgaatcctatggacaattcctctttgaagtcaaaaggaggggcaagatttcagtggaaagtgcatagtggacatggactcagaagctctgggtttgagtctcaggtctgctcctagcagctcttcatcattcggagtagatggacacaatgttctttccatttctagcagccccataatgtaggtaccattactgttactaccattctatgaattaaaagactgaagcccagagacattaggtaaaatgctcaaagttatcaattagtagaaggcagagcaaatgtctgacctcaagtccactggatcaggttttgtactttgggatgtttgcctttgtttgattatttcaaaagagcatttctcatacttccccaatgattacacttgcctagaaaacctgctgaaactgcagatttccaggcccctttttttggaggttccaatcctgtggatctgggatggggccaggaatctatatttttatccactgatattacccccatctccctatataagtcttatttttagaggaatttgagaagcagcatggcctgcaataatgggttgaatagtgtcctctcaaagttcatttctacccagaacctcagaatgcaaccttatttggaaaaaagatctttgcaatgtaattagttgagatgaaatcatattataatagattaggtggactctaaatctaatgactgtgttcttataagaagaggagaggacacacaatgatatacacatacagagaag

SEQ ID NO: 51305 - DNA, 415 bp, Homo sapiens
actgcagctttcatcagcccctgttgatgcatctccctctccagcctcccatgcttggggtgctgatggctccccactgtcactagtccctgacatcatccccatcgtggttggttacataacctgggtcacacctctactccagcattccatccatttcctgccaggaccttgcccgatatagccccatcctacagacggagagaagccagcattccccaggggacttctgaaaattccagaagagaagcagaattacattctgctgtcacagtttgtctggattccctcacctagattaattctcagacactccattcaccatgacacctcctggggatgtttctttttccacctactccttgggaggagcccttcctagctccctcatttgtcagtaacattttactgaagg

SEQ ID NO: 51306 - DNA, 1544 bp, Homo sapiens
caagtgggtgaacactgctggcagagttcacgatcaacctagaaatgtccaagcattctaccctttataaatgtttaggaaactctcactggtctctactttctgaaattaggttgatggtttgctttgaatacttttctgatacatgagtccactctttccttaaattagcatacttcttgataactgaagaataaaaaaaatcacaatgaacaaagtatgcgtgtttgaaagtggcattacagtactgaagtggccacagcagccataactgttggaaggattggagctgaaacttctcagttctcaggaagcgcaatacatcaatgtccacctgagcctggcactcctaaaaagatccagcccttggatcatcatcaagaagttcctgttctaccaaataggatgagctccaatgacttcctgtggcccaagacgaacttcatagcctttcattctgaaccactccgttaaattcttatttggttggccctctagtgttccccacaagcctagagtctccttgagagaaggcctatgtcttcactcatctctaaatgtgaggatcctctccagcccttgacaggtgcccatcatttgattttcaactcaagcacagtgtcaagggattcaaacttaaccaggacctatgtctagagtgtactaaaaagcagccatttctgtaaagggccagatgataaataacttaagttttgttggccatacagtctctgtcacaaatactcaatctgccatagactacataaacaaatgagaatggccatgttttaacagaattttatgaacacagtattgaagtttgatattgaatttgatataatttttacatgtcacaaaaaattatttaaaattttttcaatcatttggtaatgcctgaaaacatgcttagctcacaagctatacaaacacaggtggtagactttggtttctggttctgtaaataaagatcatggtatttgtcactcctgtcctcacaataagaaacaagccaaaaaaaaaaaaaaaaccctgaaaatcaacaattcttaggtctatcagagaagtgaggttacagatcaaatcaccactgctaaaaccgaagagggggtagatacaaagaattatatcttacttggggcagaaatctcactggagccaacattgggtagacatatttaaaggataatttactaattactggagaccgagcctggcctagcttcagaaattaaaaactcctggagacccagcctgagagaggtgggtgaggcacatttgtatgagttttacctgctgaagcttaaccaggtttgcactgtaaaggtcaaagaaaaatcccctcatccttcctgcaggggaggggaaaagtaaccatttttaaatacacccagactgttctgttctccttaacacgacctgtctttgagggagactattttaccagagcctaacctagtaagattttatcagaaagagcccatctgacctggaaaaagggaaatacccaactccagccccatctagccttcctgtctcatttacta

SEQ ID NO: 51307 - DNA, 752 bp, Homo sapiens
tccaattaacagtggcatctgcagcagcagcagaaacactttggttagactgatgtttctctgaactcactccctttctccagtctgaaaacctttgctgttttgcaaaccacagctctgttaacaatgtccagtcatttacttctgccacatccaaactttgtgtgtgcacaaacatgacctagttgaactgcaataattgtatttatttgatacaacccaggtgggttccaagactcctgttagcagggaaaacacaaagtcattaagttcacttcgggcttagatatgtctccttcctgttcccaggaacatttcttcctgaatctatatttactcacaaagtacaaataatgtgaaatggctaagcagctaaaaacttacagaaagatctctactacccccacaaaatgatattctatttatttcgcaacccagggtgcctaaaactctaaaacaactttagtcaccaaaaaaggtggaaacttcagatgcatttaggaaggcaatgacctctaaatcaggaatcctgacctctaatttcatcagtgctctggcatttctgcaaacttttcattttcagaacaaaaggatttgtctagtaggacaatgaggaggagattttaggatgagaatggaggtagggaaaacacttataaagctattgcaggacttcaggaaagacataatatgactgaaagaaattagtggtggtgggaattcaaacatggattgatttccgaagagcatca

SEQ ID NO: 51308 - DNA, 2022 bp, Homo sapiens
gaggctgcagtgagcccagattgtgccactgcattccagcctggcaacagagtgagactctgtctcaaaataaaatgaaataaaataaaataaaataaaattgtaaagtggagagttagaagctgatgactgagagcccaactgtagaagatattgctgtaatctagaaacaggataagatctgactaggacaaaggaagagggcataaaaagaggaataaaaatttgcaagctgtgggtaaaacgaactttgagagataggcagggacagagccggagcgttagttttctggcttgtgttaatagataaaacattcgtctgttacctagaagggagtttgacaggagagtgaaagatgatagttttggtttgaggtatgtcacgtttgagaaatttctgggtcgtccatgtaggaacatccagtggacatgcctgaagttcgggatagaggcaaaggctagagaaagggatttgagggttgtctgcaaaaaacaatataatatatccacgtagggctctagatatattacattgagtagagaccggtgggggctgatggaaaagtggtggatgtgttgcaaaaaagtaacagtggatgacacctgattaaaagcctattgatgacatataaggaatgatgatctagttaaaaaaaaaaaaaaaagatccgtgtcagagcaggagaaccaggaaagagtgctatcacaaagccaacaaggcaagaaagaatttccagaaagagggctggtatgcagcagaaagtgctgaaaacacaactccttctacatttcttttcaccccaccaccaaattggcttgcctcatttgcagacatatccttgaatatctcttcttaagctatgctttaatatttatctgtgactattgcatatacagtagctaaatatgaaactccattaacatcagtgttttctgactccactttggtgagtcattcaacgtaatcaggacttagaaatgagcaacagatgtgtcacattctttgagcagtgctcaaagaaacccaaaatggtcaacatgtaaacttttctaaaatatgttttcctgacattatggatgataatgaggttttctaaattataagtcaaagccatttactttatagcatttccagaaaaatctgaattgcagaaatgccatgtttccaagaaacagtaatggtttcaactctgttttctctcttatgtcttactctttggataaccaatagcaaatttctggaaggggaaagctgcaaaaccaaatcaaactggcaccacaaatgatcaactgacatcttcatagcagtttagttcatgtttaaaattgaagaataaagcaccatacctgttaactatctcttaataagtggtacttcttaaagaaatgagctatcagggtagataatttccctttttataaaagtaacatacaatattttaagttcaccttttgttttaattttatttaaaataaatgtggtcagacagaaaaatataagagtaaactcattacaactcaggcccaatttgaccttgagtaattaagccaaacaccttctcatcctgtgctatgccccgtgatcatctaatccctggtttccttagagtgaagcaaaagctctttgctcaaattagatccatagagaatgagactccaaaagaggtctgtggacctacaggctatggggaatgtctgctgaatcagtgattctagtagtaagtggtggggagcaaagagataatgtctagagttgatcatcaaggaaatgtaacataagcatatttttaaagttagggtggtaaccactaaaagagctaaatatggaaactgttaaaagtggtttcctctgggaagtaagctaggcattgaggaggatggggatggctgaagcagacactgtgctttgcattataagacatcctgtattttgccatttttttttaaccaaagatatttttcacttggataatgtatgaaaatggtgagaaaaagaaccatgaaaactattaagtgttatta

SEQ ID NO: 51309 - DNA, 433 bp, Homo sapiens
aacagggaattttgggtgctccatggccccgcccactgcctgagaccccagagtacctactctgggaaacacaaggcaaacacaaatcccactgttactaccacagctggagctcttttgcaagcatcacctcctggctggaagccagccatcccagcccattacaacatctgcaggcacaataacacagcactcaggaaggaaaaacttgcacaacctcagctattgccattgcctgcattacgctggctaaccaggaggtcttgagtctgtccatgtgcccagtacattactactactgctggcatttgagaaatttgagaaagccaacacactaaggctatttataaccaaggaaatctcacacaatctacgtgacttccctcctactcccatcagagctgacgcagtacctgctgctgggagactagag

SEQ ID NO: 51310 - DNA, 4861 bp, Homo sapiens
taaatgttagctattgttatgattctctttctccaggttctgtttaactcctctggtctcacaggaatggtctcccagcattacaccatagtacaaaaaaagtgttataaaaatgagaaatataaactccagtaaaggaaaaagatagaactgtccttgagaagggatagtttcatgttcatttcatttgaattgtaaaactaactacttccagcggatatttgatatacgcctttcattctcattgtgttcttccatacagcagccctgtaaagtaagcaggtccagcagatttccttattcccatctcgcggatgaagacactgagactcagggaggttatgttaattctgtggcggaatctatgcctagaatgcaggcattgaaacttttccagggtttcactttacagggtgttccacttgtagaggtagtaactctccaccagggggcgcatgtcatgcggtggggtgcatacaggcggtggttggagtactaaactaatctccatttactcccccaataaacaaacaaaaaggaatctaggtttttttaaaaaaaagggtgcacttgctatataaatgtacctttaaaacatctccctttgccctgccatacaaccagattacattttcaaagcctctcctatgtagaaactctggaatccacactgcatttcagaatacgaagaagtaggtatgtcttcttaaaaagcccttgaggtgatcctaataagccccctcaaatgggaatccctgtattagactaagctacaaaagagaggattgtgatatttgacttgatggtatttgatgactaccattgcattgagaatgaacactttggctcagaataagagacgctgttttgagcagggcctccgcttctctcattagcagctgattttgaaaaacttgggctgaggataaggctgctacactgagccaaaaaggttcatatctcagagacccacagggtttctccagaggtcctgcctgtgacaaaccacaaagtgttctaagaatgtcatattagaggtttttacaaaactcacttttcagtttctgtttcaagaaagtcacataactgcttgattttttttctttctctaagtttattttcaattgcagagaaatttcttcctctttttgggtgagagatattttttacctctttgccaagtcattattcattaaaagaggaagaaaagaagggacattataaagtatggtacctaaaataaaatgacccgccttccgccccaccccaacccctcctccagtatttacagtaagtattgcaaaccgagcaggtgcccaacagtttatagtccaaataacacttgccccagatcccacctgccccttgtcacacaaaccaacacacacttgagtcaagcaaactttttttctgttatgttaatcatcaagccaaagcaaacagctttccactttctgggtccagggtggcaattgactatgaagacatcgcaaatcctctagacaaacaaggttggtgggggaggatttctctgcattgtgggccaggaggtggaccgtgacataccagggagttgcatcagctgtcacacactagtgatgctggcacccttactttaaactttctcagtttcacacactagtgccacgactcggtaagcaggaaattgacttaagtccttagtttagggcttaaatcaatcaccatattacaaggtctcagctgaaacagtctatttcaatagctacgggctcatttattcatttactcagcatgcatgtcatggagcaactaagctcaagagagactcaccactaaataaaagactccagataccgcaatctacagctaggctaggctgagtaaatagataaaataattacacgttattagtgctgacagaggtatgtacacagcactaaagagaagagaaacaagtgagaaatgcagctgtaggcagacaggagaattcagtttactaccatatgcccttctcccccacataactcaacatagccatgaacagtgcaaaacggtggttcctattctattcacattcaacaatgaggggactggggacatcagatctcaagagagagagtagtttctaggctcttcgcacgcaggggaaactgtttacaaatgcaaagttgtttccacaccactcagaaagggctccagaaaacgcagacagaaaaatcacttcaccagctctcaacccagaggaacctggaatccagactgaccggccagatgcccggcagggagagcgaatttttcccaaaactgcaacatattccccggcccctgacataactctccaggcataaccctagtcccccatttgcagggggaacgtccagaaggatagtcggagttttagcattcacaatattgccacctctctctcacccctttatgagtcaaccctcttctgctgggctgcccaggctttggagtgggaaattttgccaaagcggaaaactatgagttgcaattacgcagtagccctgcttggcaacgttggatgtaggaatattctaagttcacccttcattctcaattccatatcccagtccctacactctaccaggattatccgcagataaaaatgaaacaacgtatactaagcaggcaatccggctgggaaaccctgctagcctcgcttttccatacacccctcctggattaaagcctggaaagactgcgggctggagacaaattgcccccagggtgggtaaaagttgacaaaactctatgctgccaccccctgcgccacccttcccccccccccaacacacacacacccggccccctggggtgtgtccgcatgtggccgagtgagtgtgagtgtgagcgtgcgggtgggaagccgagcaggtgtgtgcgcgcccggcgcggcccgcgcgctgttaaccccttaccttccagcagcacttccttgcccgcgcgcttcaacgcctgcaccgcctcgtcgtgggtggcgtcccgcaggtcggctccgttcacggacaggatggcgtcgcccacgtacagggcttgggtctggtccgccgccagccccttgaagatcttgctgatgaggatgggcatcttgttctccttgccccccttgatgctgatccccagcccgcccagctcctgcttcagcaccttcacgccacgcttctggttcgagatggactcgggcacctgctcgggcaggtcggtgaaagcggtgcggaccccggcgggcgagtccgggggctgcgcgccgcccgcgcccgggtgcccagccccggcgcccctgcagaacgagccattggtggcggtcccgatgccgttgtacgccgcagcgccctcctcgctgctcagaaccagggcgtcctcgctcaagttcaccagaactttgtgccagcgatcccgcaccaaaacttccagcagcccgctccgctgcgcccggccgcctcccgcgccagccggcccagccgccgccgccgccgccgctaccgccatctttccggcattcttaaaatgccatgtgattggaaaaggggggaaaagtggggaagggtggccggggggaggacgcggggcccgggggagcgaggagagtgcgtcccgcggggaggtggcggcacgcgggactccgctccgggagttcgcagacgcactcggcgggagttggcagctgcactcaggctggttccccctcgcctgatcctgaccggggtggagcaacctaaaagaagaaggagagaccgagacaggggaggggaaaaaagccagcagccagttgcaaaaccccaaagcaaggggagccgcggagcagctcagcgctggagagagtccgtgggaggaggcacgctggcggtgaagggcggggacccacaacccagcggccgctcacctgttccagccgccgcagcctcggcggtcacacgccacccgcccgcccagacctcccctcctctgtccccagagcgcacgacgccgcggggacagcttcccgagcgccttccccgtcccgcttctctccagcccaccgcagccccctttcttcccagctcccccactccgtgggcgcccacactgcaccttcgccgggtgcgtgcgtcccgcctcggtgccctcactcggtcctcctgagccgacttccctttcatacccagcccgtagaattgtccctgggtcttaacaactcatttgtaactgatccaggtctcctccctctgcttcctcaaacccaggcttcgctgcctctgcggagttcttacctgtctctcctttccacccgggttccctggaggaagctaaactcagaccaaggccctgggctccccaggagttaaaagggaatacgctgtcccaagattctagaatgaagagtcaacgtagcccgagtggcttaaacctcctgtccttaaatgcaagaaatgttttctatcgagccctggacaggtgtctctgctggcctggggttttcaacaggtcatgcctgcctcagaccccagggacaaatgttcttccagctctaactcattctatgctttaagcttttgacctatctttgttttcccagtgccacaccaaatgctgcctggggatctctctttcttcctgagttcccatataagaagccccccatttaagaattcagttggaatgggttgtatttcaaaagttgctttgcaagttagttatttggatttcaagttgcattttaccagggtaacaatattataatgattgtttaccttcccagagcaatccagaaatgcccacataacccatgtcacacctgaaccaccctgagttcttctatccttgaacctctcaagctttcccctaactctaagcaggtctcatggtccactcaagg

SEQ ID NO: 51311 - DNA, 758 bp, Homo sapiens
ggtaaattgcatgtcacagggtttggtgtaataactcatataataagcatagtaccttataggtagtttttcaatcctcaccctcctcccgtcctgcaccctcaagcaggcctgggcgtttgtttttcccatctcagacaactccacatatctggcctctgattgttaatgctgactctcaaaggcgtaccttattgacctcatttttcagttcagtaaggctgggacaactgcactgcagccccatactgtgtataattaggaaagcatgtactctcttaggtgtcccctttcagagaatggtcactggaatggtctgaagcgacctccagcttgcttactcatagatgtggcatttgaagctcagagcagagcaaggaaggattcaaggccacactgtaagtttgtgtcaaagctgagtctaggaacagtccaacttcaggattcaggaaattatacctaaagccccctttttaccagatttctttcactgagctctctttcccctgttctgtatcctcttccagtcctaactctgatttccatttcccacccagcccaaactgggatccttctgttgctctttcccatgagatagcattttcctacagatatttggatggatttagccttgtaagagtaggtcacacaatcttcagccgcacagtagccacagatacataacagaacagtatcatgtggggaaagaaccatcttctgtttattccataaaattttgttgtgcccctaccatgtcc

SEQ ID NO: 51312 - DNA, 2411 bp, Homo sapiens
gtttgggtttactttaatctatagggatgctggaattctcctgatttggtttggccatgtccccacccaactctcatcttgaactgtagctcccacaattcccatgtgtcatgggagagacctggtgggaggtaattgaatcatgggggcgagtctttcctgtgctgttcttgtgatagtgaataagtctcaagagatctgatggttttacaatggggagtttccctgcacaaactctcttctgccaccatgaaagtcaggcttttgttcttccctcaccttctgccatgattgtgaggcctccccagccacgtggaactgtgagttcattaaacctctttttctttgtaaattacccagtatcaggcatgtccttttcagcagcatgaaaagggactaatacatctatgcacttttaattttctgtaaacatagtcaacccagagaaaaacatttctggttaagcacctggctttgctcccagaagtgttcctagtattctagaaattaactttagccacagcaggcttaagacaggtgcaggggttgagtttgggaagcaagaagacctggctcatagtagccttgggaagtgcagcttgacctctggtcatcctggagaggatgaaattatgtctgcatttcaaggcttcaaatcctaacaatgctgggaaactgggaagtttccaggagaaacagcctgcctctttcttcctttcctaggtaattacaagaagtgtaagttatccagccattctctggtcttttgtttttatattaatttctgtttgaaaatgttttcacttcaaatagtaatatgatgatggccattgatctttaacaattcttggaaatgcaggcaggtcaggtggttttctaacgaggacataaaagcttagcagaaggtgttggactttaccaagggtactataactcagtttttctgagtcgaacttcggtgttttttttttttttttttttttcagtgtctggagaatcaccattttacacaatactgcaccaattctgttgaggccatcaacttttaaacttgattcataggtctgtcatgactttgacctcaatattatataaacgttccagtaatttcagaaacaattattgactagtccataaacagcctgtactagacacttttctgggattaaaaaataggtctcagtttctgttgttaagaaatgggcaatttgcagtttaaaagaaaatatttaggtgaaactcccaggaaacagaggtaaaactgagaaagtaggtctcatagcatgtgtcaaatggagaactaagtactttatatatgccatctgatgtaatccttgcaacaaccctcccaggccactgtgattattcacctgacagtggaagaaactattgagtaacttgccctaatgatagagctgagattcaaccccacttcaaccagaggtcaaagttctggagagtgtcactgtgctattctgactcaccaaacacacacagaagcccattgtgctggggactgaacacttaaatgtccagaaaaatgtggaagttgggcattcttagggaagtgcaggtccggaggagtgagctgttgagttagatcttgaaagcaatggtgggcatggattggtgaagattgggtggtggtgagaaggtcaaggatggatgggaaaagcatgaggaattatggaagagtaggttggtactgtgtaatgcagttgttctcagaggtcagatggcttatctggtggagatctatagggatagcacagtggtgagctcttgaagctggatttataactgtgctctttgttctgaaggagaatgtgttgcttttgccaaatgccctcatttcctgagatcaggtacttcctggggtagatgaaaagcaaggttttgcaagatctatgggaggacagtgaaggggctcacctgagtaaggaagagtgggctgaaccatgccttttcttgagaattgtgaaggcaagtttaaagggcctcttgagggtgttacacacacttgtttcacaacacaaagctttgtacacattcttgaaagagtgattcaaattttgtacctttcagaatcatggcccacagatatattttatttgattggcatattttgaggaactgggaaatttcatctaaaaattaattgtttagtttctcttggaaaaaaaatcagatgcttgtcaacactgagtccatattcacttataataattgctatatgtatgcagtgcctactatgttccaggcactgttttgatgatattagttttcttaaaaattacatatggtagtattgatggttgtccccatttttcagattggaaaactgaggcagagggagcagactaactcaactgcagtgatcaagctaggatttgaacccaggtagtgtggct

SEQ ID NO: 51313 - DNA, 688 bp, Homo sapiens
gcatttcacatgatgtgaatcttcttcctcagcatcccactcttctgaccagaaatcaggttactttttagattctcaataactctccaaagctcctaaccaccatgaattttgggcataaacttttctgccttcttgtagggagtatgaaaatgttatctgtggcatccccagatcaatgggaaccaatgcccatttcattaggaatgattcacacttctcaaaggcaaagtgctcaaagcaataaagtcttcttggcctaacaccttatgtttctgtgggtacaatttagaatttgctaagaaggccaagaggccaaaattagggtatgattcccttacccaaggccagaaggggaagacaatcaagatctagagtagcatcaaacatcaaggttagcaaagctaaatattgacttctgtccaaagggcagaagatcccaaacaaggcaggcaatcaaaggtcagaagctgagagccaactggactgaaatggaagaggtttagaaataagttgtagaaggacccggaatactgcttctgaagaagctcccgatgtttgatagaggggggctattttccatttttcttattgactatgcttcttatttactttattttatgaaggtttaataaaaattcatgggcaaaaaatactagttaaagaaaatctagccaggtgcggtggc

SEQ ID NO: 51314 - DNA, 1479 bp, Homo sapiens
gttctcaaggttacttagagacaaagaatacttaagtgattatgacagtcacagttatggtacaaattatgtgtaccgcactattgaacagcatacacatttattcacaatagccagcaaaatacctgtagtagctaagatgtaggataagatcaggttttgggtaagatgaaatggagctaaaatttcaagtttgacacaggtcacgtttgggattattgtttttggattattggaaaagaagtagtaccacagatttgccagaacctaatgtctgcctggcttaattcaaacagttggtagttattgattgctggggaaaagtggagaatagaggaatggaaaaagagaggaaggaaaagtaggtggtaagtacaaggtccactcagctacagagtccatcttcttcctgtaacacctcactgaacctactagcctttatcatgcaagtcattgaatctcttgaatcttattaatagttttttatctgtaaaatgggagtgatggtatctttttcagctactttgcaaggttgttttaaggctaaacagaaaaagatagaacatatacagggttcactatgagtaagaagtaatataaatgtctttacacatttcacaacacagtaatgaacatgtataaatccaacttgggactatgtgacatgataagtatgacacacatgctgcatatgtgggggccaagtgagctgcatatgttcagtgagcctgaatgaggctctctgcagtttggcagatggactacacaaagcaaagaaaaaaaatctgaaaaatagaaatggcataattgaattattctaatgaattaaatcaaagtcactctcagaattgggaaagagtgtcgttaacactggttctgaacagttatttggaaccgagttcaactattgctctgtggccttggccctttgcttcagtctttgtttgcttttttgctcttttcagttggtgtgttcctaacttgatgaccttgtttcaggctccgggaaaatgccagtggccagaaaatcacatttgaggggttgatttgtctcccttaacctctctctgctacctaagacgtaatggaactaacatttcaaggtggccccaggttaggatttagattattacttgggaacaagagtatggccacgaatttgtcaggcaagtactgaacaaaatgtcctactcacttaaaagtcaaaggtgcttgagaggttgatttcagcttttgcacgtaggaccactgatttaccttaaaaaaaaaggagaaaaccccagaaagttttgggtcctcatattcttcttggatgtttaatattctaaagaaattattgaatttgaaattttgttagtgtttcaggcttttgttttcatttttttgcttttgatagaaaaaaaatacaagtgtctaggcctgaaaatagggtcaattcctgaaattctttgtaggagcctcaggtaaactttatttatc

SEQ ID NO: 51315 - DNA, 568 bp, Homo sapiens
gggggcaagactactgtgaatcctgctgctcctctgggtctagccacccagtggggctgctgtactccagtctggtgctggggaatgtctgcaggggatccagtgatgtgatgttcctagtagtgggtaacagcatcattcctgatgggggtcagagggtagtgccatagactctgggatttcctggatataaataggcttgtcatagtaatatactaaatacgtggatagactcaaggcctcctggttagcctggatgatgcaagcaattgtgatcgctgaggttacataaaagtattctccttcctgagtgctgtgttattgtgcctgcagatgttgcaatgggctgtgccagctggcctccagccaggaggtggtgcttgccaaagagcaccagctgcagtggtagcagtggaatttgtgctcgccttatgttacccactgcaggtactctggtatctcaggtgatgggtaaggccatggagcttccaaatattcctctccattgtgttacactaccagggtaggtggaagggcagagcctggtagggcctaggtcaggcaagtt

SEQ ID NO: 51316 - DNA, 735 bp, Homo sapiens
taagtactttatgaattagtatgtcttttgcctctgcttcaagagctgcatcccgaagtcatcagggctggtagtcagggaaggaagatggaaacaaggtatgggagagctaacaagaggcctgagaacctgagctggaatccatgaggacagattggaacctacattggtctttcaccaacaaccagccactaagttcaagagctgctatatttcactgaggagctgctctacaactagtccagccaggagcactgtgcttccggctgctgtcccatgccaacaagatgagtcagcagacctgtcagtgagctgcagcagtgcatgacccaacgtccacctgtccaatgtacacacaagaactgccatatttcagccttcctggtttcacatgaatttctctatgggcaaaccctaattctgaaacatacaggaaaggaatttgtgagtaacgtagtcgtgcttagttggtatagtataaagctccttcaaaagtggaaaaaatcaaaagcctaaaaggtcagtcattaaaagtaataaatgaagtaggttgggtttaatagagtacatggcacatctaaatagggcagaacatttttttttttttttttcttacgtgggggaaggtgattggtgttattcttgttacttgtgaaaaccctacatgtttcgggggaaattagaatcttgcaaatgtatacatatttttttctgtcagaatttttgctatttttt

SEQ ID NO: 51317 - DNA, 904 bp, Homo sapiens
aaaaaatacacaactctgccattttctgctctgaaaaatgaatggtccattagcaataccttagctctttctacaacccccaaatcatatgtgcacacccagcaaaaattttccttactgaacttccttgcagcctcagctgcctttccctggagcctccctcctctgtcatctgtgagggatttgtgtccctccctgggagtttttccctgggagcagtcactggagccatgcctctggagtccattcttctggcttaagcacagctgggcgtcagatgtcagagccccaggatggtaaacatgcagtgtctgtacattcaggttagaaagctgtgagtgccctgtctggcagccagaatacaggactgtaaacaagaacacatgatgaaagctctgttaggggatgaactttgggctgtagtctcagatttctgaaagccctctctacacaattttgtgagaaacacagaggtctggagttgctatccgctcctcagtgttagggaagccatttctagatttcaccatcctgcctgaagggtgctttattaccagtcttattattaaatgtttacttgataatccaaaataatggcacaaaatctaaatgcattttatggaactttttgaaagccatgcaagcaaaatcatagccaagcaaagattctgctccccatgaacgtgtagtgaattcctcttggtgccaaaaacttgcatgacattctttaatgtttaaaatgatatttagtctttgctttattgtgtgttttgacagtggagtgttccttgcctttttagcatagcaagagcaattgggcagggataggagtgaggtagttcttggctctttaaataagccaagccccatagccacaattataccaggaaaatgggtttaattc

SEQ ID NO: 51318 - DNA, 493 bp, Homo sapiens
atgtgattagtactcaatatgtgtgtaaaaggactaaaaaaaaaaacaaaaaaaccccaccaacattgatgttccctcatgttcccactgccttctttgtcccactttctttctcgtttgctatctaattccctcatttcataaactttgactagctgataaaccacaagcttccaaacaatgtaaaaaatgttctgatgtgtattgtgattgtgtaatgccaaggactctaagcaagggacatgtaaacaggaaggatgttcaactgtgagtgtgggttaaagttggctaaattgctgcccagccaaaacctcaaggccaggtactcaagtgcccactatcctataaaaaccctgactgcttcagttggaagccacctggtctttaggagctccatcaataaagtctttcatctctatttgagtcacaggaatcattttcttttgacaagtatgtcttaggtcagttccagaaataggctgtgagagacctg

SEQ ID NO: 51319 - DNA, 565 bp, Homo sapiens
acagaggctctcttgattagccagagactgatggttttcccacagctgggaaagcagctcaattccttctgaaatgatagaagactccaaacattttcatgaaacattttctgcattagttagctcatgctgtgtagcaagaaaccaccccaaaacttcatggcttaaactgacatccatgtatttggtttacaatttgagtcatcaatttgggttatgctcagctgaatgtggcaggatgactcatgtgtctgaggtcaattcctaggtcatctgggaaccagttggtcttgcaggggcctcagctgagatgagttacttgactgctcatgaagtctcgcccactccagcaagctggactggacttgttcctttggtggcagaagggagaacatttagagggttcagggaatctgtttctttaaagaggacaaaaatatctcataatcaaataaggcttcatgtctattttgctcttttaaaaatgaatcttttttcctctagttctaagttgcaagttgttctattattaatctgaaaggagaatgtgattgaattcagtttc

SEQ ID NO: 51320 - DNA, 511 bp, Homo sapiens
ttttgtttatggcgaaactttcctttgaaactccaactttacaggaagtcctgattagggcagtacctagcctgggaatggctgctcccctagatctgcggctacataatctgcacagtcatgagaagctatgcctgctcaggacttgcgctcttcctccgggaaaggagaatcataacttaaatgatggccgtgtctttcagctctaaatgactagactctcctggtatttctcccttggatactatgattacactttgttctgcagtagttatgacctcaaagcccatggcttatatagaatcagtgagtcacatctggctcactttgtacacatcaacccagttgccacactggctgtgtttctaaaatgccaggtgctattctggcaagcaaatgaagaccttagtggactagttgtttctgccagcagatcattctactatccagctctactgatctctgcaatgctaaggacacatcactacattcctctgtatctaaccatcct

SEQ ID NO: 51321 - DNA, 555 bp, Homo sapiens
taaatacaagttttggtctttatcttgtaaaagcatttggctagggagataaaacatacttagagatatagagtatacctatatctatctattatattatatctatatctagatagaatagcactgcaaaagttctcaatgaatattctagtcacaaagtactgtgggaactcaggaagaggagaaacattgcaatgtgatgacctcatcaaggagatataatttgaattgggctttgactgtttggactttgagaagagagaagaggagagaatgcaccaggcagggagcaatgctttggagactgtagtgaacacaacatattagagagacaataaacagctcaatattactggtgacagaggtcaatggaaactatgggaaccacatctagagagatacttttggagagcctgcagtactgggctaagaaattagactagaatatttacttaatttaccagaattatgtgcccccagattagaggaatgtgatgcaaaaagcatgggtcagattctcaggagaaaaatctcagaagtttcatgaacaaatct

SEQ ID NO: 51322 - DNA, 949 bp, Homo sapiens
tgggagttttaaggacgaggctaagtggcatggagaaagtggtttctatggacagtgtagaagtggaacatcagtcctcacgcagatcacacaaactttaacaccagcatttttctaggtcaccagaatggatagctatccaaaggccctttcctcccaaatgttctgcattgcataagcattaatgtattctcctgtgaatcacagagagactcttggtctccaggtcatggatgaaacaatttcctgccaactttgagagagatttattttgataaagcaaaataatgtaattaaaaaatatatgagcatcatgggggataatggtatccattatatttaactatctaaggactttaggaaaagactctttcaggaccatgcccatgtcacatgatagagcatggcctgctttgcttcatgtatctgttctgtattgcagtgatggggtagatgagtggaaatgaaactaataacatcaaatgttctttccacaaacaccaaaaacataattgaataaattggaacattttgggtctagggttatgccgaattagaatgaagccctagaggatgtgaaagacccctgtacagatgagcaactcaaaaattaaacggtcacatgtgaaaaaaattgacaccaccagcaacatgaggtcatgtttcatcagaaaggcttgaccagctagaatgacaaacaagtctaaaggtgacatggtgcactttgaatgtgtacaagtggaggctgtgttgaaaataacaacatgccagaatgtggcatgagtttgaatcccaactctgccatttattacttgtgcattcttggcatagtcagcttccatttcttctgtagtaaaaactggtaatgtaattgtcaattgggcaagattattataacagttatatagataattcacatatgagaatccctcatgcagtacatggcacg

SEQ ID NO: 51323 - DNA, 1037 bp, Homo sapiens
ctgactgcagaaagagaagcagtaatggtagagaaactctttacccctaagcagttggcattttgtcagtccagagtggggctagttcaataattgttctcccagcataataatccccccgacaggaatagatggaaatgtggcttgttccataaacttaaaaccttgagaatttttattttaaaattatattgatttgtataagatttataaaatgaattgctatttaaaaaattatttatataagatttattacacagcttgttgtgattgagggatctcggggaggagcctcaactgtttctctctaaactcagttcaacttcccattgcttatttttgaaaatgccctatggacactttagtcatcaaatagttgttgaaaccccatgtaaaataaccagaacatttgtatttactttcccaatggattatgtaaggtttccaaaataatgcaaaatatacttggctagcttgttttgtactttgtgaacttcacattaaaacaaaccaacaaaaaccaacagtttttttttaacaatatatgaacctagcacacagatggctttgtcaattagtcactgatatgaaagagctatggaaccaaagtccaaagataatggatctttaaaaacaaacaaacaagacgaccatccagcaagcagtaggattatagtcagaaaagtgcttgtaaaacaagagtgtaaatgagtaaggcctgtgcttggggtcagatggactagggtttcaatactcctctaccttttactagccatgggacctctgacaaattattttcacttgccaacccccactatttataccttttccaagtataaaacaggaaataatggaattataatggcatttttcattcatttactttccacatctgttgggtgcctgttctgtgctacatactcttctggaaccaggcaaatacaatgttaaaaacagactagagtctctgcccttatggaacttaccttttagtgggaatgaagaaaaagataaacataataattaagtaaatgcat

SEQ ID NO: 51324 - DNA, 1053 bp, Homo sapiens
acatagggtccagggctaaactcattctatactcaatatagacttaagaatgagtggattttcagaaggcatttgaaagcacacttgaccctgaatttcattgtcaaatatcaaccaggtgagatctttacggccacttcatacgaaaacactgacaccactaactcttctttagtgtctatgtggagagtctacatggtagtgacagatggtacgaaagtggactggggggttcgatgacttacgggaggcacccagaacaggtgggtgtaattcagcgtgattacaagccacctatgaaagagtgacacatacatttccgtgggaataaacagaaaaaaaatcagtaatgtcagcagagtctgtgtctttcctaatgcccactctaacctaaaggacaggcaagcaggagatggtacaatcaagagccaggagtcacataagcaaggtacacacaccattgctctagaatcagtttccaaacgttatttagcaaccttgtctccagtgtttgctttctctctgggctccaggagtaaaggtctcagtttcgtaactgcaatactgctgcatccagtgttcctgtcagaattccctctggtagcaaggagcatttagtttacaagctttctgtctggggaagttttggctgggttaagctatgcaggtgagcagggcaaaaataactggattcaaagttgagtgaacaattaaaatctaagaatatgtaaagcaaatgaatccatggtggagatatttttccagaagcttccattacttctgtatgtgctatttaaaatccagactcaaggcaaaggcagaaggggatctctttcctatctctgctcattgattccagatgaaatcacaaacatgcaaagtaaaatttcaggatctgtttagtaaccaagttggcatgtggctaatcaagcctagtgtggattttggaaaaagcatatacaatctattcaaaaataacaaacacatgtcaaaaatcaaacaacaacaacaaaaaacagttgcaaagaaaactttatagattctctcttaagc

SEQ ID NO: 51325 - DNA, 710 bp, Homo sapiens
gaaagaaagaaagaaagaaagaaagaaagaaagaaagaaagaaaagaaagaaagaatttttttcctagaacagaatgtgtccaccaggaagaaaattttaggaagccttgagccttctacttaaatgtatttgagtttgcctacgttttatgctgctttgcccaatattagtgtccaaatgaaaggactcttgttgctgattgctgtttgcttttgccttggccgctgaagttttacttggccttgtcagatattgactttgcccttggctgtttcacttgcagcatttttttttttcaaattctgtcaacagactgaaccaatatttctttgcaggaattaaacattaatggattgacagaagtttctggaaaaatctttcacagccaatggacagcatctgttgtagatgagcataaaaccaaagtggacaaaaattcatcttgattttgtcattgttgttgccatttgtttgtcctttagagaaacactctatgcttcaagaatgcatgaagtttttgccaggtaggttgagtgtagaggaagtggtggtcaaatctggaaaggaagattataaatatctcaaaactctattttcccattacaagagtgtgaagagaggaggattaagtcattgactaataataaacatgcaattaagaagaaaaataaacaccatgttagaagaaacaaagagtagaaacagaaca

SEQ ID NO: 51326 - DNA, 1180 bp, Homo sapiens
tctcaccctggacactagctactcattcatttattcattcaacagatatctaagagcctatagatatttgggatgtggatctgtttgctgcttttgtggagtttactgttggttaaagcaataatgacacaattaaatacattagatgcaagtggcagtatgcaaatggctatgaaaaaaatgtaaagggtttgatgagagcttaggctagtgggcctgatttagatggtgcatcaggcaaagtctcttcaaaaaagtgacatttaggctgactcctgagggatgagtatcattttacaagaaatatgggagaaagaatgtcccagacagaaaaaacatggtcccagatggctctcacatgtctggcttaccagttgtccactaggattgcaagggccactgagccgtatttctcacattgtgcaataatctggtctgggcttactcacatagtgggtgtggccgtcagcaagagaggacaaactccaatgtgcaagcacttttcaagtctctacttgcatgacattatctatttctcattggccctagcaagtcaaatagccaagtccagagtcaatgtgagagaatgctacctaagggcatggatgctggcaagtgaggacaaattgggcgccaatcgctgcaggaaaataccatacaagacaagaagggaggtgcttagcccaccctggagaggacgggttggtcttcccagagttaagcagagtcatccaagtgtaacactgaagaatggttaggaattagtcccataggataggaggcctaatggataggggttgttcctatctcctgtggataggagaggaaggaaaatattcccaggatgagcatgctcagaatgttggaagtgaagtcagaaacccatgtaagggaattaaagatgtttggtattatttggtagtagagttaaagtcagaagtgattgggaataaaactggaaaaataaaaaggaaccaggttataaagagccttgtaagtcatgtaaagaagtttgagctgtataccgtacgtaacattatcaaatttatattctagaacagtagtccccaacctttttgacaccagggaccagttttgtggaagacattttttcctatggaccagggtgggggaaggaggggttgagggggaatggtttggggatgaaactgttccacct

SEQ ID NO: 51327 - DNA, 2222 bp, Homo sapiens
tggtctctcccttgatgcctggggattatggggattttgggtggggacacagccaaaccgtatcacccagctttgcagcctgccatacacatacactgagcaccctcccaaggcaaggcccccccttcccgccacaggagaaatacacagataactgtcagtgtacggacaatgggatgaggggtggagggacacccacagtgtctgctatgctgtgttaagaattctgaatcttatctttattaattcccacaagggttctgttgttatacgttgttgctatctccatttcacaactgagactcaaagagactaattaacgtgtccaaagccacacagcagatactggttagcctaattccaccctctatactaagctgcatctgaaggcccagagagagtaagtgacttgggtggagccaccccatacccatccacaccacaatcagaaataaaaagcatcatgacctccggcttgtcaccacactgtgtcttttggtcatctcacactgagctccatgccctccaaatgcaatgtcgtgaatagcttaaccaaaaacttttacatattttttgactcggcaaagcagacaatacatgctgtaagtcaaaacacatgtcatctgtactatacattaagaattggggctgctcttggtacccccagcagcatggaaacaacccggaaggaatctcctcagcagaattagaatgtgctttggatgcagagaagagaagggttacagagcacagattcagccaagtagagatatctcgagggctttgcctttcctggaattctacttacaagttgtagtactggctccacacaatggaactgcaaccgaaacagaatttctaagcagcagcctgagtcagggagatgaatgtttactaagacaaggctggaccctgggcagggatgggcatggagctgttggggcttgtacaagagagtcctgctggaccagaacaaagttgagcagttgtaaaacgaatgagtaaacagtggtggaaaagaactaacattttttatgcagtggctaagtattcagtcaactcccctggacagacttcatatcacacccactgtaaaggtgagtctgtgatgatgagtcatttgaatgggtcacacagctagtaagatcagagtttagatttaacccttcccagtgtgccagactccaaatttcattccattaggcctcatgacctccttcatgtgtttaatgagctcctactgtatactagattaagtaagccacacggtgcatgcctagcagataggacagcaacttgttaaatgtttgtactcagggactagcacagtgcctggccctgagaaaattcctttggggtggcccaggatttcataggggaacaaaacctgcatgcagagggagatgtatgtaactgtcattggagtgttttgtacaaagggtttccaggcatgagtaatcacgtgggggcttccacagagaagctggatctgaaaggaggtatggcaattgctgtgctaaggagagaggaactctcagtagagggacagagacgcatactcaggaatgggcatgacataggagacagcaagcagacggatatgtctggctacagtttgtggtttgcgtaaaggagaagcaggagagaaatgtaggaaggtcagctttgtttatacctatccttgagtgtcaggtcatagactttggaagttttaggaaataacaatgaaattgaacagatgcttcatgtgtgccagacgctgttctcataatctacggcaggatttctcagcctggacatgactgaccttttcagccagataattctctttttgtggcgccctgggcattttggaatgtttggtagcatccctggcctctgcccactagataccaatagaacctttcccccagctatgacaaccaaagctgtctcctgacattgctaaatgtccgctagaaggcaatatcactccctgttgaaagccactgctctacatatattcagtcattccatttgtatgactctgtaaggtagttagtattaactctatttcacaagtgtggaaactgaggcatggagaagctatgtaatgtgcgtaggttcaacaggcttataagcagcacagtcaagaaactctgccagaactgattaatttagagcccatgaccttactcactatgctgtgtttaacatgtcaaaatattacattttaaaagtgc

SEQ ID NO: 51328 - DNA, 358 bp, Homo sapiens
cttgcatgtcatttatgtagttactacaatcgaatattctcacacactttctgtgccaggcaccctagaagaagttcagttgccagattagctctgtccctgaatattgtgttgggacactgatgagtcagcccagtggatagaggaagtattcctggaagccatctcagctacagaacagccagtaaatccgaaagtacacagaagtgacttcaaaccacataaatattaatataccgcactaaacacagaccaaatgtaactccaactcaggttccccctagcaggatgccaagaatgcctgtgaccccttaagcaagagaagcaaatatgacaccctgaggaggtatgaaagtgg

SEQ ID NO: 51329 - DNA, 645 bp, Homo sapiens
tacatatgtatattatacaacatgtatgttaccgtcagtcacacctgatggtcctaaggcagatggtgtagaatgaattgagtgtatcaaaggccccagtcctttgccctccttagaaccacagcattggccatatgaatttatagttcctcccactaacatctttgaaaaaggactgaccttggcactagctctgaccaacagtatattaacaaatgtggcacaagcagaaacattaaaccacacttgagtgattgggcttgcgcccttctgtgctcttgcatcatgtttgggtaagcttggtgaaagatggaaaacactgagtcacccagtcatctcagctgaggccatcctagattagctgacatccagacaacacccagacatgggaatgaacccaatcagtatcaacagaagacacctggccaacaatcctaaacatgtcagcaataaatgcttactgttatatgctgctgaggttggatgggttgttataggacattattgtggcaatatatcattgatccatggtccaaaaatcaaagaaaacactaatcttatggtatcaagtccaagcttatcagcagagaatgcaaagccttcatattctaaccacacacatttctcctccctcttggcccaaga

SEQ ID NO: 51330 - DNA, 586 bp, Homo sapiens
aaaagatagcagttgttctgagtcctcttcttgcccacggagaagagttcacaacggaaatgggaaaggatggaagtgcgtttgtctggggccgctgagtcagccagactcctcccagctcctagtccagtctctcctctcttctccagagaggcacgccctctctgccactttgtgggctgtggaagctgattagcattttgcacacttcagcaaactgagctttggaatttcacttgtcccctcagcaaaatatcaggtggaagaggaacagatttgaatgcaaaggacaattgcataatttgcgtaagtcccaggacagaaacgccacatgactctgctagtttgcttcttctcttttgcccttttccccagcaagcctagaaaaataatcccacagcctagcaactaatcccacacgtgaccttttggcaactgaggatgctttcttcacatgctggaaaactgcgacatagctccaaattaaaatgccttttgcctctcattaccatattaaagagtttgaggttgtgagatgacagtgcacttaaattgtccaggaaaaagaaaaggtcattcttttata

SEQ ID NO: 51331 - DNA, 2440 bp, Homo sapiens
ccaggaggtgaaggctgcagtgagccatgttagcaccactgcactctaccctggatgacagagcaagaccctgtctcaaaaaaaaaaaagaacaaaagagcccaaatgccatataagaatgtctgctcttagtttacagagctttccaaaatacaaaggcttcctttggtatgaaaaattcaacaaatttgtgtaacaaaccataaaattaaatgtatatacttgaaggactgggactgccaaatagattcttcaaaatggctttgcctttttgatttgctgcaccatttttagccaaaactggtgcagtgctctaaatatcccaacaaaattggaatctcaagacctccaaaaggctaatggtgacctccaacttttaataaaagagctgaggaccaagggaagaccaaggggtttgatggattcaagatcataaaagcagcattaattgtctgacccaggggaggaggtcagaaaaggggctgcaaggatcacaccaagaaaggagacaggcccagcatggatgagggggactgtaagcacctcatcatcccttgcgttctctaaccaatgcaccacacttttatctgacatacacgctgggcttggtagtaagctttcacataaagaaaagtctgagtaaacaatttgagtagcactagtcgattccactgagatgatgtaatacttgtatcagattcttcattcccataaatcctggggtgttagtcatataacattgcctgacatattttccactccccaacactcaggggctatctccaaaatgggacagatgttatctggcactcaccctttactggagctctcagtggaaaaattatgcaaaaaaaaagtatttccgtgaacatttactgacttctgactctatgctagaccagagattataagatcatctatccccacaaataacttacagaataatagaagagaaagtgcacaggcaatgtgaacattgctgaatgctgaatcatttagaatgtgtttgcctgcaagtaagagaataccgccccctctccccgcccacacacacacacaaaatgtgacttaggcatcaggggttattactatatctcacatatccaaaaatctgggggagaatgttcccaggttggttcggcagttcaggaatggcagggatccagttcaccacctctatgattctcttggctttcccctcatagcttcaaggtggctgctgtagctccaaccatcacatcctcacaaaactacgtctaatggcagacatgaaaaagatcactcctttgtagtcatggaggaaacttccccaagaattccttggcagatttcccatcttatctctttgagaagaattaaattacatccccagactttagctataaggcaggttgggaaagagaatatcaggtgttttcagcttcggttgagagaggcaaattctgccagcaagtaagcaggaggaggaatggttgtaggtgagtaatcaacatggtctgccgtatatgtcaggggcaatgacagagaggcataaagcaggccatgagagcatggaggaggggcacctgtctcatcaagaggacacttcctggagctggtgacacctgagatgaatattaaagaacaaataggatttagtgagatgaagatcatgatagaaaggatggagtgggccaaggtcccaggtaaagggccaacatgagcaaaagcataggactgtaacagaacacgatgtgggcaccaacttagtgtcactacagcatctaatgacaggaaacgaatattgtgaagtgtcagaggcctggtcacaaaggcctccagggctgtctaccggagcttaaacttgcaacataagccaaagcttgcaaacttggaggctggaggccaaatccaacctccagacatgttctgattggcaggcacttggggtttgcattctgagtatgaatgactggaggcagggcatactccagggctgaacacttggtctccccctttctattatcttacacctggactgtttccctcagttatgccatcagcctgctcccttaaggcttttgagttcacgctcctgaataggctccggagagccattgaaagatcttacacagagcaatggcactacctgttctgtatctcatatcattccttctggcagcatcgggttggagttatgagattggaaataggaagactgagtagaggtatctttttcaggactgttggttgcaagtgtcagaaatcttactcaaacctgcttaaattatttaaaaagatatgttagttccataactttagagtccaggataagtttaagcctcaaatatggctagatccaggggtaacatgatgacaatatgtctctccatcctgctttcccatgttttgactttgttctcagccaggctctctgctaatggagaacatggtccctggc

SEQ ID NO: 51332 - DNA, 2443 bp, Homo sapiens
gatgtctttcacctttatggtgatggaagaaataggaagccctgctagcatctgctacagctgttcattcattcattcattgattcactcaacaaatgattatgaagccaccacctggccaggcaccagtccaggtgttagtgatccagcagtgaacaaaattgacaaaaacctgcttccatgggtaataaatgccccctgacactcgattcctggctctcccaccttcctacagacctgatccatgcacttggcttccagctctttctgggccctacaggcagatgtacccaggataccaggtgccatctctggcagctgaaagtttggttctctggattgttccaaacttcattgcttttgcaagctgcttactcaccacccgacaaagggtgaatagtgaatacagtcacatctttctacgctcaccatctttcttcccttttagaacctagaggaggatagaaaataacaaaattttccccacctgaagctgccagtagaattcccaaaataagattaacttctctagatgactcacctaaaaatctcgccacacttctcttgtgctgctgagaaaacaaccaaaagtagctattatgctggaatgtaggtgaagatcaaaagtggacatcaaacttgccagaagcagagagcaggaagacttgaaaatagagattctggactcagactacccaggttccaatcctggtgtcctcacttaccagctttcaacaccgaaaaggagacgcagatggaaatccaccctgcccaagaagcagcttcccactggaaaatggtaataagagtaataatagcaggtgcatcaaatagctgtgaaaatgagatgcagtcattcattaaagtgctcagcaaggggaccacgtgggcggagggctgaggtgagggtgcattgccatgtggaagttgggtactacagccagaatgcaaaaggataaatccagtgttcactaaataatactgataaattttcttacctaatacactctccttctgacccactcagcctgaacatagagaggcaggaaggtaagatttccctgtccacttcagaaactgaggttagtacaattagttcttcattcttcatgtctgaggcccattggcttcaagaaaatctatctttctcttaaaaacaactcactgtaaccattaggtcaaaattacagctaaagatcgagtttctgcaaaatgtcaaataaaatgtcttaccatttgtgacaaacagctgttgccttcttctccacgatggaatcaaaggatcttatcaccttaaaggaaaacgactaaagcagaattattttccttttaatcttttttcccctccatggaaatttacataagaaggagctgtaatccattcctttctgtgtgtcagaaaatctccactcttgtggtctccatggcagcaactcccaacctgagacagaggctgtttcaccccacagagtgcattggacttttatctggtgagtgcaatcaatgtagacaagcacattggatgactcaaacttgggattatttctgattttgaattccgtgtgtgttttggctctctgtgttggtcaacagtgccagatgaattcaagtctgcctgttactttatgttgtggtgaaatggcctgataagccccctggcgttttgaatgctggctctcgctctacaccgatgatgaagcattttccaggtttctaagggggtgatgcaactgactcactttccgggtcagtggggacttgccctcaagctgttctggcagcggtgggccactctttctcagcttatctttttgtgatgtcctgaaacacactcacctgtggccactgaatagcgttaagcccatggtgggtgagctattgtgaagctgaattagcacacccaaatgggatttaaacccatgatctgccctcgtgagtgggaaccggtggagtgaccgtgtccgacgctctcaaggctaggtcaggcttttctgaaatggccatttaaagcctccatttgtttcatgctgtgaaagactctgtttagagggtgaaaagacaacctgcagactgggagaaaatatttgcaagccaatatctgacaaacattttgcatcttctagaatatataaagaactttcaaaactcaacagtaaaaaaaaattaaacatggctgaaagacatgaactgatatttcaccaaaaaggataggcagatggcaaataagcaagaaaagttgttcaatatcattagtcattaggaaactgcaaattaaaaccacaaaaatatatgcctacacaccacttagaatagctaaaattttaaatagtgataatatcaaatgctggtaaggatgcagagaaactagatctcttatacattgcctgtggacatgtaaaatggtacagccaccatggaaaacagtttggcagtttcttacaaa

SEQ ID NO: 51333 - DNA, 668 bp, Homo sapiens
ggcaaaggagagaaagtgagaaaggcaggccaggcagcagctaaatgtttgaaaccaaggcttttatgtctttgaaacagaatccaggaaaattgctgcaccctctgtagatggctggagggctttttcctctggatggttgcttcgtttgggagcctccaatctcttgtctcacaggttgggagtgtagccctgaagtctctgtgcagcagggtgtgtgtgaatcagtcttgggagctggcacggccctgggcctcgcgtggagtccaggccaggctctgacacactgaggagagttgaaacgagagtgggtgtttgctgacaagcagcttcatgggaacgctctccttggcatttctcagtgctgaatcagggagaaaagttgggcagattgcctgtgaggctcaacacacacacacacacacacacacacacacacagagagagagagagaaagagagaggagggaaggcaggacagagggaggaagaaccaagtcagagttaggagagcaaacaccacacaatgcagtaatggcagtagcaaaattatcacttcctgagggtctcctgggtgctttcagtgaactctccctgggtgtcctggggaaagctttatgcataaagaaacccctgggggaactttatatacatatatatgtgtatata

SEQ ID NO: 51334 - DNA, 781 bp, Homo sapiens
caataagtagttatacttaatgagctgctgttgtcaagtattactacagagtctcggcttctttattctctcccctggccattacacacaatcttccactgccaccccctcctatcttaccttcagccctcagagttccatcaccttgatgattagacgttggctcccagccttcaccctgacactagggcaactccagcctgcagagcccacttcctgggagaaagcattggaacgcccgggactccttgaacgtccgtccggtcgtgaacttcagccactagggggcagcctcaccctccagcctcgggaagctgagccggtcctatggggttttttccctcttctgatcctgcagtctgagggcccaggatttgggaagcccccgctggtcccactgtctacgggtctcagccccactgtggccactcacctgttcatattccccccttccctcctaagtgggaagtaccccatcccccaaccactttgagcagacactggtggcggaacctccccagctcagtgtaacctctcaacctgcgcgagtggtttcataattcatgcctgcccatcagcagacagatttagcctgctgcctgctgagtctgaaaatactgaatattaaaatatcccagacgctcgcccttctaacgccctcgcctctctcggattcatatgcagttggctgcacaaacaattccagggacacacatcaatttgtcgattaagtagggtttgagcacccgtatgtgtaactttcatcaaaacagggaaaggc

SEQ ID NO: 51335 - DNA, 707 bp, Homo sapiens
agtggaaggggagttcctgatcacactctacacagcccttccagcagagacaacctgaggagcctcctctctgggggaatgtttttttgtttgtgtgtgtttgtttgtttgtttgtttgttttgttttgagacggagtttcgctcttgttgcccaggctggagtgcagcggcacgatctcagctcactgcaacctctgcctcctgggttcaagaggttctcctgtctcagcctcccgagtagctgggactacaggtgcccgccaccatgcccggctaattgggagaatgtttttcacaagccacgtttagtcccaagtacacaagaaggccttccatgccgttgcaggcgccactcacttaaccattaaccaagctggccctggccacactgggaaaccgacaaaggttatctctggcattattgcatcaccttctcaccccttgccctggcttcctgggaccttacaccaacccctagtctgctgggactagagtcccagccttaccacatctccttctccttcccagagcattgcttttatccttctgtgtccagtcagcatttgccatttggggttctatggccttgaagttaataataataatagctaacatattaatataatagctaatgtatattgtgtgcttacattgataggtttatgtaatcctcacaaccactctataagttgagtgaaggtattag

SEQ ID NO: 51336 - DNA, 796 bp, Homo sapiens
gggagcaaattcaagcactgggaccaaagtttcctgcattggacatggtcatgacaactgatattggtaagatttaagaggctgttgtgatcttgccatcagctctgccattctaccattctgggactctttatgataataacagcaaaggatgatttcagactccaggtaacagacaagctgatggtgttgcagatgcaatgttggcactctccaggcaagcccagtgttcggtgtataaatagaaggccgaggtcatcaggaagcatgccggggctgaggtcatcctcccctgacaccatcatggcaggccccaggcgagtgttgggtccacatctgctccccacaaccagcctgagtcaggagaacatgataggtggtgagcgggaagccagcaagttgactggagaatatcacctgggaaaaaggaaaagccagcaggatgattcaaaaatggcaggcaactatgtactgtgggccaggtgttgctttaagctctttatattaattgcttcatttaactctcataatcagcatggctactattatctccattttatagatgaggacaaagaaggggggtagtaatttgcccaaggcagtacactgaagagtcaggcttccattccaggaggtgaatcaagagctcctaaatttaaccaccgggctttactctatctgtgttctagccctcagggagaagcgaagactgcgagtcattaaataacaatgtttaggccactttgttatttcccctcaaaacctccagccatagaaatcttttgtctacaagaca

SEQ ID NO: 51337 - DNA, 1488 bp, Homo sapiens
aatggaattgagcattttcgacaggtagtgaatgagttgaaaaaagaaacaagagccctacactcagccccagctgggatgtgctaactgcctttccagccctccggggagccatctcccagctgaaaacctggcctgccgaggagtagtcacccaccctggcagctcctgagttccatcctgggaggggattgagaggggctgactggagtatggtgctatgtagctaatccccagttgcgctgggtcctcagaaactctccaattaacacacggggccatgaagttcttctcctcacaagtgctcccaaggagatgaattttaattcactttcctttcaagagtaactgtgttggcaagcaacattttgtcacgggaggatgagcagaaggtgtgttaaaggcaacaggatgatgttaaatgtttgctccacaatgtttaggaataagggaagctttttttaaattaagtgccttagaactggagggagggaggaggggcatggttggaagttttcacatgaaccaacaacagatgttctgtctacagtccggggagtgtgaactaccacggaggctacgtggagcgcgtggcatctgtgtttggaaagcttcataaccacctgctgtgagcgggacatgcttcctcagcatctgagttagggtcaaggggtcaacctgaactgataagccccagtgaacatttctttcaggctgggcttgaaacctcagagggccccatgactaagcgctggtcctgtgtgtgctgagtcagctcagccatcctcctgccaaggggcacacgtcccaaggcaacatgaagtttcctctttcgagtgagtccatttggatcaaagtcttcagtaaatggagaaacaggaggtactgccacagcaaactcaagctggtgctctgtaaatggtggaagtgtagaaaccccgagctggtccatccttgtctttcctgagtatgaggtggaaaaacggaagcccaggaagttgaaatggattgcttgaggacacacagcaggccacatctgctgaatccttcttggggctcttttcacatgtcctactcaaagtttcaaactttcatggaactttccaagctcaaacgacaagcttggacaccctgtgtcaatgctgattggcatgtttccttgattgctctaaaagggatgtgaattatgaccctttaaagatccagattatgccaaaagcaggccttccagccaggatgtccctgaagtgcccagttccctccctaagagcaaatgaacatcctttataaggcactgctatagcataatcaccatcagagaggctcaaagtgcttatggtaatcctagaaaaatggctttaaaatcccattgtttagagcttctgcctgcaagatacaactaaaaaccctgactattatatgcaaaacaaatgttaaaagactcaagcgtggagagaaggaagtgtaggacctgaggaacgacgacca

SEQ ID NO: 51338 - DNA, 3976 bp, Homo sapiens
ttgggaggagatcaggcagcggtaaattctgatgttgatggcaagtaaattaggttcttagccggtaccaaatgaggctgagaaagatgtggcccaagctggattacagtcatcaagaagttaacagaatcctgtaagagcccctccaggtcgcctttcaggtccgcgagcatcacgcaagagactccttcccaggatagaatcttgttttatgggcggttaaaatgcaaacaaacagaccctacatcagcaataaccgaacaaacaggtgcaggccattaagaaagttttgcatatgagctgttttaatttttgttgcaaaggatttctggggagtcaaggggtatgtcagaaattagagccctagggcagaacttacaaaaaccttttagctacttccttctccccggcctcggaaatgaaaaagccaaaaggtcacccagcgcatccgccacccagtcagccccaaggccagccgtcctcaccccagtccgggtcctcgccattggcctctccgctgcacacggccacctgttgatgccctcgcgcccacagccgagttgcaaacggccgctagagttcgttctaattccccagagcagagctgcccgggaagccccgacgcgacgcgcctgctaatctgcagggcgggcggggactccgcagagcctcccagccccaggctccctttgttttctcgctgcgctcgaagcttctaaactagcccccagaccgcatcccctcgtccccgcccgggagctgcccaagagtccacaggccagcccagggggaaacaaggtacatctgggcaggaatgcgcggcgcagacaggttgccgcctgagatcccgaagtgtacccagatcccgaattccttagagctctttagccgagcactgtggcaggagcgcggcgcccggaatacaagttcatggttccgagccggcgggcgaagggcagcgcgatcccccgccacctttgctctaaggcgcctaggggaacctgggggctgccgcggtgagagctccgctcccactgggaacattggagtcccagttgcgaaagcgacccgcctagcttccgagggacttctctgcgagcaccgcaggcgtgtgcatttcttcgaatctgagaattccagcgaactcgggctctaccagagtttaagtcggcccctggggcgtctgtttgtttattggctcttaagggaaaaaagtttgaagatctttaaccagcctcagacctggcgcgggcggaaatcccggaatctccccaagcaaaagtgatataacttcaagtcgttatataagtggggggctccttcttcccctccctacgccgagccttctcattatcattccgggagtaaaatgtgtctcgctcaacatagttttaaaatcgttattattattttcctgagcctgaagccgggccaaggcgcaggcagcgcccagggtgcgtggtggccccacccgcgcacagtcccacgcaaagggtcccggggcccgggtaccgccagagccgggcctgcaagcgcgcccttcggtcccacggtccgccactccacgtggtcaagatcaacagtttgttgagctcatcagtgacaccttgaacttttcataaagaaaatgggtattgcacggagacggtttggccgcggccgccgcgcggggtcgtgcttaatattcaatgatctcgctcgcgcctccccctcctcttctcgcagaaattccaccgagtccgttactgggctcagacttttaagttaatttactgcccccctaccttggccagtaaccagcgcctttagggctagcctcccccccagctcctgcctgaaaaatgacatttcgccggtgtctccggagggggctgaatttcactttgtaactttctgcggaacccgagcccgggtggcagctcgggtggtggtatcgtatgcaaatacgcatgctgacgttacagatcatgtgggttttggcgtagattccccactgatcgaggcattttttttccctttttttttcctttttttttttcttttaaaaattttggccatcgttctccgtacgggggctttttctgtctgtctgtctggctggcaggctggctttccccctctttcccacggagcccgagccgggcgcccggtggggagtggggagtgggtggggggagccagcagagttccattttggaacgcccgtgccgcgtctccgcgttcccagcccgggtccccgcgttcacagccccagcgcaggtaagaaacttcgcctcggcgcggagccccccagccggcgccgccggccccaaaccccgcacgccgggcgccggccactccagcccaactttcccaccgccgccgtcgccgccgcggctcccgaaaatgtgttgttaatgggacttggccgggtttgtgattggaaggggggtacggaagggggggggtgtgcaggctctttttgcgggtgggaggaaatgagcggatacagagagggaagaagattttttttttaagagttttgattacaagtttggataaatgggagccagagcgaggaggaggaggaggaggaggaaaaacatgtctacgtttccctatgtcgacataagccacaaaaaaatatggcgtccgctttcgacagggcgttacgtagacccgactgtttttatttatttatttcgtggccgtctccctcccttcttggccaaactgcggcgctttgtgcaaacggggcaggtcccgcggggactccaccgggacgtggccccgtctccgcgcgttttggcaggcggggggctgcgtgtgtctgctcccctccctccccctctcccctcgctcccctctcccggtgacgattcgccgtaatgtggtggcaggaagcatgacgccgtgggccgaggctgcctctgctctcgtcgctcccggcggctgcaggcagcgggcgcgcagcgcgggcggcagccgagctacctggcgggggcagggccggagcgcggcgctgtcctcacccccgctcaggtgcagggggagtccgcgcggggcggggggccgagggcggccgcgggacccccggccctgctgtccgctgccagctggccggagcctctgccagcccgagcccacgttcgcccccctgaacggcagctggcgcttttcgtctgccccacaagaggttaatctttgttggtgttgcagcttctttgtggcttccccaggacttgtatcctcggctttgcaaacttgcccttttcccagccgctttgcaggaggctgcggagacgaagatgagcggaaagttggaaaccagcaggcatcacaggacggtccctttggcctcgtagctgtgctgagcctgggaggcggaggaggaggtggaggcggcggcggaggagggtttgtcaggctggggagaaaacttgatgaggaagccaaattgtgatttgttcaggtttccacctgattgatagtcttcaaagccagtaggtctctaccttcaactgtttcgcggtggccttttgtttgtctggggcgtggagaaggagagaagtcgatgaataaggactttccctcgacccctccccttttaaagagtggttgctcagcttggccccctgggacactgccttttaggccctggagttcttccccaacctgctctctgatcactttctctctgttaagttaccagatctccaggtctcaggcaggccccgatgagcagaatggagttagaggagaggattccttcccccagcacttcttgaattgcccagacctcccacaattaccctcttaaaaccacacacacacacacttactcactctctcctttatatatggcagaaattaatgcctgtagaagtgaagggggtgaggttctgagagctcttcaagatttgagtcaaaaggtgattttctgtttatgagggcagcgagtttaagcagttcactcccagggcagtaatgtcaaaaa

SEQ ID NO: 51339 - DNA, 559 bp, Homo sapiens
ggcttaacacattaggagtttatttgttattgccataacaattcagggtgtatgtttggcaggtagtctacacagtgattcagggacccaggctccttccctctggtggctttttctccctctagtgctgggagctctccatgcagatggtggatggagaaagagaacaaaaagtgggggatttttataggccaggcctggaattggcccacatcacttccacacacattccactggccagaatgcagtcacgtgatcgtagctaactgcaaggaaggttggaaaatgtaatgtaactgcatgcctgggctaaagagaggaacacggatcctggggagtactcacagtgttagattccagtccaggtcttctgcacacaatgcccgcgtgctttccacaccctccttagcgattcttatcactcttagctcccacaagtcccctttacaggcccttttatcctgccccacctgcccactcactgtgcccagcaccagacctttgcccactcaggatcagttgccgtatgaggcactaggaagaggaatgcattggggag

SEQ ID NO: 51340 - DNA, 1454 bp, Homo sapiens
gtaatcccagcgctttgggaggccgaggtgggtggatcacttgaggtcaggagttcaagaccagcctggccaacatggtaaaaccccatccttctaaaaatacaaaaaaaaaagtagccgggtgtggtggcaggcgcctgtaatcccagctacttgggaggctgaggcaagagaatagcttgaacctgggaggcagaggttgcagtgagccgagattgcgccactgcactccagcctgggtgacagagcgagactccatttcaaaaaaagaaacatcaaaaatgaaaaaatatatatacatatatacaagtgtatatgtacataacatagatatgttggtgcaaaggtaaagcggtttttgcaattacttttcattgcaaaagtgtgctaaaaattagaaataaccaaagcaaagaaaagaaaatggaaaaccggaggtagtagaaggagcccccggaaaagggcaaggagccgtgtggcctggagctgcctggaattgcagtcctgggccttgggctgagaaaggtttttccaggtggtccctgtcttgcttctcccaccctcgcgccgcccccaccacccccatgtctgagtctcttcctgttggtgttgccaccctctgccgcgcttgccggccagggctcatcaggggacagtgtgcagcatgacccaggctgaccagtgtttgcgttgggctctggccagtcggagagctgtactgcagccagcctcctgccgtgggtggtcctggattacttctctcaccccaggttgttccgagggttccaagccacacagcaggagccccctctctaccccttctccaggggtattccctttttaaaagggactaagaggaccaggcagcagtcatctcattcttcagtggggccaagcaactcgggatccacagagctgcctctgcctctgaaaatgcagacagagcctgcagagttcagagtccagaaacacagaaacggcccttgatttttttttttgtttttctttttttaaaattattttaatggacacataattattgtacatatttatggggcacagagtgatatttctatatatgtatacaatatgtaagaatcaagtcagggtaattagcatattcatcacttcaaacatgtacatttctttccgttaggaagattcaaaatcctctctgctagctattcaaaaatatacaaacaattattggggtttctttgttttttgtttttttgtttttttggcgatggagtttcactcccattgcccaggctggagtgcagtggtgcgatcttggctcactgcaacctccgcctcccgggttcaaaacgattctcctgcctcagtctcctgagtagctgggattacaggtatacgctgccacatctggctaatttttgtattcttaatagagacagggtttcaccatgttggtcagtctggtctcgaactcc

SEQ ID NO: 51341 - DNA, 2275 bp, Homo sapiens
acctaatctcagttaataaaggtgagaaatggacatagaaacacctgtttcatgagagtagtgcacacagaaaccagaggagctaggagggggagaggtggcttttccaacatgttgtctgattcagaaccttcccaccaacctacatgtgcaagccaccttcccatttattttaaacaaagaattctgaggctcaggaacctgccagagttcactcagccagtgtctaaaattgactccaaagctccagccaccaccttcgctgcctcctgatttctgtcaacagtttccaactcctgatgattagggatgactttggagaagaggaaaaaattgtgaaatgtcagaaaggtattttccatggttcggcttggttaaaatttttaaggctgctaagcattgcattctggttacaatttaagatccagaagaggtatgccctcacactctgttcagattagctgtccaaatgcagatatttgaatgaatgaatgaacgaacgaattaattaactaattaattaatgagtgaatgaatgaaaatattgttgtcgactgtttccctctctcctgtaccagacccttaccggcagggaccatatatcattaatctctgaatccctagtttagattcagagcagatgctgaataacggtttattgaacgaaccagagaattttaaaagatagttgggatctggtatttcaatccttttgcttgtcctcatttttttcccatcactcattagctccaatggttgacagcagcgagaggagagggattggatacagtttgcttcctgtgtatgaaaagctcaagagaaaggcctgttggagaatctgtcaccagatatttactggtgatgcttctcagggactgcccgttagtctgacttccctcatgcctaacagggagttaactgataccacttccacttacttaattctggagcttctcaccctaggaattctcactgtgctttgggtgacttgtggaggcttagccaccatgaaatccagccccctcattttcagaggaaggatgtaggtcccagggagatgaagtcactagcccagagacattcctaataagtgatttggttcattcatccatcaagtatttgtggaatgtctgcagtgtgccgggctctggaaggcagtgtgcccagcatgtccctgccctcatggagcccttggtctaatgggaaatgaagttttaaccaatctttaatcaaacaaaaatgaaagttgctacactgacatgttctttggtgccgttagagtatagaatatgggaatttgagggtttaaatagcagatttaaggtttaggggacactccctaaagaggtaatggggccaggcacagtggctcatacctgtaatcccagcactttgggaggctgagtcacacagatcacctgaggtcaggacttcgcacaaacctggccaacatggtgaaaccctgtctctactacaaatacaaaaattagcttggtatagtggtgcatgcctgtagtccctgccacttgtggggctgaggcaggagaatcgcttgaacccaggaggtggaggttacagtgagccgagatcgcacaacagcactccaacttggggcacagagcaagactccatctcaaaaataataataaataagtaaataagaagaagaagtaatggatggattgaaaaccaaagggttagaccaacatgcaggagcatgctgggcagagaggaggggaagaatattccagacagaagaaacaacatactcaaggggaactgaaaggtggccatggtgggcatgacttgcctgggttcacacttcacagaagtgcagaggttaaaagccagagcgttaggtggactcacatataatcaaaatttcccttgaaattcctctgtctcaccagtaaaggagatgacatggttcattgtccataaccctagagaaagtttgatgccctctgagctactcaaggaaggagcaaaaggaaaaccaacttgcaaatgtcctgggcattcagacccatctgccctagtggaaaatggaggctggatggtggaaaattctagagcacccacatgcctatacattttactttattctttctataaccttaatacttactgtattagtcagctaaggctgccagaacagaatgtcacaggctgggtcacttaaacaacagaaatttattttctcacagttctggagactagatgttcaagctcaggacaccagcagggttagtttctggtgaggcctctcttcgta

SEQ ID NO: 51342 - DNA, 1686 bp, Homo sapiens
gattgtagtgacagtaacatgagtgtatgcatatgcccaaactcactaaattacatccattatgtgcggctttctgcaaacgagttatacgtcaataaagctagggcaaagagggaaaaaatgcaaccagaaagaaaagacgttgcctacagagaaactacagttaaactgacaggtttgtccgtatcaaaaatagaagccagatgacaatggaacaaaatgtttagcagataacaggcactcggcaaatgagcaataaaccttgctacacctctcaaaaaaaatgttatggagagataatcaatcactctctcagtgtttgttttcctttctcctggagtgcagtgttactcactcccaagtccctagggccctagagaaagttctcctgggaaaattaaagagagacagaaacagaaagctgtcacatgggaaaacaattctaatgtttttgtttctccaatgaggaaagtaacagagaagcagattttgctaaagaattagtacttcttaacattccaggttttccccaagacagaaagggagggtgggaggcagtgggttcctgtcctgggacgtgttcaccgagagcctggacatcacgtggtagaaatgtcccagaggccataaggaaatgcctgtccgatggccttgcagcatcctccagggctctgagaggtactctaggatgaggcactggccctttgctgggtgactgtctctgaccaggtaataggactctgagagaagcccaggggagttagcaagagccacacagcccaaagcactgcaatgctctatagaacagcaatcctgaaatgtggactttgtcaccacccttgggtcacagccactcctctgacagcactatgctcactttccattttccattcattgacaaatgcctgttgagtatgctgcatgggccagactccacagggagcggatgggggggtcagcctgcttgctttgcaccctgtctgtaaccctgccagcagcccgtgggctctgtgcaatggaagtgagactctgggaggttaagtaaccaacctcagcacgtagccaggaagtggcagatcctggatcccagctttctccaactccacagctctttccaccccatcctgcagtcctgtgctgacccaacgttctttagccgggttgggagaaagaacatcggtagctgtcttcccgccttgggccttgtctcctaggatctggaagtgttcagggggacatccaatcagtggcagcctccctcccaaaggtggtggaagtccccatttgctggggaaaaccctgtttcttggaaagcaccggcagaggctggccgtgggctactgtgccaacccagggagtgcatgtggctctgcctgggatcagcaataaggctcgtggtcctcactgggtgccccagccccctacctttgaagccaccatgctctcttcaattgctacctagctctgtgcatggagaggctgtgcatgacctggacccaaaataggtacagggaggagcaattaagaatcaggaggctctgaagttggactggccaaggtggagtcgggcttcaccactcactggttacctaatgttaagcacaacatttaatctctctaagcctccatttcttcgctatgaagtgggtctgccaatcacctgccagtcactgtaaggagtagatg

SEQ ID NO: 51343 - DNA, 1689 bp, Homo sapiens
actcccagcctgttgtgaccttctcagtacaacacgtcaggaggtaccacatgtcagtttgtcctattattgatgatgttgatcttggctgtttggtggaagtggtttctgtcgtatttctccaatgtaaagacacctctttttctcctctgtaaatgatcagtcatctgtggcagctttgagactatgtaaacatcctgttccccaacatttcacccaatggttttggcacccactgatgatgcttgcctgaatcattagtacttcgatggctgcagaacagtgattttctagcttaatctttccttctacatatattggttggaaatgggccttccaaagtgtttgcaaataagatttaacgagcctaaagtctggagacggtgggattgcctggttggatatgaagatggataacatcttcatatcaataggtatgaagattattttttataaaaacggcatcctgccatgctcactgttttataacctgctcctttcatttaatgagacctttccattgtataaacaggccatgatttgtttaaccaatcccttacaggcagacacacaagtctttttcaattttcttgctactgtaatctttatttattcttcttttcccatttatctgattgtttccttaggataaattggagagataaatttgacttccaagatcaaagccaaatcagaaggattcaagtcctgcttgagtcataggcagcagtgttggacagcctcttgtttttccttatccgtgtcttattcctgcagccagaatgaagcttgttaggagactgcctccctgcctgactgagctgactgtgtaccaagcgtgaaagccaggtttcaactaatgactcacaccaactattgccaataaaaatgatgtaagactccaggtaggcacattgacattttctagacatgaatgttagagcccacgtggtccaatatcctgtctccaagaagccagaaagaaaaaaaaacatgaagaatggaaggatttagaagccactccgcctagggatagggaaggagatggcccggagatgctgcacagggttagacagcgcgatggggtaatacaaacacaaactttgcaggcaggtgattcaaatcctgtaatttggagcaagtgacttcacctctttcagccttggttttctcgagtgtaaaatgggaagataatgcctacatcatagagttttgaattggataacaagtcccgtggctgggcgcagtggcttacgcctgtaatcccaacactttgggaagccaaggtgagtggatcacctgaggtcaggagttcgagaccagcctggccaacatggtgaaaccccatctctactaaaaatacaaaaattagccaggcatgggcgcctgtaatcccagctactcgggaggctgagacagaattgcttgaacccaggaggtggaggttgtagtaagccaagatggtgccactgcactacagcctggatgaagagtgagactgcatctaaaaatatatatatattttatatttatatatatattatatatgtatattatatataatatataaaaatatgttatataatatatatgttatatataacatagatatgttatataacatagagatgttatatgttatatataacatagagatgttatatataacatagagatgttatatgttat

SEQ ID NO: 51344 - DNA, 2153 bp, Homo sapiens
cttagaacaaagttaatatgctatgatattatcctcagatcctaaagaaattgaggctcagacaggataaataacttgcctaagggtacacaactagcaggggactgagccaggccttgagaccatgattcaactacttgaaatctaacagcctttctactcgaatagaaaaggaaaaacaatttgctatgattgatttggaagaaatcaccttcaaaaatgttttgctacatacttatttttttcgtagatattatgcaaaggagttaaacaaaacagcttagaactatccttgactcaacgaaatagaaactgaaactgaagctgtctacaaaatgggggtaacacttatctcaggatgactgtcagagttcagtgacatgacctcagggaagttgtaacagggtgatgttattttgtccaaagaaatgaagaaatatagccatgcaggcggccctgggagacataaccttagaaaacacaaaggcagcaggaattgccacctcttgtgtagttaatcaacgattaatatgaagacatttcattattgtgaactatttgattgatgaacataaatctgagggactcagaatagggagaaatcgtagacaacagtataatgagtcttaacacacacctgtttcaacctatccaaactaaagaaataacattataaacctcagcgttctaaaccaacaagctacacacaagaatctagagctgaggaggaaaaataacttgtcacttccaacatgagcacacaattctaaatcaatcactcccccatttttgtaagttgtgaaagattcagcttctaaggaaaaaaggaactttctagcagaactctgctaaagcacaccgcacactgtccgtgcacagcagcctctcaaatgcagtttttccttgactgcttcatttgcaaatgagttcctccaggtgggtctgaaagttacatgtgtccaaaataggcaagaatcagagtaacaggaagaaaagacaaggtacagctgttggtcttttcacacctgggcagtacactgtcctgcctcctgctggcagctgagaagaaataatacagggaagatgacaaaattgtggaagatgtgacaagaacgattactctttttaatcagttcaccacttttaaccttatacacccgcagcctgttaggcttatttacattgcttctttacaatgtgcttatttacatcgtgtagtcactagtgtcactacacaagtgaggattttgctaacagggacaacaagccggttttgaccaggtccttctcacacattaatatgccaccattgctccccatgaccacacattacccaacaagccaccagggacaaagtacacaacattctctcagccaacaaatatttagtaaagtaataaacacagaacagtatgcaattccagctgcactccagagtcatgtttttatatccaactgctcccttggcctcgccacatggatgcctgaaaagcatctcaagacttagcacagccaaaacctaactcttcatccataccagcccccactcccaacccaggtatccctgaccattccccatctcagtcaagggctccgccatccactcagctgctcctgtgaaaacagtagtatctttcagtcctgctcgcttcacccattcactctttatatccattcggctgtaatctcgtcccctctgccaagtctatgcccttttctctatcttcacagccacactgatccaaaccaccatctctctggcctcctaactggattcatctctctgatctcatcacctagcccttcctccttcaaccccctccatacacacacaaagtccactccacagaatagtcggggcaatctgtcagtcctttgttcacaaggctccaaagacttcatagtgccctcaaaataaagttcaaacctcttaacatgacctacaaggctcaactatgatctagctttaacccacctttccatcttagctttactacacccagccctggctatctccctgctgtcatctactaatcctcaccctacagctgaccctgtgccagctggcaacccagtcttcttcctgttcccagctcctacttctgagcctttcacttactagtccttcctggaaggttgtctccagagccaga

SEQ ID NO: 51345 - DNA, 2027 bp, Homo sapiens
taacacccagtgaagacagggaaagacaagaaaatgttatccataggccaagtaaagggctgaaattaatgccagatcttgctatctgacctgccactgattgaagttttaaatcagaaattggtgaatacagataaccttcagaaaactggcactctcttgacagaaatgttactctggactgtttccttcatgcttaagaaaataacaaggccttccatttctggacaaatgtactctttgcccattccttcgtacattctattactacgtgggggacactaaattaggtctagagggaaatgcagaacaatacactcgttctttgtatctctgactttaaatcactcctataggaaaaccaaaacaaaaaaactccataaacgtgaaaggaactcagctataagttggtgaagttgacacctacaggccacccacgtgggtgacagagggaggtcagagggcaatgctccaggcggacctaatcgccagcgtccaacagattgacaactaccaacgactaatctcactgcttccttcactgagtgcgaagagcgggaagcacaatctcactataccagtgaagtcaacccctccccaccaggccagcccacaactccagctatccagcaccccgctccagatcccagagcctccccgggcccaaaggaccccgccctaaaccgccggcgccggacccactacaaatcccagcaggcaccgcgcgcccgcaacatgccagcctacgcttagccgccgctgggcctcctggggcctgtagtctccacgccccccgtctccggtaagtacctgaaagcgataaaggaaggcttcgggccagaggaagaggtaggccgggctgatgaggccgagtttgccgaccaagggcacggcgacggtggcggcgaaccaatagcgcgtgatcgccgggatgctcctgaaccagtctccgatgtccgacatcttcgacccacaggtagccaagatgcacaagaccgcccgactccccgtgccgaccccctcacgacgcggccggctccgcgactgttaggtgtctaggtggaagccgccgaagccgcgatgcagaaggcggagacgggcggacgtggcgccaccgaattcggaccagcgaggcagccttctgaggcgaaacttccccttccggcgaccgcggacgacgtgaccagaagtcccgccgcttaaagggtaagcgccgattttaccgcccggccgaggctcggcgtcctggggggcggagccaggtagagcgactacacgactggtgggaaaacagtggttgcctggatcaacggcaaacgctccggccagtggcgaggccaaatgccattcacctagttctcagagttttaatgcggctgggtccacctggagggtatttaaaggggacgaaggcaaacgaagtgtctagttcctcgtctgcttactcattccacaagtgtttgttgggcacagttctagacactgggcagctgcggctgtcagcgctgtcgtggtaccctctctcctgatcttaacatcctcattgggataatttataaacaaatagataatgaagtaagataatctcagagagtgattagaaaaataggaaaatgaaatgagatgatgaggtggagtgacggggtgggggtgcggcagtgtgaggacagatggctaccttaggtatgaactgggccagccaggcaagagatctgggggaagaattttccatgcacagagaaaagccgctctaactaggttggaatgttggaggaactaaaagccaaaatgatccatcttgtctaattcaacttgtataagaaggaatctttaagaaaagatactggccaggcgcggtggctcacgcctgtaatcccagcactttgggaggccgaggcgggcggatcacgaggtcaggagttcgagaccagcctggccaacatgatgaaaccccgtctctactaaaaatacaaaaattagccgggcatggtggagggcgcctgtagtcccagctacttgggaggctg

SEQ ID NO: 51346 - DNA, 2345 bp, Homo sapiens
aacagacagtactcttccaaagtctatagaataaatcagtgatctattgtgcttatcctcttatctttttcttttctcacatggaaagttgcttgcagtatttatcaaacccatcaatataataaaaacaaaaacacttggaaaaaatggtttgtactgctaaggccacacagagaaggaaagaaactgaagagccagttgatgtgatgtttggctgaggaggggtctgttaggtgctgatttcttgctggtcatccttactcctcagggagggtgcccgaggagggatactgcactgccctagaatactttactggacaataaatgcttagttcaatcactttgtcttccacccttacagcaattagaggcattttactcatagtttactggcattttctcatgcttgattgacaacttgtcctctgagctcacaaatgttattgggcacctgcaaatcaaggctaattattcagtcctgtggagacagtcccaacatcttttgacccccacagccttctgcccagggggatctttggaataggtcactacctgcagattataattttacagcctaactgatagaatctttccaagctggtttatactagttcctgcaatagcacaattagatattaatttttctggcacgcagatggcaaattttttttttgacagggagtctcactctgtcgcccaggttggagggcaatggcacaatctcggctcactgaagcctctgcagtgagattgtgattctcctgcctcagcctcctgagtagctgggatcacaggtgcctgccaccacactcagctaagttttctatttttaatggagacagggtttcaccatgttggccaggctggtctcacactcctgaccttaggtgatctgcttgcctcggcctcccaaagtgctgggattaaaggtgtgagccaccacccagactgcaaatatttttttaaacccaactgccaacaactgggagattacaaaattatgccacatcctatatgatggaatattatgtagttctggctatggcccaagtggctctagactgtcttcttagaacagctttagatgtcataaaggctgataattccacccccacctcctctcctggccacgtggaagggctctaaagactcgaaacctgcaagcagggctcattctgtcatgggactgggagcttcaccgtttgggctcctccttcctttagagtggagaaacccttttagaaacctaatctatgtcagcagttttctcattgtatgtgggcatgatcttgctgcctgtcaacatcaacgtcacatttcttcctctcctctgatattgtactattttagctgtaggtgccaaatccttttgattatacatgaaacactacccttggttgctttcatgtatgttttatgagaacacctaagcatgaatatttattaaagcagcttggaacacatctctttgatttttttctgttctgactcatattaaagtggggagagagggaggtacactatgtcatagttcacctgcaatggtttctgccttcttcctccccctcacaaggccaaatagttgagccatttaggcaatggaaagcattgccaagtttgcatcagttagcagcgtgacacatatttctgttttactgatgaaacagaactatttcttttgcaatgccaactttcctacacaatagttccataaatttgtcacctaactgttgcctgacttggtcaaggcttcttcactttttgtggaataacagctcccctactgtgaactatgacgcagtgtacctcccctctcccagttttaatgagtcagtacagaaaaaatcagagttgtgttctaagctgcttaaataaatattcaacttctgcctgcagcctcagactcctctgagtgatcttcccactgcagtcaaagggatgtatttagaaaaaaaggagtttccttagaacctttcaggataagatccaaactccttagaaaggcagactcggtatatatatatacacatacatatatatgtatgtatgtatatatatgtgtatatatctgtatatgtatgtatatgtatgtgtatatatatgtatatgtgtgtatatatatatgtatgtgtgtatatatacatatatatatatgtatattttttttttgaaatgaagttttgctcttgttgcccaggctggagcacaatggcactatctcggctcactgcaacttctgccccccaggttcaagtgattctcctgcctcagcctcccgagtagctgggattacaggcacccgccaccatgcccggctaatttttgtatatttagtagagacgggg

SEQ ID NO: 51347 - DNA, 1246 bp, Homo sapiens
gaacccatcagttctcaatgtatttgtctccttgcttctctgcacttgtttccttgcttctcttagttatttctatacaattccttaatccctaaaagcaatttagaacggaatgcagggaccacaggagaaaatgagttttattgcctctgatgggagcctaaaaccccacgaggctcccaaagggcggaattcccaagccaattcctcgcgtctatgatccacctgcaaaaaactacgattcccagaaggctttgggtccgggggcgggaagactgagctcagaaagaggtggactctaagagaaggtctttggtcgattacattgtccagagagggagtggccgcttgggcggattttgggagggatcagccttccaattggttgttattagaaagggggttggtacggcctgctggtgctggacctaggccgccgcggccggagctcaaatttcccgggccgggagcgctgggcctgccgggaaggcgctgggacggttacccagcgggccgccggcggtcgtgggcaagcttcgccatgcagagcactgacctaggcaacaaggagagcggcaagatatggcaccgcaagccgtccccggccacgcgggacgggtaaaggccgtggcgggagggcgcgggctgtggaggggatggagaccggcgaggaggggacgccgggcgtcaggcagcgttccgggttctggctctgaccttgccccgcatccctgggttggatgacctgcggtggaacagatggctccggacgccagggtccgcagagatccccttctgagttctgggagcgggggtctggtccgggacagcgcggagcaggaggaggccggtggttctcagacctgggaacttgcggcttttgctgtgtaccgggactctcctgcttttatgatcacggtatcccgctagtgtccctggcacgtagtaggtgctcagtgagtatttaacagttgcagctggagcagaactccaggaggagatgcggggtggaagagcaggacaattctgcctcttccaaaggctgcagtttatccatccttaaatccttggatgtgtttagacgcacaagcattcatcaactatttgttgagctcctactgtgtgccaagcacgcctctaagcgctggggacggcgatggaacaaaacacacttccggttctctggagtttacatatcggcgtgtatgtaggggctggggcgttcattatgcattgctggggggct

SEQ ID NO: 51348 - DNA, 1770 bp, Homo sapiens
atagctattccatcataatttaattcgctgtttgacctgggcagaagggagatggatctttgagaatggctgagttatcaagaacgtagcaggtgaggaccgcagtagcagcgtctgtttcagatgcagtcatgacacagcttccggcatatggtataccgcagctgcctgcatgagctccctgacacccctctcccagaccctatcatgacctgcatttccggataggttcagtgcccaccgctggcctctctcatcaatgctgcctacccatcccgcagctccctcgccggcccacaccgtgttcccagccactcctctgttgcctccattagacggccttgaactcggccgcgctcgcagcgccgtcctggactgtgaccacccggactcctaccctaacccagagctgtgcgcgacaccccctcctcccccccgcgacggccagtgcccaagggcaagggcaagggcaagggcgagggcaggtcgagcagtcggggactgctccaggcccttacacgtgctctttcctggacactcgggccgcagtgcgagggtggtcttggcgggggtacttatcaggttcacctggtcccaggacactcgtcgcagatatgtcttttccccttgttgtcacccccggactttgacaagcaaacaacgcttctttccggcggggttgtacggacagcaaacaaaattattgtgccccgtgtgaggatcgaactcacgaccttcagattatgagactgacgcgctacctactgcgctaacgaggcacctagtaagggtttccggacggatcattctgaggctatacagctggtctgctgcgcatgcccacttttacttttactgctgctgtaaatcccgtccagaatactcggaattctagttccgctgcgtcctgcccctgtcccgtttgtcaattaacaaacactgtggctggcttgtcaatgcctcactgggtagcgacgacacggagaagggggatttttcctcctattgttgtgaaccgttatttttgtgtagtgcgtacaaaccgtttgcacactcgtgaacgcatgaaacacttatcaggcacccactgtgttcccggccctgtgctgggtgctgcgttcacaggaacaaacccagggtcaaggagttgggcgaagatgcataacgattggaaaacacacacgggcgcgcgcgcgcacacacacacacacacacacacccgctgttacggcccccactgcagaccccagatcccgccagtccccggactcctcccggcgccccaggtttccacggccgcctgcagctcctcggctgaggctgcgcttcgtaggggctgccgggctccgggacgcagtcctgcagtctttttctgactgcaggactgactgcaagactttctgactgcaagactgcaggactgcagtctttttcaccaccattcctgtggccagtgccctgttgcacacttgagctgcttctgattttttcttccttttttttttttttttttttgctgttcaaacaggacttcaggaataaccgtggaagcggtgagttaatgtgttaactgggaagcccgctctcctttccctttcactcccctccccttcctcccagccctttatataagctcatttacctacattattgctaaaggaaactgcgtgcccctatcataaatggaaaacaggtaagggtttttccctaacacatgttcagataaatacatacataactattataataaaaaaaaagactcttccactt

SEQ ID NO: 51349 - DNA, 1571 bp, Homo sapiens
cgggtattttgtagaatgcccctcaattttaacatttggctgacagtttttctgggatgaagacttttcactgtatacctttgaacaggttttttaaaaacatacttgaactatgttaatctataagctatttaaatgttgacgtaccttaatttaaaaggcgaactgtaggaattagaagaaaagggaggagaggaggggagggagaggaagaagggaagttggggaggagaaggagaaagagagagagaaagggggcaggggagcaggaggagcaggaggaggaggaggctacctggaggggctgggctgatcctgccttgggcccactctcccggcgacctcccggctcccagacctggctgagcccggcggccgccaggggacgctgtgcccaggggttgccgccgctgccccgcaggtttcggctttttccaaattagcctagggacacaccgcgccactagccggtacagggtaccaggcccgatccccacgccaaggtggccccatcacccagacctgcccagggaagggaggtagaacaggagttgggggtgggggcggtgcagatatttcgctccgtaaagtgtctccagcttttaaagatgtatgtccccaattttccaagaccttctgagccttcgagtggaatgaaactcgaacggcttcccagctgcggcgatgaggtcccgctcctgcagaatcccggcaggagcggagactcgggaggggaccgctggctgcaggcgccctgctggagtccggaacgagggtggtcagggtcgcctccccacggggtcgcagatgagggagtggggccgcgcagggaggctcctgcaggccgtgacccccaggcctggcccgtagagagtgactgatggcgaggacccgctggggacccgagggcctcagcctgcgcctgcgccggggctccccgaccaagaccttccggcccccaggcctttgcaccggcagctctaggcctgatgtgtcctgccctcaggcccctctgtagagacggggatgtcttccttgccctacgtcagccgggtcggaggtcacctacccccgcgaaaacctgatccccattgccttcatctgcctccttctcccaccctcctccccaggctgaacgcgctccttcctcccagctaagcgccttgccggcggtggctgatttacttccactcctagagcaacccgaagggctcagtgcttcaattgcccctcacttacgaaagcgaaactcaaactcaaggtcaggcgacctgaccaagttcaaacgatcaccgccccccttctcagcagtttccaaatccttttcctcacttgcattccctaaaataatgttgaaaaacttctgggcatctcctctcataatgttaagttgatatcaaaacagtttcattataaacaattgcaaaagacgtaattaccagtgtatgtaaatggtgatttttttaaaatataaaattgagtatatgacatttaaaaatatacccaatgggcccggtgcattggctcacacctgtaatcccaacgctttgggaggccgaggcgggcggatc

SEQ ID NO: 51350 - DNA, 1105 bp, Homo sapiens
cttgaaggcagggactgttgttgattcatttctgcatccccaggttttagtctgatcagacttattttctagttccaaaggcgtgcaggctctgatttctgtaactgagtaaacctttccatggactggcccagagtgggctctaaggccattgccctctctcagtatacttggtggggagacagcgaggccccctagccagaggagaggaaagagtgacaggactcacctcacagggcccttctgacaccttctgactcacctactgacagatgagataagtcggagtgggtgtgttcccagcagccctggggccccaaggaactgtgggcctgctccttccaagttcaggcctagaacaacacagtggttctgcccacagttccaacaggtataacagcaacggggtaatagtatgtgtccccatcaccccaggccagagccatgagaacacagagccatgaggccccctccttcacaaggctactgggtctcatggttcttatctccaggagccaggcacacagggactgggctgtctgagtaccaagcctttgaaatcatatcacgaaaatctatccctgagcctatatctcaaacatagcgtttgtgcctgaaattgcacaattggattgtggcagttgcatcatctggctcatagtttaaggcttagaggtttcactactttagatgacagctcgatggcccaagggagaaagtctgattacaaagtggcatttactgggaggtccaggcccccaaaagggattgatctgggggtcccagaaccaggactccagcaacccccacatacatacacagtaggcactcactgagtgtggaatgaatgcatgatataagtttataagtgaatgcatgatataagtccatcggccttttaatattcaaacatctgcccccacttcacacacacacacacacacacacacagagagagagagagagagagagagagagagagagagagagagagagcaggtcttttcttattgaagggaagcagggaattggtcacagtgagttgattcatccttacaatttgcaagtgactagagccaaagaggggtgtaaaccagaatcttct

SEQ ID NO: 51351 - DNA, 1016 bp, Homo sapiens
aaaaaaaaaagaaaggaaacgcctctctgctcatgggctgtgatcaaaagtataaaagctaaagcatggccaggtgcagtggctcacatctgtaatcccagcactttggcaggccgaggcaagtggatcacaaggtcaggagttcaagaccaggctggccaagatggtgaaaccctgtctctactaaaaatacaaaaaattagccagatgtggtggtgggcacctgtaatcccagctactctggagactgaggcagagaattgctttaacccaggaggcagaggctgcgatgagccgagatcacgccactgcactccagcctgggcgacagagcaaggctgcgtctcaaaaaaaaattttaaaagaaaagaaaaaaaaagctaaagcatgagatgcgcgggtgtgcaggtgtggcggggctctggggcggggcacagtgcaatcggggacacaggtgctggggacctgaggagttgccaggaagtctttggacttgttctttggacttgttcttgttctgttgagcaaagcagcagctatgttgccccatgcagcctgattcagacaacagagggcgactggcttctgagtgcagtgcggccctttgtccctgcgcttgcctcctgtcccgtggcggggctggcgcttggctcggcatcaactgctcacctctctgggggtgtgggtggttcccggcgggaggtgagatttaaacaaagcctcattgctgttcccaggattatccgagccttgtgcggccccgccctgcctcacagagcagggaactcccaaccctgggctgaggccaggcctttgggtggcaagacaggtgggctgggggctgggggctgcgatcctatctttgacgggcccgtttctgcttagctctggcgctgtcccggctcggcgaccattcccccgaccatcctctccctcttgcttcaagttcacctgagcaggagcccaggagcctctagcctgctgctctcgggaggtctatgctgttaccagagttt

SEQ ID NO: 51352 - DNA, 1589 bp, Homo sapiens
gaactcctgacctcgtgatccacccacctcggcctcccaaagtgctgggattacagacatgagtgagccactgtgcccggccaggactgtgagaatatctttccaagatccctctgacccagtgtgaggatggtaggggtgtgagaatataaaggacaaaagatggccaggcgcagtggctcatacctgtaatctcagagccttgggaggctggggcaggcagatcacctgagttcaggagtttgagccagcctggccaacatggtaaaactcccatctctaccacaaatacaaaaattagctgggtgtggtggtgcgtgcctgtaatcccaacaactacttgggaggctgaggcacgagaatcgcttgaacctgggagggggaggttgtagggagccgagatcgtgccattggactatagcctgggcaacagagcaagactccacctcaaaaaaaaaaaaaaaaaaaagactcttacccgctcagacatccagcatagattccccttgaggagcaaatgttgaagacaggccttttgagagtggaagaggcaagaaatttcccttaggtcccaccccatgcacctggagtgcagtcacatctgtggtgcacatttgctcaccttctaagtgactcactcactgttaagggtagtgatgtctgaattggcaggcctgaaggtttttctttagtgtaatcattgctcaattaccttcaccatctgtgctggaaatgattgtgatgactttgtgtgatgaaacccagaggtgcccagtattcctgggtgtcctttcccaccctttattacagcagaggcatcagagttcaagaggccaggttctcacttgcgtcaacacactgctgccaggaaggcgaggcggggcggaagtgaggtgtgagtaggatctgtgaagaccacttgggcattcaggatgatgcagacagcaagttggagaggaaagccagaagatgaaacgctcaaagcaagggccaagttggcaagtgggctaggatacagaccagaagccgagaggggttagaggaaaaaaatggggcatttctagggagatcacatggacagaaggaagaggtttagctacagacagaaacaggcagagtgctaggactgcctcagcacagtatcacatctgcagggtattaaccttttgcaaaattaagatgctggccaattcattcagtaattcttccaacaaatatttagtgagatgccaggttattctgccttggggacacaaatatatacaaaacagtcacagtccctgactttaaaaaatttagtggcaaaccatcaggcaaacatggaatacaaaacacaggaataagagtcagtataggactgaaccagcagtaagggagcacagaagtgggaaacctcccaccactggcaggtcagaaagacttccaggaagctacatctaaaccagacctgaaaaatgaatgtgaattagccattggatgggggcggggatgggttgaggtgaaggtcacagtccatttaaaggcgagcagcagtgaaggatggggctctaggtagccagagctgtaccacgaagggcttggcaagccat

SEQ ID NO: 51353 - DNA, 1339 bp, Homo sapiens
aaggtaactttgaaagatcgtatgtgataaggagaaaatgcaactgaaataaccaaaaacacaattcagtaattatcgagtgcctggcatcttgtcagtacaattgtgaggaacgaatgagacagtatatgcgaaggaacccaccacagtgcccggaacacttccgtattttccataaatattagttttgactgatgaactatttacactcatgaaagaataggaagtaatactctactaattcaaaaatattcgcggagtcactattattaataaaaactgttaggcactgccaagggcatcaagaacccatgctggtgcgatcatttagcactccgggtctcaggactttgtgggaatactgacaagtgctttaagtagaagctaaatagagggaagggggccaaagacaaaaatatttggctggaagacgaaatcagaaaagacttcctagaggagatgacatttaagatgtgccttgaaaaacggatataactgaaggactttaaccatcagcgcggggttggtacgggcagggggagctcgccgaagagggaggggagagtgggtttgccggaggtcaccgttttgggaggcctgactgcccagctgtaagagcagtgaagacaaacgggaggtaccggagattgcagggcaggggcgttgagaccagccggcagcagccaggccggccaaatgccaagtgggagtcaagccgcttacaacgcggggattctcgcccatggacccggaatggggcctgggaaagccgcttccccgtggaggaggagggacggcgggggacgcggcgggcgctggagcctgccagggtttgcgttcgcgcggacggaggggccgaggccggggccggggccccgcggagggcgaggcctggggcccgggataaggcgaagaggccccagcttctcacctgcggctcgcagagcttggcgcagtaggacgcgggcggtcctgaccgccgctccggcctctcctcgaacaccgagtcctcgaactcgccgccgaacaaccagcacccggaatccatctcgcgcccgcggcgggggcaacgaggaagcggggcccgccggaaaaggcggggcttccacggcccagagcgcggcacgctgggacttgtagtctttgagggcgacgcggggacgtggccgctgctggttgggagtagtggttgagctgagatgattatctgacccactaactgaccgaaccccaggacggaggttttgacttctctgtgtcaggagatggacagaatgatccttacctgcacgcatcaaaaagcacgctggccccagagtagctgtttaaaactcgcagg

SEQ ID NO: 51354 - DNA, 3613 bp, Homo sapiens
tgtcaaataaggcgtctgaagaggtacttcaacaaaaaagattcattgataactgaaatgctatcattttatatcgaaaaggtccacgattatacattttactttgtataaaattagtctgcttagccttaacatgctttgggaaaggagagaaaagctaaaaggaaaaaaatattcatgaaagccctttttcttttatgtcctgttaccgcattattgtcattggcagcactcacatttcttttgcttaaaatcaggagtcagaattgctactttagaaattaaaataatcgatgggtatactagggccaatttccctgttaaaaccaactcctgctcaccttcgctcccgacataaaaacaaatgactttttcagaataatttttcagaaacgaagataattaatgtagcaccatataacacaaattaaagctttcagacaaagactgagaaacaatgaccaacaccagcaaatctaaagtgctcttatatatgtatacacacaacacacacacacaccccaaaccaaatattcactgttcctggggggagactgcttcttcctccctaaccgtgaaccgctgtatattttccaattttgtgattttcctttttctgctatcacattaacctccaagagaactgcttaagttacatggaatcccaacctaatcacatcacgacttctctctcagcctttacatttttctctcaaatattagctcttcgcatttttttttttttctaatagctgggctgagttgacagaaaagggctgtggaattcctgctctgtccgatatcttccctgtattcctcttttctcatccctagtctctgttctaattcccccgcctgctgtctctcattgacgccttcccagctgctggatccttcactaacctaagctaaggatatcaaatggaatcttttccttctcaggggctatgctctttccttacagttacccacggaggagagaggacaggaaaggtactaaaacaaagaattgccaagtccctttacctccaactttggtgtaaatatataaggaaaggggatctgccagggctcttctttcctgcccttagaccttgttcctctcacacctctccttcccagccttttataccccttgaggtattagtagattgttcactgtgggccctaaggcttggaggattcccatgggtcagcccccacacccccacgcccctaccatcctctttaattaacttctccctaaatcccagggcttcgtcacaatcgtaatatggttcttaaggactcaactcccagtctttcccaaagttgggacatggcctggccccgaaacgggtgcgcatagccttccttgaactggaggtaaagacttctcctgaagggtttgctggggctccaacctcagtcagtgcgctcagctccagcaagagaatctctccttactctcagggagactgggtcccccacgaggcagccacacgcccccggaggacagcgctcctgacctcctctaggactcccaacattactggggtgctccctccggcggcgccctccgctgggaatacgcagtcttcactcctctcaacaatcctaagttgctgggtcctcaccaaggcagggggctgagatgttccctccagagagccccccgcccccaagctctttcggtggcggagacacccaaaaagagcgagggaggctgtgggtctgtctgtccctctgcggcgactacccagccgcgaggcaggccccgtccctccccctcggacgccccacgccgggtccaccccgccacccgccgccgcgagcgggctcagccccaggggtctctgctgtgaggctgccctcctcccgccaggccccgcgctactcgcctttcccgtgccggccgcggactctgcgctccagttcccacccgcagcccagagtctccgggcccgctggtcgcggagccggctcgcgccactacctgcaggggccgccgcgcctctcagcgccacgccgccgccatcttgcatttcaaaccggctgcacttttcagggagtcaactctgacctgtgaaccctaaacccggaaccgctcggcgggcccgcaaaggggcctcagcagctcggtggccccgcggagtgtggggactcagggtgggggtgcgaggagaggcgcgcgccccagcggccgtccgggggcggagggggaagggagagagccggccaaggcggggccctcccgcgcgcgcgtcctccgcgcgcccccaccccgtgcggcgccgagctctccacgcccagaccctgctactccactggggtccgaccccggcccctagtccggggattggcgcaccgcgggaggtagggaggcgccccgcccccctgtcaacagaagccccgccccagactgcggaagctccgccccctgtcaggagacgccccgccttcccagggctcgaaatggccccgccctttgcctgcgaccgctccgcccgctgtggactgaagcctggtcttctctcgggtcagcacagaaggcagccccgccttccttgcgctccgccttcctaatgtcactgctggatcgtgagaggtaagcatgctggcttctactgaaacgccccttgtcatcacacgcccatcccctggggcgacacgacccaggccccgcccctcggggggctgctgcgagtccggccgggagcccagcgccctgacagaagtcgccgcgccccttgtcagcggcagctccacctctcctcgcttcggaccccgctcctccgcgggccgcagctccacccgctgacaccgaaagttcagttcagctgcactcagaaccgccgggcaaggcggagccgccctctgcccctcagccgccctcctccctgcgaaccgccactcgctcttccagaggcttctgtccgagtcgagggcttcacatcccgtcggctttcagggaaccagccccgcagcggggccagcgagggccaggggtttcgggaacactgcccggcgtctccgcccctccctactcactttccctttcccccgcaccgcggtcagaacgtggaggaacagaaccaaagcggagagcggcgactcaccctccagctgctccacacgccgggccttggacgctcgagcgctcctgggccccttgacgttcactccccacccccatcccagtcgcggaccctttgtgcagagctccgctgagccacagtaatcctaaaagcacagcagagctccgctgagccacattaatcctaaaagatgcaattgcttcaagtggaagtctgattttttttttttttttgagacggagtctcgcgttgtcgcttaggctgaagtgaaatggcgcgatctctgctcactgcaacctctgcctcccgggttcaagcgattctcctgcctcagcctcccgagtagttgggattacaggggcccgtcacctaacgccggggtaatttttgtatttttggtagagacagggtttcgccatgttggccaggctggtcttgaacccctgaactcaagtgatccgccagcctcggcctcccaaagtattgggattacaggagtgagccaccgcgcctggccgtggaatctgatcgttgaa

SEQ ID NO: 51355 - DNA, 1117 bp, Homo sapiens
gcctggccaacatggtgaaactccatctctagttaaaaacaaacaaacaaacaagcaaacaaaaccaaaaccagtcaggtgcctgtagtcccacctactcaagagcctgaggcaggagaatcacttgaacctgggaggcagtggctgcactgagccaagattgcaccactacattccagcccgggtgacagagcacagggtccatctcaaaaacaaacaaacaaacaaacttttgagtagttcatctacaggtaaaggcttagtttcttcaaaggctcacagacttttctcataaaggagctcctcccttcataccatgtaggtctatacattttataaaccaggcccctttcagatgctaggaacagaatgactaaagcactatttttctgaaccacccacccctactgtcttctttttgcctgcaggaggaaagcaaccttccaagggttggtaaacttttccttcaattgctatgcactaaatattttaagcttggaagccatacagtctcctctgtcacagctacctaacattatagggtgaaaggagccacatacaaaatgaatgggcatggcagtgttccaaggaaactatttacaaaaatatgcagctggagtttgtcaaccgctgcaaatctgatgaaagctacggtatacgcaagtttaaacattacttcagaggttttgtgtacactctgcgaagactatacctaatcactggaccctagttaagaaccccaggatcaagtaagtaagtatgtagatcgtaccctcatgacacagttactcatatctttctgtctttttctaacaatcttgatcctctggtctttgagcctcaagtagattgaaaacaaagagtaaaaaaaagaatggaaaggaaggaaataaagagatttctatagtcaggcatgctgacaacagtgaaaaagaaacaggaaaagtatatgaaaaaggactcagaaatactgtaggctcttttatataagccttatgcaaacagacactgatgttaccattacgtaaaataatcatcactatttgtaataatgacctgaatgtagggagaggatttttgtacaggaaatcttcttgacagaagacatacaaatggc

SEQ ID NO: 51356 - DNA, 1627 bp, Homo sapiens
ttctttcaagaggaccctccttccttccaaacttcccctatagacactgcttgtaactgcagcatgacggcatagaaagggaacgatttaggaggcaggcaatctgagttccaattttagatctaccccttactgtttacctttttgaatccgtttcttcatctgtcaaagagatagcacaactacgcattctcaaagggttatgacgaggcttggaagcggggggcgtacatgaaatgttggtcttcatccctccacattatgcaacctggtattattcactgcgctgttattacggaactcctctggatcgttaatggaggtcagagaacctgaattacaacctgtctgtccctgtgccccctcccccccaacgtttatggcgcagacagaaagcagtcaggggatgcgtgttgcctccaggttgatgcgaacctagggcaggagcctgggcgatcgatcggccagggagtggggggtcgtgcgggcggccgaacagccgcggcttggccccagaccgcactccgctgtggcgggcttcgatttcctcttgcgtaaaagtaggtggtgaccaaatgcttagtcctctcccggccagcctcagctcagcgatccgacccgcacctccgatcccgagagcttccattttactcgtcctcgaccacacttctcccccgacaactgtcaccctgaccggcgccgcccacccccaggcccctccgagcgccgggctgccggcagtccccccgggaaccgccctgggagcccgcctcaggcccgtactcacgcccgctttggctgtggtcgccgcgggtttcttctgcgccgcgccggccgagcggagccgcctccggccgatgtgctccagactgaggaagtcactggacaggtccaaggagcccgtggccgaggccgcggagtggttgtgcagctccaagctgctgcggagaaccaccatcttctctccctactggcctcggcgtgcgcgaccggagagagatccagctccaggcgctcgcagctctggctcttccgcgctccgaattctggcgccacaagctccgcgccagcggccgcagcgcgcgcgcccagaatccctccgccgtctgtcccgcccacgccaccaccgtagaacagcaggctcgaaactctcctcccatttgtagagcgaaggaggccgggccaacgtggagaggaacacaggccgacagtatagaggacctgagcggagagtcctggggaaaacgctgacttctttttcttcacatagttccggctcgctgagctcggcggaaggagacggtgggagcggtgcgtagcccgtttggaattttggcgcgggacggcggcgggggaagggaggcctctgcgcgctctgattggctggtggggtccggcgtctcctccccacccctgttgacacctgcttgctgcttcccgccatccaggattcaaatgcaaaatgcccagtccttgactggagggaaataaagcacttggcctttgacaggttttgactttgagccttaagaactttttttttttttaaataattgagggcttgacgaaaacaagttaaccaccaaaaagaaagaaaacacaaggagctaaaagcgagccagcagag

SEQ ID NO: 51357 - DNA, 1459 bp, Homo sapiens
tgattaacacaaaaaggataccatatggactctttaaacttttttttttcaaatttactgtatcagggaattaatatatcttttcgagccaatagctacaggccttccaatttaaaagattaagttacaatagagtgagatttggggtgctatccctttcggaaagcgtcctcgatgcggtcatattggaattaacctccactcccctcttctctgggctcccgcagactccaggctgagtgcagaagcgtggattttcacacccaaacctctgttatttcagtgtctcacctggcttctccacagcgcagaagctcagcccctggttggaagagcctccccgcggagattcacagcaaagcgccattcagggcccaactccaagcccaaacctagctcctccccaagccgccgccagagacccctcttctcccaaagctcaccggggccccgcccctgactccgcccaccagagcccggtcctccagtcccgccccatcccgggccccacccaccagccgggctccgcctacccggaagcgcgctgtcctcctcgtcccgggctccgcccaccgggagttcgcgccactcaccccaccccggacccgcccacttcgcttgggctccaccctcccaggaactggcgccgcttgccccgagctccgcctacttcgtcccgggcttcccgcgccgggaactcgtgctgctagtcccgccctggccccgcccaccgcgctactggccccaccacccggaaactgccccggccctctccccccgggctccgcccaccccacgccgggaacccacgcgggccactacaagcccgccctttcctacgtctggtccagtcggtcttcctccggcccgggccctggcccagctagccggccatggaaggtaatggccccgctgctgtccactaccagccggccagccccccgcgggacgcctgcgtctacagcagctgctactggtgagggggcgcgggcgcagcctctgggtctcccaggctcccgggcggcgagtcgcaaccgggccccgcctcttcccggcccctcctcgggggcgctcccggcctctaccggcgggttctacagttttgcgggaggagggagcgggaatggcagctctcgtctcttgagtagagcgtgggctattggatggggttgggaattcgtccggaatcatagggtcgatagtgcattacctgtgcctggcgcttgtcggttggatttgctcagcagatctctgcttcggggccaggaagggtggagctctgaaaatctttgggggttactctgctgaagcctgtggggtttcagactgaggtgaaggtcattttaattttgtaagagaatgaaggcacggagagtttttcatacagcacttgctatatgccacgcgttgttctgggtggtttaggtaaactaaatcactgagcatcacaataaccgta

SEQ ID NO: 51358 - DNA, 961 bp, Homo sapiens
gctagtgacatactgtgtgaccttgggaaagtcacttaacctctctgggccttccttgcctcacctaagaattattttgaggctcaaatgagattgtgtgtgtgttggcagggaagagaatatttcatacaccgaaaggtgaagtgttttgttgctttttttttttttcttttttggaacagagttttgctcttgtcacctaggctggagtgcagtggcacgatctcagctcactgcaacctctgcctctcaggttcaagtgattttcctgcctcagcctcctgagtagctgggactatagacacctgccaccatgcctggctaattttatatttttagtagagacgggttcaccatgttggccaggctgctctcgaattcctgacctcaggtgatctgcctgctttggcctcccaaagtgctgggattacaggtgtgagtcatcgtgcctggccccagatagctcatctaagctcttcatgtgtatgaactcaatcctcaaaacaacaatataaggtagataccattattctcctcatgttacaaattaggaaacgtaggcacagtaaagtaaagtgacttatagaaagccacatagctagtgagtggtggagacaggatttgaatctaggcattcccactccagggcctggctgccatccaattcccagttcacccagttccaagttcatgcccacattctgtaatcagataatgggtcactagcaaggtgctgtctgttgtagggcaggagtgggtcactgagcttccccatggtcgggatgaagtgtccttcacagctgtccacctgaagtaacttaccctgtagttactgcaaataaactttatcaataaatgtcaaacttgttaaaaaggcaaatgtccagaacctccctgagtggttctggtttagtaagcatcccagtcaggtctcagcggcagagaacagaaattgcttgct

SEQ ID NO: 51359 - DNA, 1409 bp, Homo sapiens
gttgcagaggagaatggaaacttttggatcaacggcctaggcaattcagagcacctctgcttccatggcatttgcataacatgtttgtccccgtggagctctttaggagcctgttaaaccacacacagacttttaatttcctgaatgtaattttactttacatattaaaaaaagccacccccaaaccaaactcctttttctccctggcttctgtatcttttccacatgcagggagagatgaggctagctgactgggaggaggaggtggtttgttgcaattagtactggtgatctagttggaagtcaggagctcaccgagtgtctgctgaaagaggcgggaaatcaaaacaccagtagagaccatggccatgggcggtgaccacaccgaatgctgtggtttagctttgccaccaaccagcacgtgacagtcaagagaggagtgaaaatggcacaaagggactggccaaacctttcatttacctccctgaccaacagcaagattcggaaggccaagatgatggtctattaataccctgatcctcacatgaccaacatgaagcagatgaaagaaaacaaaagcctcgggtcggcttttgaagggcagtcagctgtgcactgtgactcatcactgggtaggaggtggggcaaggggttgggaggaaggcagccagagctctgcctgaaatccatccaaaacccagattccatgtgactaccatctcatgagggtgtcagttttaatcttgtcaaaatatgcaccaatcacaaggacaagtaaactctcaacactatgactgtgcactggaggagaaacgaactgtctttggtctgattatcttctctaaggagaaggaggaatatagcagcaaaaatttgtcaactgacagcataacgacatgttaaccattctgtgcttcatcctatctcaagggaaagtcccccctacctttttttttttttttaactgtcagacagctgtggagtcaggagaaagaaccctggaagaggagaagacctggattctctagctgggtgacctttgtaactgtcattcatttagcaagtattttctgagtgtccaccctgtgctagcatcgtggtaggtgacagggacatgatgatgaagacacatgatccctacactcatggagtttgctcttcagcctagagtgtaagtcatttaatccctctgaactcctgattcttcatttctaaaatggaaataaaaagactacttacttcacaggattgctatgagaattaagtaagataaatatgtacaaatccacagtaaataccaaacataaggcatttttattataagatattatttctttccctttaaactccagtctttttgtgaagtttaaagttgacatcaggggttagcaaactttttctgcaaagtg

SEQ ID NO: 51360 - DNA, 1706 bp, Homo sapiens
aagttccattgcaaataggctaatctctgtccccaactgtatctggcccatgaattcagtcttcaagttttaatcaccctggaaagatggttggatatgctaaaatcctacttaactttctgaaaagtaagttacattgcattttgaaatttatataacactttcacacccactgcctttatttttacattttattttttcattctcataaaaatgcttcaatacaggtatggttatcctagatttacagtttagagaagtaaaatgattgatttgcagaaagtactacaaaaaaagaagcttcgaactttgagctggaatataggaggggctgtcctctttccatcactaaattcctgatggaccacagtacacgccccagaagtcgtatctagagtttaatgtctcagtgcactttgtttaaaaattctcattaatatgcaaaacataatatctgggctccaaagcagtttctgagctggtctgtaaacttgaaaactgattgggatcaccaggcagatattttaaaagtagcaatgcctgggtaccaccttcaactaattaaatcggaagctccagaggtgggcttctgtagtctaacaagcttcgaaggtgatttgaatgtgcagccaggactgagaaccactggggtcacagcaggctcactgcagagccattacatgggtgatggtctccgaaaccttctcctggttgacttgatgcccaagactcactcgatcctctgacctctctgtggcctggttagtcagcactcacctactcatggttacaaacttccagtctgactggcttggcctctggaatccttccagttcctcaagggaatttccaaaatgtgttggtcttgaggtatagggtaaactatgttttaaatgtccttccacaagtaggtaagttgctgtttctagagatgtgaaatctttcaaacacatagctagaactgtctttatgtcattggggctgtgtaggggagggagcagggccaatgcatgtagcttgtagccagtgaaaatgatgtagaaatgttatataaacatctttctaagttatagtaaaaaattttctgactctaaacattcgtgaaattttcatgctgagtgataaaaatgataatattttgagatagcagtgttagccatctcttttattacctctgcatgtctcttttttggaagatgacaaccagcatgaacataacagattttcagaaaatgtatttggctctcaaggctttgaatgttttttttgtttttgtttttttcccaaatggcccttaaaatcagtttagctccttagcaaaaccagtaatcattgtagcatttaaacaacattaggtcaaagtagtacgatggggataatatactggcaagctactttgcagagttggtttaaggataagaatgtatgagaagtatactgagttcctaagaaggaaaacctcaaaacacagtggctatcattaaaatgttttaagttcttcataaaaataacatattattcctcaaattacagaggtctctaatagtgatggggaaaaattgttctttgcaaaatagaaatatttttccactatttctgaacctaacaactttgaaagcattcagcagtttctctaagattatttaaagcaaagcgctcatgatgtattttacaattagatactcttagatacgtgttctctgtgc

SEQ ID NO: 51361 - DNA, 1567 bp, Homo sapiens
aggcttttcgcagctgacaggcacccctggaaacggagtgcactctatacaaagcagaccgaccgagagggccaccgaggaaacaggtgcaagagccctgtcctcccagaagcagagctcttgtgggattcatcccctgcccccttccctcctttgcacctctgcagccccaagcctccaccgctcgcaagtccgcccagtaagcggctgccccagggaccatctggccgtcccttcctggttactcatcctcccggccacttcgtggttgcccgtgcctgggcagggcctggaagcgctccaggcgggaccttcgtcggatcccgtcacctgtcgcgtccacagcgcttgggcgctgggagccgggccaccccgcggtgaaggggctcagcccacccgcccgcgcccccacatgggcaaagtgcgcgactccggtgtccttaaagcagggaccactaaagctgtgtgattaagtttgagcgaacgtttggggacacgatccgcgaatgtcatcagactctcagagggaccaggtgttctgtaaggagtcgtgtccacttggagacactgaccttgaacaataagagaaaccgaattccctgtctccggtggtccgaagacctctgcagaaatcgggccccgtagtcccaccctccgggtcagggtctccctcctcagcccgctccagccctgcctgcccctcattcgccgtccctgcgccccccagaccagcccgggtcagtttcgcgggggctggaagttggtagcgggtcccctcacctgctgaggtcgctcacgaaactgccgctcttctcatccaggaagcgcttccagccgtcggccgtcttcacccagttctgcccgggggaccgccagtcctgcccgaggaatggcatggcaccgcgagcggactagacggatggggagacggggccggcctggtgggctcggggacgtgccacccggggcggatgctcggggtgcaggggcccgcgacgggggcggcggggcggcgggaacggcgcggggcaccctgcggggtggcgggcgcggagaggatctcaagcgttgcaggctccgggagtgctgcgcggcagtagctgccgcagtatttatccccgcagccggccgcagctctttgttgccggaagagccgcccgctcttagcccggccccccggcccggaggccacgtggctttgtttatgggctcggcttgttttccgaggcgcctgcggctcacgctcccctcccggttgcacaaccgcgccggtggaaacttgaagcggtgctgccgggccgggtaccccgccgcccctggcacctccgcgcgccctccccgcccccaggacaccgttgtcccagagcgaggcccggcgcttggaaagatgcgccccggtctcctgcagctcccgggctgacggggtgcagggagggggccggaggggcgtctgggtccctgcggggtgggcgtgaggagcagggccagcccccctcctgcccccgagctatcaggatcgacctccgcagccagatcagcctcccgggccgtccgcagagctggggcc

SEQ ID NO: 51362 - DNA, 815 bp, Homo sapiens
cccatctttttatttccctacattgtttggcaccagatgcttgttcatagtaaatgctgagaggacatcaactaaagaaatcaaagagaattctggatcgtcctttggccatggcaatggagaaggaagagcaggtgggagaggactggttttaaaatgagcagacctagagtgaagtcccagttctcactcacagaacaacgttggcaaatcgctggacttctcaacctcagtgtattcatctgtataattggcatatcaacagcagaaggccttgtcccagggccactgcaaggactttatgctctttctgggaagcactctgtaaacagtgaaatgtctagaaatgagagtcgtggactttggccaaagcaatcgggaaaggctggggattcccatagggtggttggcgatgttcttggccttcagacggacattggactcagtcataggctgaaactgctgggtccagatttgcaggtcttttcctccataagctcctcttgtcaccaccttcctttgtcccctccctcccccacctccagtctccctttatgctggctcatcaggcctgtctgaattgccagatgaaatgcaactccatagcctgagttatctagaattacattccaaaaacatctctgcgtttcctcaggggaggaaggaaaacagagaccagggcataagagggcatagagtaccctctagccacattctaccttttcctttgtacaatttggcctatggtttcctaaagaatttcccccaacgattgccagccctgtagatggaatcaggagtctcctattgggtat

SEQ ID NO: 51363 - DNA, 3096 bp, Homo sapiens
caggaagtgctttctgaccccataggtgaagggcgagaaatacctggttactccaaatggcaatggcaagattgaaccctcttgaaaggatagaaccaagggcctgcaattcattccttgatggtgggtagtgatggtagtaggtttgtgtgtgtatgtgttgtgtgtgcatgtgtgtgtgcatgtgtagggaagtagggtgcaatgtacatgccgggaaaagggcatgcctccctttttttgtttttaaagatgttagagttcattatgtaacattttttgtagcaatcactgataggcctgattagatattgtcttttctaatctgaacccctacagaaagataatgtctttttccttctttcttcacatcctcttcccttcccccctccccctcccctcccctctctcccctcccctcccctcccctcccctcccctccccttccttccttccttccttccttccttccttccttccttccttccttccttctttccttccttccttccttccttcctctttccttccttcccttctttttctctttgtttccaaaataaacttcacattttggaatagttttagatttacagcaaagttgaaaagatagtacagaagttcccatacacccctcattcagtttcagttttccctaatgttatcatcttacatttctgttgtactcctttaggttttaggtattcaaccccttgaggactacatccttcttggccccaaacttccctggtattcctcagggaactatgggtggtggtggtcctggcttgaagacttaagagctatgttttctgttggtggtagacatgtctgggcttgtctagaggccaatgaggccagacttctagggagtgtgagcaggagggactgacaagtcccttaggagagtgagagagagtggaggtggagatgcctaaatagttggtatgaagggcagggttggtgttggaaggaaggaggttttgagctcagcagggagtgtctttcgggagcacatgccctctctgatggttacaggatggagctggaatcaagctctgcgaaggacagagcaaaaagcctggagtgctctgtgaagcacactcagtggagcatgggctgaggtgtgggtgaagggatgttgtgcctttgagacacaatgggccaggacaccgtggcctgaggcagggccagaccaccttgtttctggatggagccagagctctggggacatggctgtggcaggagacaaactccaaccaagagcccagaatgtggctttctttagcatgagtgagcatctttttggggacttcctgggaaagagctaggtagaggtggttgtgttagggggtgtaggggcaaaaggtgggatacctttcctcacccatcataagggtcacagcaaatgaccctataataaaagacaggttaacaagagaaaagcataatgaattacttaatcgaagttttaggtgatgtgggaaccttcagaaatgaagacccagggacccagggaaattgcctgtgtttatgcttaggttgatgatgaatggacagccatgtggaagtgtggttggacagaggggtgtgatctaatggtcatggactgagcggggaagcacacaaggcctgcccagattcttcgtggagtctctgtagagtactctttcctcctgggtatggggctggacccgtctggattgaggatcttcaagggagaagggagtgaccttagcagttttacagcttgctttgtgggaaaggggttctagtttctatgacctgccttgggggagaggaattctggtttctaaatgactcactttgtaggagaaagagggggcgggagacaagataactaaagaaggtcagaaagacctttctgctgaggcccttccaatctcctttagttcaaaatactcagtgctttgagggttacaaggcaccatattttgggatattatgttctgagccccaacaggggtcacaagttgcctctcaaattctgtgttggtgctgtccttgggaccctgttgtacccccatggcaagtatggctgggaaaatatgagtgactcttacgtctggatacttggtaaatattgttgactcactgctcctcaccctctcatgtgaaggaaagtccccagagcccagggcccaaagagatgagtttggctttggcctgggctcctcaaatatgagacagcttggcacctgagagatattagtagacaagagtgatctgaccccaggactcttgagctgagaagaggggcttccatagaggaagacgatgctgtgtctcatccaaggaacgatcttgagaagtggggtgattctgtgagtatcaccctcaggaatgaaagcagaactgaagagcttgaagaggcttccagagaccatcccccagggaggagccagtgtcaggagcctaagaactttgtggcattctgtgttctctacgttattgtctgttgcttagtggggtttgtaggcttgtctttgggggcaacaaagggttgggacacaaagtcattctcagaagaaggaaagcctggaaggcaagccgtggggcagcagcatgaaagaaaggaagtccctgggcatgggagggaaaacacccatttagacaaagaagtgaccttgggcttctctttcttggtagaagaagggctgtgtggtctgtagcaagtcagtgagggttggaacccctacatctgctcccagcctattcattccagtgatttctgccattttggtcaaggacaccactgtctcttggtgtcccaggctagaaagccgcgtcatttttgtggtgtgtccttcagtccataatgaacaaacttgtactgagggtcaatgggctgtccataatgaacaaacttgtactgagggtcaatgggctgtgcactgtattgagtactttatatatattttttgcatttaatcctcataataatctcatgagatgtgtttcattgctcttattttacaaatgatgaaatttatgctaactgagatgtagtaatgaacccaaactgaagctaatgtgcctgatgccagccgccacattcttttcatacctcatgct

SEQ ID NO: 51364 - DNA, 408 bp, Homo sapiens
ctccaagccaaaatcacctgacatcatttatggttaaaatgcaggtgctaaatcaagtgaacactgtcctaaatgttgggaactgagggcaaattcttcaaaatcacaggagaaattttagcattttggagtcaggattgaaatagccataaacagaagtattatgttttgctattgtttggttgaaagcaggggtcagcaaactctgacctccaggtcaaatcctgccggcctcctgattttgtaagtaaagttttcctggaacatgcctatctgtttcctcattgtctgtggctacttttgtgttacagcggcaaagttgaatgttgaggcagagactgtgcctcctggaatagcctaaaatatttactatctggctctttatagaaaaactttgccaacccctaa

SEQ ID NO: 51365 - DNA, 2637 bp, Homo sapiens
ctactgggtactaggtactttgcattatttatctttgatgttcacagaaactctgaaatataaagttttttcggttccatattccattttaagcactttctatgtatgtatatatatttaatatctatctatttatctgtctgtctatttagtctaatgcatacatgctgtgtgtataatatggtatctcatcaggattctttgtctgaaagcaaaagaaaccacctctgtccaatgtatacaagaaaggagtttattggaaggatatgggctaagccctagactctaagtgcaagctatagagtcaggcctcagaaagtccaggcagcaatcaacacttagaacttcttcaggaaccactgctgggaccattcagctctaactctttttggtccctgagtaactcctctctggacccagtttcaagggagagtgaaagtctggttgacttagcttagagcatgtgcccttcccttgcctaggggaaagtggggcccaccaagtctgcaagcagtaggggagatgcgggtagttttctaaagcaaaacggaggtgctgttacaaaaagacaggggcatggaaggccagcagggaaaatgatggttgtgtactatgcctaggttctaattccatttttgctactaatttcctgtgtggacttaggtaatttaatttctgtaagcctcagtttactcatatgttaaatggagatagtactgcctgtcctgggtttttgcaaagattaagtaaaaataagtgaaaaattacaggttcactgtccttacctgaaatcttagaaaaaagaagtgtttggatattaagaatttttcagcttttataaaggtaatgagatacacaatacaatgtatattatgcaacaccccattgggatctgattcatcacctcatagtcaaacaatagtatttctgcatcagattcattagtatgtgcctggagtgggataaattaaaactacaaatagttctatgccagtttttgctgtcaggcttggctgccaagtggatttgctgcaagtatgcaaaaagaaacaaataagccaaaaattcggattttggagctgtttggattttgggacaagggattgtagatatatatggtttttatagttccaggttggcttcatcccaaacattagctctttatcttttctagttggtccccgattatcttttttcatttattcagattgaggaggaagagaccaacatggcttccttcactctttggaaacccagagaatggtaggttgaagtgctggaaaagtcagagttccaattagaagatctctcctcttagaatttagctctcatttctgggttggcacctgatagtcatgaccccagaggagaccagtgaatcatccagtcatgaggtttggagatgattcagcaagttcgaagtggtgtcaggagtgcttttggctgaagttctctaaggtactgattacacatccaattatgcaactggcccagaggcccgcattgtggtacaaccttattctcacccaaactaaacatgtgagatggggcctgcacctggtacagcatgatctcttggtagacctcaggcccttgagcccagggaaatggttcctgccacgatggttctctttcttctctttggagaatggaagatggactgaccatcacctctgttcatatttactctttcagcatccttctcttcttctggactaaggtcaaggatgattgggggacccagaaatgattcccatctcatgtcctcttgatgtgttgtcagacttcatggcatgagaggggacttctccaggatgaatcagttcctaatgtccaacacccagtagttagaaactaatttacatggaataagacattgtcctttgttcttgtaggcaatgcagtgtaccaggactaaaagtcatgagcttgggttcaagcctcatttctgttgctgaccatgaacttggccacttcactttatcttttgagcttcatttttatcaactgagttggggagaagaggaggctccattagcttcaatattctacaattatttttgagaatgctatctgtgaactgcttccctttcactctccattcatccaacacacagtctctgctcttagcttatgttgtagtgtgataaggcagaaacattcttaagagaggaaatgggagatagtggtaggtgctgcaatatgctaccatgacaacattagatggtggtcaggaaagaatccttggagggaggtgacatttgagaagaaacctgataatggctcagcaatatttgttgaatgaattgatgaacaagaaggaatcagccatagaaatatgtggaggaagaacgttctaggcagaggcaacaaaaatgtaaagattctgaggtgggaatggctttggcatatttgaacactagaaagagggcagtggagctgaagaacagtgtgtagactgagtgcttggagagaaagtcagacataactgaacaggggctttatagatcatgttaaggagttaggttttatattaagggtgaagggaaaccaatggcagagtaatataatctgatttacccttaaaaatacatcatgcaatgtgatatcacttcttacccgctaaaagggccaaat

SEQ ID NO: 51366 - DNA, 473 bp, Homo sapiens
tttcccatggccacacagcagcgaagagcagagccagggttgaactccaggcacattggctccgaatctgacatcaaaggtcaccacacaaaccattgtccgaattgttttcagtggtggctggtgagttttaaaaagggttctggaagatgggcccctatgatccaatgggggaaggcagactgtaggcaagatgggagagatttgggaaacacttgcaggaagggacacttttctgtgactcaggagacacttttctatgactcactcttcagtggctctctaggttctttcacctcctggctggtggccctgggacaaacttccccttcctcatgcagatagtgcgggcatcctgggtcagccaagctaggagctgacctcttgcttccttgcttcaccccttcagcgatgtccaatccccttcagtgatgtccaatccccttcagtgatgtccagtcggtcaattggat

SEQ ID NO: 51367 - DNA, 1432 bp, Homo sapiens
tgagtggatcacctgaggccaggagttcgagaccagcctggccaacatggcaaaactctgtctctactaaaaatacaaaaattagctgggtcttgtggcatgtacctgtagtcccagctacatgggaggctgaggcaggagaattgtttgagcccaggaggcggaggttgcagtgagccaagatcatgccactgcactccagtctaggcgacagagcaagattctatctccaaaaaaaaaaaaaaaaaaaaaaaagaaagagcccctactgacagaaatacacacagtatatgtttgtgtatgccagacacttgaaatgaatgaatgaatgaaatacttgtgtggaaatgattttgcttttctaattcttttttccttctggctcaatcttttataaagactggttctaatttgaactggttcagtaggattttaaaaacagctgattttgttttccgtgcagtaaaaaaaaattgcttgggttgggttcagagttcagaaaattagtgcagtccatttcggtttatgagtcatattctcctggtccacattactcatagcaaggaatgattcaaaaccagtgccttttccttctggctctgagtctaaaaatgccttaggtctcttttgttctgagctgttcctgttctaagcaatcctaaaatgacacttattggagaccaaaaatcatgaacagaaggagactgacataaaaccccacttgattgtgatgctgaagacagtcatcacactatggagtcggcagcccccgtggaaaccactaactcctctcactcaaatgcttgctgagcagattggccctcccggctgcaggcctgttttccaggaagaggcccaatcccgtcgcaaaagccctgcagactccccagggactggtcaaaagctagcttccttagtttccccattttgtactcatatttctcggatgttctttcttttcccttcccttgtgtggtattaacattgactgtacacattttgggcttgtttaacgttgtttatgttaggaacaaaagacatcagtatttctggtttagtcacaaagaagtcatgggacattctcttcagagccttgggacaattccttgggtaccaggcggcggagatccaaggagcactcagtgacagcctgccttgggcacaaattctgccatccaaaatggaagtacaatcagtccacatgcagggcattacgtgatttgctttgattcttctcatggcctccccacctccccacttttttagagacagaatcttgctctgttgcccaggctggagtgcactagcacaatcatggctcactgtagcatcaaactcctgggctcaagcaattcccctgcctcagtctcccaagtagctgggactacaggttcatatcaccatgcccagctaattgtcttttttttttttt

SEQ ID NO: 51368 - DNA, 1174 bp, Homo sapiens
ttcaactgatttttccaattaaggcagttagtagcatgattcctggtgtcagccagccctggattgaaatgctagttgacatggtttggctctatgtcaccacccaaatctcatcacaaattgtaatcctcatgtgtcaattgtaatccccaggaaagacctggtgggagtgattagatcatggggtctgtgtcccccatgctgttctcgtcacagtgagggagttctcatgagatctgatggttttataaggggctctttccgcttcgctcaccactctttctttcctgctgccacataagacgtgcctcctccccttccaccatgattgtaagtttcctgaggcctccccagccctgcggaactgtgagtcacttaaacctcttttctttataaattacccagtcttggtaattttttaccggtaattatagcagtgtgaaaacagcacttgtaaatgaatttagataggttacttaatgtgtcagtttcctcaactgataattgggagtaatattaaccacatagagctgtggggaggattaagaatgaaattggactactcagtgtcaggcacaaataatcagccaatgaatgacaactatgattattgggccaaagtgtccaggttctcttgacagatccctctatgtctagcaacacgtggctatgagactaaagttttggaacacagaatctattggtgtggaaccaattcacttcagaggtagaccattgatcttgatcttgttggcactttgctcagcttaattgtatttgaagatcagagggaagactcaagtgggtcaaatgtctagagaagaaaacccagttaaaccaggtagcagattagggaattttacccttagttacagtttacaaaagcaagtgaattgtttccttatgactagccttgattagtgaccactaaaaaatgtaggtttgaatttcacaagtcatacatttcccagagaagagcccaaacttatcaagacaatctttggaaaagcagctgatagaggcataatccacaactttaattaacaatgaggctttcaaattgaacacacagaaggaaaattaataaattgtttaattttgtctttcctgtaccttacttgtgtgatgcatatccttctaaatgtgccattacaaatgcatagttttttcatca

SEQ ID NO: 51369 - DNA, 1138 bp, Homo sapiens
tgggagtctgtgtacttgcgtgcttactatgacctatcaatgtgctaacatgattgcatctaatcatgacataatagtccacatagtgtggacttgggagtcagacctactctgttcaattgctgttttgccctttgctggttgtaccaccttgggcaagctgattcacgtctctgagccttagttgtctcatctttaaagtggagatgcacctgtgcatggggtggtgtgcggtgtagatgcattcgtgtttgggatgtagtagcacggtgctggattacggtaagcactcaggtggtggcacgtaggaggtgggatgctgggtgacataggatgtaagggtcatttgtaaactctgaaagtattatcaaaatgcaatgggagtggcatttggactgtttaatatttccagtgcagttcctcagaagccttggctggctgcactctgctcagtaaacatttgacaatggttgcttagtatctgggctgtgagccaggaggggcccccgggaagagccagggagcagagggcagagggctaactgtacactgatctacagagaactgctgtttgagctggcatgaaatgagattaaataccagggccaagattagaaccaggtagttttgcctgggcttgttaagcaggagcaaaatggaggcaggtgaagggtgtgctggagagagcctcagacacacctgattctcctcggtttaggctgttaccattgccactgttggttaatggcaccttgcgccaatattggtgattctgattaagcttgccttgtatagtttttttttcaaaattcctgaaaaatattttaaacatctttactgaggtataattgctgtaaaatatattgtatatttaattatacaatttggtgaatttggacataggcatacactcataatatcatcaccaccatcaaggtaataagtatttcatcagctatgaacgtttcctgtgtccccgtgtgtgtgtgtgtgtgtgtgtgtgtgtgtgtgtgtgtgtgagttaagaacatttaacttgacatcaacccattaaacaaataatactttatatttaaaaatttttgtagcaagagggactcactatgttgcccaggctggtcttgaactcctgggctca

SEQ ID NO: 51370 - DNA, 464 bp, Homo sapiens
gcatatggttctgcaggctgtataggaagcatggtgcttcctttctggagggcctcagggagcttacaattatggaggaaagtgatggagaaccagtatgtctcatggcaagagcaggagcaagagaggaagtgcagaggtgccacacatttctcaacaaccagatcatgtgtgaacgcagagcaagagctctcttatcaccaaagggatggcaccgagccattaatgagggatccacccccatgattcaacacctcctgccaggtccaacatccagtattgagaattacatttcaacaggagatagggaggggacaaacatccaaactatatcaaagggagtcagcttagtttttgttattcagtcaatcctagacagttactggataatgcacttttccactattggtctaagatgccacttttatttaaagctaatttcttatgtaacatagaattaaaat

SEQ ID NO: 51371 - DNA, 2222 bp, Homo sapiens
aagaatttggatcttcttgggaagtggagcccaatgacgtgcagcacaccgcggaagggaagagggcttaccagacctttgctctcccactgcccatgcttctcgctcaacccggtgcgagacctgacttagagattatttctttctccagggccctggacccgtccccgcaaccccccgccccgtctcactggcccgggttccgggctggcctgtggagaacccccgcgagcgcaccgcactccaatgtaaagccagccactgccggcccgcttcccaggtcgcttttctctgaaaaccgaccccagtgcctccggctttacaatttgagtaaactgggtcatcagcaacggcaacgcagacccaagcgactatcgccgttcattcagagactgaaacggggagacgaagcgcgcgggcggggaacgctcacccgggcacctcccggtacctcgtcgtcgccccgccccgcagcctgtagagggcgtggctagaggccagtccgtgccccgcccctccggccgcgcgccagcgggcggaagtgacgtgtgcccagagccatttccggcggcccgaaactaggaagaaacttggagctgttcaggcgatccagcctccaatcgctgctgctcttgtactcggttggcccgggcggcgctgaactgtcgggagcctaggccatggggcagcctgggccttctgcagtgtgaggcgcggggcctcccgcgtcgctccgctgacaggctgcgggcgggcaggcgggaggcgtagtgtgggtcgcggtggcggccccggccgccggccctggccgcggcatcatgaacatagacgtggagttccacatccggcacaactacccctggaacaagttgccggccaacgtgagacaggtacggccggaacctgggaccgggcccctgacggattcggcccgcccagcggtcacctgcttgcctcgctcgcggggcccgagcgggctgctgccggctgactcccttcctttactcctccgtggtcttggggagacggaccttcagcccagggcgaggaggggacggctgtggggccacagggccaggacggggcgatcgctaaatgggatggcatggtgtccacaggactcgactggcgcctttgcccgcaggatacattcagccaggcacctgcgatagagattttaaacacggtccttgacctccggaatttcaggatggtgggaaagggatgggaaacaaatgaatacgatacaggatgatagcagctcatacacacctgcattgtagtatatgtgagagcagagggagggagaaattatcctgggagagttggaaggatttttaaggcaggcacttaaattgggccttggaggacgaataagagttaaataagagggaataaagatttttccagggggagggaaagtcattttacaaagcttggatgagtgaaagaacatgtctcatgagtagcaagtgactgtatcaccagagtttggactgacatgtttggagttgaagttttttgagtgcgcggggctggtagcagatgagcctggaaaagtggtcagggccagattttgaaggtgcttgtgtgctttgttttgttggactttatcctccagacaagatgggtttatcagagatgtttcaacaagagtgacatgaggtttttgaaagttaattctcgatttttttagtctgttttactcaattgtttaatagatatttattgaccacctactaggtgctgtgcgttgctctaggtgcaggtaatttgcaacagtcaacaagacaaagactgccttcatggagcttacattttactaaagaaagacgtaaacaaataaatgaataaatacgtaacatagcagatggttttaagtcttacgaaagtagtgatatgggctacagataacgcactgctgctctggtcatagattgaccttcgcttcctcccattatacttggtcgagagtgaaattcagttttctgttggcactcggcagtggcatttttgggaagtttggaatggtggcggtgatggtatataaggattatttatttatttttatttttattttcatttctttgagacagagtctcctgttgcccaggctggagtgcagtggtgtgatctccgctcactgcaaactctgcttcttgggttcaagcgattctcctgcctcagcctcccgagtagctggtactacaggtgcgcgccac

SEQ ID NO: 51372 - DNA, 574 bp, Homo sapiens
ggggctcccactgactaaggtgggcacaatttgggcatcaaatagccatggtaatgatagtaatggagtacaatccactgaataaaatagaaaactgtgagtctatattgatataaacaagtgctaaactgtgtatttacacagcctaaaagtagctgcctgtgaaatattcgttacaaatgaaaaaagagtaaccttctactgcaggaacctggtggactccttctttaccaaagtaaacatagtaataaggcaaactgagattgtatgccaactgataggatgaaatgagaagattgcatcatcacttcatgatatttctgccaaagatgcatgacctgtatcaagtaatgaagaaataccagacacataaaaattaagagatgttttacaacattagtgacctgtaatcttcaaaaaatgttttgacagcatgaaagtcaaggacaggatgaggaaccattgctaactgaaggagacttgagagatgtgacaacaaaatgcaatgtatgattctggaccaggtcttttggctgttaaggacatcatgggtacacttggagaaacttgaata

SEQ ID NO: 51373 - DNA, 1185 bp, Homo sapiens
accacagggcggctgtggggaggttggatcttactgatgatgatggcatcaggaaaggggttagtgtagaggccgccctcgggctgagagacttgaaaggtgtttgtcaagccgcttgtaacgtgccattgatctactgtgagaccttgggcaagttcattcatctgtttgagccactgtttctccatttctgacaggatgggctgggccaagcagcagcatgagggaagtatggaattgtgaaacagtctggccagtttatctcctttcgccccaggtactatgatttcaacctttgcctcaggtggtttccagtgtaaatccctcagagccgtgcctccaggccccttgcaaggagcctttttcatggccaactggaaacaagccaacatgcacccggtgccctgctcccagcagctgccatctgtgtgcgttggctggtggctcacatgacctcagctgcagctgtgggaggctttgggatcttggctgtccagctgactgcctgctgggggcaggggcatttattctgcgtgacagaaggtaacatctgtggctggagagataaggagaatttccgtctgagtcactggaggaaacaggaaaaagaaaaacctccgactgaggaaagaatcctcaggttgcagcaagagaagctggtgtgccattcttccggcctaaacctggtcagaagcaggcttaggctctcagagtattgcctgggcccggactttgtgcagggccccagcagcccatcgtgagggggaactaagatgtgtgtgccagggactcagagaccattagcgagagaaggcagcgcctcctgctggtgataaatgaaatacagcagagccgtgggctcccgtaggcaccgccaacctggaaatcctccacgtccctttgccaagagaaactgacatgtttctggactcttaaggttcacattttggtctgtgggtagcttataattgatgtgtataattattgtggtgtggtttataaatcgatggcacaccttttttctccttgatctcattgactgtcacagcagcccaatgagatagattttaaagtgtagctagtaagcggtggagccatgatttgaactcaaagtgtgtaatccaaagccccactttcctccctcccactaaatctcattgcctggccctggcttcggagaactca

SEQ ID NO: 51374 - DNA, 666 bp, Homo sapiens
acctctggaattatataaatggattttcactaagtaggtttcaaaattgttattcttttcttatagtgcctttatctctgaagcagaaaaaaagcccaagatgttgaaccaaaccactttagataagaagcgacttacgctctgctggcaggagctggtatgtgaaaatctatttatactttgtggacagagttaaaaataaacctcacggatgaggcataggtcacagaccaaatgaggttgaggtttaaaggtcatacatttttgggatgcagagacaagagtgaaaagggactatttgttaagttggaaagaaatgaacatttattgaaggtttataaggatgaactagaagcccactggtcctacttcctactctgatggagaataggtgacctcttgctcattttcttgaccttcatattttgttaaaggcggtagactcgcttggccctctgactcacaagtcaagagatcaaaagaaataactatgctccttgacttcaggttcctcctattgagaattgtgttaaaatttaaaagcgcttcttgagagcaggtcagtagttgttacccctctgtgtcctgggaacctgcatgtgctaggtgcctaacagttgctcagttcttcttcagtgactggtgactagaattgccagaccaagt

SEQ ID NO: 51375 - DNA, 967 bp, Homo sapiens
tggtatgtgcttggaggaatttttgacctttcacaaatattgggaagacagtttcttcttcctgttctttcacctccttcactgatcctctgtaagccagcagggatgacttagcgaggttggaaaaaggtactgagactgatagcagggtcttttttctgctgctagcctccccttgggatgagtgcattctgccctctgcttctagtgccttgtggcaaaagcacacctaggacaggatttttccggtagcaggtctggatagagacccatttctctttctgtctctgctctgaggatccagtgggtgtgaggcagggattcccctagtacctcactgggtaaatgggagctgctggtctgacctcatggtgtctagttctattgtattttctgagagtttgtctcttctatccattcttaattggatccccttgattggtgaggttgctggagaggctccagccagttccattccccctcaagtagttaatgagggtttactacatgccagcctctgggcttggttatgggcaatcaatatttgttggatgcaagaatgaaaccagaaatgaatgagtcatggcctctgctctcagccagctcagagtccagtgagagggacaaacagttcaacatccaatcatgcgtggaataaccaaggtgtgaaatgcagggaaggaatggagaggtgggagggatgcaattgtcctgatggagttgagggttcaaacaggacaaaggacaatgaaaaggcattttatagatgaaaaagagaagatatctattccaagtgaaagaaccatgatgagtacagtatggaggcataaagtggctcctggtagaaggctaacaaccctctgatcaaaattcctgagcacagtacgaggttgacaaatggggactgccaggcccagaagtccaaactcttatcctttgacatcattctaatttctgtatattaata

SEQ ID NO: 51376 - DNA, 809 bp, Homo sapiens
gagcccaagacaggaggtaacagaagaatggaaaatcaggacagcattgaaatctgatgctgagttgacaagttgctgtcaaatgccaagcacagaggacagcaggaagtgagccaactgcagagagctgagcacctggccagatcatcaggctacctctgtccagacctcagcagtgcccaggccttcacgtagcagtcacaggtcactgcatcctgccaaaaaaaggcagtccattcttcaaggtgtctgtttgagtctagtgtcaaattaccccagattgtcagcaagtgcctgtggccctggcttgccctggtagatgagtcagcccagctgtgaagaaagccctgccgggccctgggaggccaacgcatgccagctgaggcaagaagacagcatcagccctgaagcctgtgtggacaaggagcccactccctaactgaggcctgggacccctaaccccaccccgacttcagatggggctgtgtttccaggactgcctcataccccatttcaaatcaggctactcaacagtgacatttagtaacagaaatcatgaagattcattagatgactcagagaaaaaacaaacaaacactctctccaagaaagagaaattcacaggaaggggccacatccatccagttctgcccttcccgtttctctagctcagtggttctcaaagtgtggtccctggaccagcaggagtgacagatttttgccacgacaccacttcagtaatgttaattaaatatatttccattcttttaagagtcaacatagcttagtgagaagagcagaagctctgg

SEQ ID NO: 51377 - DNA, 927 bp, Homo sapiens
tcattactactttaccatagtcaagcttaatacaagtgtgtgaagagacaggtaagggattttcatccctactttgtggttacagacataagcttcagagaggctgaggggcagacctagaatgacacggctgggagggtgatggcaagaggagaagctcagccacccacccggcatcagcttccattcctccatgctatgctgcctggcctagcaagggcacccctgtgtcatgttgattctctttttattgcagaaactcgctcccgcttgtgcacagtccaggagctttgccccaactagtgctgtcacaagtcatgtgacaacaaccaggggaatgttcccattaacagagacggtgggacgccaaggcatgctcccacctccagcctcccatcattgttgtaacatctttggacacctccctccttctcccaaggaaagccacagccctgtgagtgaccagaggcaacagaacaaagaccggattctcagtttcctgattccctcgcacagcacggtctctctgcagggagtctgggaatcctgacactgcctggatggagtgtccacaccagtggctaaaggtcagaactgtctcttcgccaaccaagggtggctgctcctatgtgtctgtggctctggctataaccctcagaggtgtgtgttgagcaaacagagccagcttctgccatccattagtaagagctaacatttactgcgtgcccacgacctgccacgtgttgttctagctgcttgctaatgaacagcagcgaatggttgtaatggttataatggccgggcacactgaatctagagccagacagctttggatcaaattacactcttcctcttactagcgttgtatctttggccaagttacttaacctctttgtgcctcagttttctgacctgtaagataaatgg

SEQ ID NO: 51378 - DNA, 2973 bp, Homo sapiens
tgatcctcattacattcctgagaggcccagaggtcaaggtttatcagagtttgattagagaaaactgaggcagatgaatacaatgacttactcaaggtctcgcccttaacccattggattatccattcaggccacacgtgtctgttgactgcctgctataaactgagataagcagatcaggaaagagtagagctggagctagatctcctggtcagaagatcagttatttccctaatatactaggtgaaagtgcttagcacgtttcaactgatttttgctgttaaatacgtgagttacaaatcatcgaggtgacgcaattccttgagtcttcaaagagtcatcaatctcgttactagatacatttatttgatcttcatttttaaaaatatgtaaataacacctcctactagaggccagaaactacccttcgtgttatgtttctgagcttctctgaagtggaaatcaacagtcctaaggatggagctttcctctcataaagggtcaccagcatttccagactatgactttgggttctagaaagccactatagttggcctcttggcagactctagagaacgaggttaattagtaatcactcttgagtttgtttagacacatgaaaagccatcctttgggaatggggctgaaattcttagttcctcagccatccctcactgtcaaagaggcagaatgtaatcagtttcctggaatcgaaaagattgaacatctgagtacaatccatctccttgaactttattaccaatgttctctttctcaacctcttgagtaatccaatttttctggacaaggaaattgaatatagaatcagagaagaggcaccaatccatctccctcccaccaacactaccacccaatgctgtctagaggcagagatacacttaaactcattcaaatacaatccttccttagggagtttagggagctatatagtgccctacacggcttccttggaatctatatccaccagagtcccttctctaacatagaagtgaacagccagaggcaaggatgggcttcctggctactagctaagctgagatttcaaccccaggtggtgctttccaagcctttctgcctttaccacagcccagtggttacaggcacaggccatggagtaagccaggctagatccaattcctggagccgacacctactttcagtttgcctttgggtcctggatttcagttaagacccacccgaaagggtggtacagattgaggaaggcaatgtgtgctgtataaacttctagcatagtagttctagcacttaataaatcaatgtaataaacattcattactattgttatttttacacatacgagaagaaccagatagaaacaggaaggttacaacaaactcagtttaaacatttatccctggctaaacatgtcaactcaatttaactctctacaccgctaaagatggtgcatactgtattcatatattaccacgtgtgtggcctctggaactggtactgccttagaaccacagccctctgggaccagcagccttgcaatttcaatatggaccctgtgtcgttcctcctctcttatagcacaagcttcctttcccctactatacttctggtggtctatgttataggctgaattatatctcccccaaattcatatgctgaagccctaaaccccagtacctcaaaatgtgatcgtatttggagatcaggtcctgaaagaggcgattcagttaaaatgaggccgttagagtgggacctaattccatttcactggtgtccttatgagaaaagaaaatttggacacagagagataccagggatgcatgtgcccagagaccacgagaggacacagggagacgccgagagaggcctcagtagatagcaaagctgctaacactttgactttggttttccagtctccagaactgtaagaaaattaagttctgttgtttaagccacccagtctgtgatattccatcacggcagccccgatgactaagacagtctatttatttttcccaacatccagactcatctatgacatcaactcacgagttgagataaaacacgctgactcattttatggtggctttagagattccattaccggccagctacatttaaggggccattcaacagtggcagggagggaagagccacagctctggagagcactcttttcttctggtccattattttccctgaagagacccctgacgcctaaaggtaaggcaggagcactttctgcttattcccatcccagcttcttcccatggctaggagccttctgcaccttcatttccagtcccttcacaggaacttgtctctcatgaataggcaccaagcctcccacaaaaggaattcacagtttccagtcccagttcccacactgagcaaagtgtttcacatcagaggcactgtggggggctccacaatgtagctgtaacttcacatccaaactcctcatcatcagcctcctggatgtgcacaggtcccccatatcccacacgttgcactgagcaacccctggggggaggggacaagtgcatggaacaatgtaaagagcacacactagggctgtgcagtgcacaatctgcgcagctgtacaaagcggccctggcagaaactatgtcttgtatgattcattaccctcccggcctcatgctgagcaactaaaatgccctttataaatattattgattcactggcatttctaagtgaagtgttttccttcaatgagaaaaacagtaaaagtcaacaaggaaagaaaaagactctggtgaatattagataaatgctgcagctccttggatcagatcacgtccactctggatgttcgtaattgcacagtagggataaaacgacctgacttatgcagtcgtctctgggaatggaagggattaggtgctacttgagattttgatgttcctcctttctgtccatgtacgagcatcaccttataatacttataataacctt

SEQ ID NO: 51379 - DNA, 2264 bp, Homo sapiens
tggctgctgaaattaacgcaatcagacatgtgtggaaacaagcagctatgagcatccctgactttcgaagctacaccccttcttttggctacccacccatacgtcttcatttgataaccgttcaaaaagtttcttcctgccaggcgggtttgcagcactttctcggagcaggcacagcatgccacctgcacgggtgcacgctcgcaagaaagcagcaagggctaagggacaggagggctggggaggggaggcacggggcaaatcaaaactcaatcccaacagcgttaactggcattttaggccgaagctccggattcggaggctggggaggaagtagctagcgctggcctcggctgcctggcacgacccgcgcccgtcctacctgcctgggggaaactcgggcggcggaaagtctccccgcccccagccgtcccaggcgtggggccagacaggcgaggggggcggaaggggggcggcggcgggggtccaagatccagggccgcagcgggctcccggtgggctggcgagaagaggagggcgtcggggcccccgggctcgccccccacctgccccccttaccttgggcaatggcaatagactcgaagcggtgcagctctttgagcaggcagctcctctccgtggagtgcaggctgtagatgaagtcgcgcgcgccctgcgccgtgttcagcgcctccatgggctccttcttggggtgcgtgcccagccgcctggggccgcccggcaagccgccggggggcgcgagcgccagcagcccccgcccgcagcagcaccaggacggcgggcggggcgcggcggcggcggccgggcccggcctcaggctgcgcgcggtccggctcctcagcagcggcagcagccgggacatggcgagctgaggagctgggacccccgcggccgtccggcaaggcggtttctggcgcggctgaggcgagaaggagctgggctcagctcgaccccgccccgaggtcctcctgccaggcagccgaggcgccgggcaccatgcactccgcgggcccgcgcggctctcgcctcctgttccgtccccacttcctttccaaaaggcccgcggcggctcccgcccctccgatgggaaaaactttctctgagacggccgggcccggacagcgcccggagagggcgggcggtcggtgcgggcgggcgcctcccggctgaggaggagcggcgcgggcgggcggggcgggctagtgtgtgtctctgtcagtctgatcttccagaggatgagtcagccacgcaccgccctcctccagcgccgccctactctcccgccagctttctcaccctctagcctccccacgtccccactctgtaaggttcccgagccctcaaagcagccgcgctcccgagccgcagccgccgccgccgccgctacccctagcggcagcagaagtgggaacggggcggggcgaaaggggaaggaggtgcgggggggcggggaggtgtgtgagcgaggctgcgcaggcgcagtctgcaggctctcgggccgccctccctcctaggggaggagcgtgcacacgcgtcccctcccgcgctggtgcgtgaaggtggaaggaggtagggtgcgccaccctgtgctggcgttaaacctacagatcggaatagggaaaacgagctctggacccctcgcccgccagggtagtacagctgccacccggcccccaacctggggccacatctggagcttgttctgaaaggtgccccggcgtgcggccccgctctggacaggcggagagctgcgctgccaccccagccccgacgggatcacggcgctctgctccggaacgaagcgccccagctgcgcccttcgccaagtcagcgcccaccgccgcttcggccgagcaggccggctctaatgcagtcgctctgggcgccccaaagagaaagcgaagccagttccacccctgcccaaggagggtctgagactgagcccttgacacgagaacagtcctccccgttcagattccagcagctggcatgcaaattgttaatgctagaggcagaggcaagaatgtcatagacctttcctagtggttgcttgtgatttttttgtctctgtgctaaagcgggaagaataatttgattgtccacgatttcccctgatccaggtcctaggcatctttcaaggcccaggtgaaaggtctcctacttcattaagctgtccctaatctcttctaagggaggagatctctgctttatctgaacctgtctaatgacgcttaggcaccctt

SEQ ID NO: 51380 - DNA, 3951 bp, Homo sapiens
acatttatttttaaaataaaaattagaggaaagcccatgaactcattttccatgaacataatataatagtactcacctatctcctctacccaacttgtgttttagatgagtccttttggatctttttccccataatggcctctctccttttgctttacagtgcaatcagggcagaataacagatatgttgagtagctaatttatatttctgaagatctccatagaactcttaagttctaagtcttcatagtctttgcaccttgccaagtttgctttcctttgggaattctgtcataaccacaaggttattccccagacatgcagtttggggaaattaacccggcagtagtaaacagactggattagaaaaggtggcagtcgtaataaggatattccaataaccggggaaagctacagaaggatcttgagttaggatgatgacagttacaatagaaaggagaccagtacaagagacggtgaaaacagaatggatacaatttagttgaagaattggctgtgggtgaaaagaagaaatcaaagatgcctgaagttgtgagtttcaggtagccctgagtttataatcctagttctgactcgtactatctttggatatactagctgctgactactaactgaacaaggtagtaaccttgtcatcttgtaacttacctaagtctgtttcctcctctataaaacaaactatcaaaataaagccgatgaaaagattgaagtaaaacataaaacccttagcacagtgcctagtatccattaagcagtagataaatgatggcggtcattattagggagtagggtaaagaacagaaggttaaaaacatgagtagcagtaaggacttttgggtggggattcggtctttctactacacattacacatacctctaagcagagaaaggggttggaggggagtttgataatgtgactaataatcctcctccccctgggggggatcttgataaaggatagccacccacatggaggcctaatataaactggattgcagaatgcacttgagctgggagcccaagcgggccaggcttcttgattcctattttatcccctttaacctaggatagctaggtctatagtgcagactcagacctaacttacactttcatttgcagctgaagtttcggaacaaagacaaagatagccagatcatattaattacacggataggcaagaaagcatgagccctgaggaggaaggaagggactgtccaggtgtacttacctcaaagatgagaaatatcaaagacaggaaaccctaggttcttgcccttcagtcgctatctccttgccattagtaaaatgcggccgatgaatgtcctcacttctgtccatctgggcaggaggtgggaagggtgacgtgcaaatggatgggaggaacccttttttcggcagcacccaccacacccagcctagtgccacgcaccgcaagcgctccataaacgcacacagcgtcgcctctaccaggatcccgggcggccttcgcgggatttctcctggcgtcggctttcagactcccgagggtgggataaatcgagagggtggcatcctttggcttttcttctcccaggcagctctgaaccatgtttatgcaacgtttaatgggctctaataaaacggctaataattttgatccgcggaagcaccgactcgctcgctaagccgaatctgcgagggtgaagctgcaactccaacgccggaaagcgcggctaccgaaaagcgcatgcgccacggggtggcacgaagctagagtaagctgaggaggtgggcggaaaccatggcaaccatgggtgatgacgacatggggagcgtctctagcgctggattatgacgctggattatgacgcaggcagtgggcgcggactctgcggttcgcttgactgacggcgcagcctccgggcctagccacagcagcaacggcagaggccagcgggcgaggtcaagatggtggctccgcgggcgggggaggcagtggagggaggaggagtcagaccttagccagccggaaacaccgaaacccagagacctcctggggagccgccgccgccgccctctcggccatcgctgcctccgccgcctgctccacctcgagggacgcgagcgggcggcggggctggccgtgagagagacaggagaggaaggagggcaggggcggagttgcccgccttagcccccgcccccggccgcggccccgggccctgccccgcgcggccctgcccggcccaccgagccctggtgtggcagcggctcatggcggccgtggggcccccgcagcagcaggtgcggatggcccatcagcaggtctgggcggcgctcgaagtggcgctccgggtgccctgcctttacatcatcgacgccatcttcaactcctacccggattccagccaaagccggttctgcatcgtgctccagatcttcctccggctctttggtaagggaacagggtaccgtacgtcccgggacggctatgcgggccgagacgttccccggggagcgggcaggcgcgcagaggccatgggtcgagtatgtgtctttgggaactacagtttcatccctcaaagggtcgtctttacgggttgggagggggaaggagatgatacttgtctgagttgacagcggagcagtccccctagcgaggattcagtgttgtacctgagtgaggtggggagaaagtaaggatgtgtgagcatgcagctctttgcccgtttgccttgggaaatgagtactggcttaccgcgtcctatgcgacagccttcgaaaaacaactctgctatcccagtctcgtcgtgtgtgaccttggacttctgccaaggcgtgggcctcagtttccctttattaccaaatgccgagtacttgtatgttgtcacttctgctgcacccgagggtccacaggatcgtgaagtgtctgcagtaaatgacatccaagcgaaggagacagggttttgaatgtcagaccttgaaaccattaccaaaaattctcatgaaagcggcgatgcttaaatcgagtcctaaaattttccatgaataaacgagaaggtattgaaagtgactgtaaaaagtgatgagacatttgccaaagagacttctgaaaatcattgtctttgtttcgtatggatggagtgttaaaagtatcttatatttcatttcttcctttccatcttcacttacatcatcagagggagatgcatttatgcgtaaaataattttttaagtaattgtaacttggcaaattttgttgatgaggtaattctggtgatcggtcttaagtaggctagtgcttttgaagtgttgctgagggcagactgatggtgaggtctttaccaagcctttctgaattacaagccatctgttgctttattccttcaaaagaggagtggcaataaaggccgaattttgttcttagcaataaatagccatattttacatttatctggtattttccttttgcaaagcattttcactggtaggtattatctaacctaaccttcaaacatcccccagaggtgggtggtggtattgtcattttacaaaccaggaaacagggtcatagaggttaagtgttttgctcttggtaggctgccgctaagtggttgccagagcctgagcttaaaaatcttttgacattaaatatggtttactttcctccctaacagctgcaatccagatacagaatgcagtagtaatgatcatatgctagatcttaaaactaaagatgtaaacgtgatgttcagcccaagctgcttcagtaacccacctgctacctaattccagcctttcctacttgccactgctaacgtataccaccaccataatttgtgttaaaaactgggctctgtttgagaggattctgcatgttcatcccagaaacagtgtagtgactgctttgaatattcttacagcatgataactgcagattctgtgagaatc

SEQ ID NO: 51381 - DNA, 2035 bp, Homo sapiens
gcacaacgtctttgaaaaaaaaaaatactgcttaaataactctcagatctaaatgtataatcctaatctcttgattgccagaccacattcccaattgcccagatatctctacctggatgtcctataattatctcaaacttaacctaatccaaatggacctgggtacctctcttcaccgccaaactagtcatgcttccatttcatatttaagtacttttccaaaccctgagtcatctttgttcactctctactaccggccatgaacactcagctgctaaatgctgcacacatctcttccatttctctctcttttccattaccctagtttaagctcttgaaatgcttccctacctctccctatttcccacaaaacctacataatagctatcaggattaccttgctaaagcagaggtgtgatcactgtcatttcccaccttcaggtagctggaaaccccacaaaacgaggatcatgcccatttaaatcccgcagcattctccctctcgttctactgatgccgactggatcattgtacttgccaagtacagtttgtttttctccccattacttgtgttttctagtttctccaccagatggtgatgacagtacaactgggagctttgtgccctgtgttcctaggccagtgccaggcccacttgaggcgctcactaactatgatatgaacgaatgaatgcttgagtgaattggtccccagaagcggtcagcctctccgccaaggcagaggggaagggccgggaggtgcacgtgggatgaatggaaacatagtgattggcctttttggagttttcttcttaaaaaactgaatacattacagatgttgaaaacagcacaaaaatcataactgtacggcttgttaatttttacaaataaatacaccctcgtgaatccagaacctagatcaagaaccagagcattaccagcacccagaaacctccccgcgccctcctccactgagcggccctttcaacccttacaatgccggagggcgcaattcctgggtcctgtgaccttggtgaccgacgcccgggacaagtcagaaagacccaagggcgtggaaaacgctcctcttaccgataaacttgaagcgactcatgactgcgcatggaggacctccccagcggaagcggaagtggccgccggcaactccgcccttccggctggccccgctcagtcacccgcagcaggcgtgcagtttcccggctctccgcgcggccggggaaggtcagcgccgtaatggcgttcttggcgtcgggaccctacctgacccatcagcaaaaggtgttgcggctttataagcgggcgctacgccacctcgagtcgtggtgcgtccagaggtaagggatggggacccaggactcggggaggtgaccctcggggccccatggaggtggagaggcccctgggtacctggaggttcaaggacttcgggaacggaattggaaggtggcctctcgcttcacagaatcctatggtagacccgggttcaaatccaggcttcgccacttatggccgggagaccttgtagagttgcttgtcgggtctgggcgtcagctttttgtttagtaaaacggacgcacgaccagcgcagagggtcgcaggaaaattaagtgaaataaaggaaagtgcctaaaattgtaattgtcatgggtccagcgctcgctcaatcgttttcttcacgatcttctcctttccaatattaacagcaataaactatgcattattttcttcagtctgcaaaactctaggagttaggaattatcttaagcttattttacagataagaagatgagcacagctggtaacttgcgcaaggtgatagagtttctaagtgtctgagccagggttaaaatttaggtctttctccaaagcatcatcattctcccacccctcccattagcttttctctttttagcttcatctagtccttttcattacctttacatctttttcacctcttacataattctctttcgacctctatccgtctgagactagtctgagaacatagtgttaaa

SEQ ID NO: 51382 - DNA, 1161 bp, Homo sapiens
ttcttacgagggaggtctggggttctaaaacgtcaagtgcgcccaactctgctgcttcgcctaccaccaaaacgaggggagctgatgtcagtagcaagaaaagggacagggttaatctgcctgcaggaaccatgagcctgcagcaaaagtccactggggcttcagcatgactggaatgttcttggatggaccatctgggtccacatgaccaaggccaacccagctaagcactgccgatggatttgctgaggtgatttcatcctagctgagtctggtcaagcccgctgtcaagaacatcagcaaatcaactcactatgttggtgtgcatatgttttaccttttaacaaagtgatgctttaattaatgtttttactctgaccccagctgtttctgtgttaaaatatctgtgggtctggcacaatagcacacttggcaagaggcaggcagctttcagcgactaagggcaatcaatgctcagctgtttgctcttgaaatggcacagtaaacaggatgtcaaataatgacacacccgctctggatttctgtctgccttccatctccactcaaaagaaacatgctcctggccaggtgcggtggcttacgcctgtaatcccaacacttcagaaggccaaagcgggtggatcacctgaagtcaggagttcaagactagcctggccaatacggtgaaaccccgcctctgataaaaatacaaaacttagccaggcatggtggcaggcacctataatcgcagctacttgggaggccaaggcaggagaatcacttgaacccaggaggcagaagttgcagcgagctgagattatgccactgcactccacctggacaacagaacgagacccgatctcaaaaaaaaaaaaaaaaaaaaaatgctccacactctgtatagtaacttagatcataaaaagcagaaaacagactcccatggtccaaacaaacggagctgaaataaaaagagcagttgtagaggcagcagcagggatgaagtaaataactagggctgggataggaaaagtcatggtttctgctcctaagcctgcaagagactctggcttgcaaaatctggcagctaataaggtactcaagggccgcgtgactgttctacactagaattacttggtgcaaatgttcagacagacatagggg

SEQ ID NO: 51383 - DNA, 570 bp, Homo sapiens
cagccttctaagccctgggcttagcctcgaagaactggctggaaccatcccaccctctgctccttgttcttcctcctcactccactgacatccctgtgggaaggagagctcctagtactatccctcctcaaaaatcaatgggggtggggttgcagggaatctacacagattcaatttttaccatagaggcagagccattgatccattgactgcaggtctcagggtcattctgagagtgctttctgctggttttgtaaacacaagaaacattcctgtgggtgagtgcataggctggatacggctgggggatgagcaaaccactgtgcctagaggaaaggattcacatttcacaggctttttccaagaaaggaagaatgacgtggagaggcatttggggtccactttggagtctgatcagaatcgaggcccagtgattgaaccattctggaggcaggtcagtgtggggtggggagacgcggtccaggaagccagaggctgagtagccaggggtcactatggttctctatgcacacagtccacccttggtgggacgacagccctgcctcaagg

SEQ ID NO: 51384 - DNA, 1642 bp, Homo sapiens
catcagtgctcccattaggcagagcggtgatgtagctataagctgagtcctacaggaaggcagaggccggagtaagtaaatgtggctgggctggggcatctgtccataaggacacactggacaacagatcatgacccccactcctcccacatctaatatccactttctctaaggagctggcaaatcagtacttagagggcaaatgaacagtgcaaagggcagctttcaagaaagccagaattattccttcttcccaaacatctcagaagaccaaaggcctagaaggagcggcccagagggcttgcctggaaggttctgtttgtacttattaattgttacgcatccacaacgtggttatttaatgggaagtgaaagctgggggaccgggaggctcatgaaaaccaactccagtgagcctccatcctctgcccccaccccttcaaaacaggaaggccgttgcccttggctgaacagctttttaaagtgaccttgaccctaggtttcccttgactgtaattttttttttttttttttttttgagtctcactctgttgcctaggctggagtgcagtggcgtgacctccgctcactgcaacctccacctcccgggttcaagcaattctcctgcctcagccacccgagtacctgagattataggcgcccaccaccatgcctgactaattttttgtatttttagtagagacggggtttcaccatgttggccaagctggtctcgaactcctgacctctggtgatccacccgccttgacctcccaaagtgctgggattataggcatgagccactgtgcccagcccccttgactgttaatttttatatttcagagctcacaacagttgcatcaccagcttccttccagccaagaatgaaaaggaaagctcctacaaaatccagggctcgggactgtgtcatgggacgctcagggccacttagggacactgctgcaatggctcatggcaggttgtaatattttagtttcactatatgagaaaatagtctctccttcctctcaagcccctgctctcagagagcccagaagtcctaaattggcaggggtcttttcaccttgacggcgggctggaggactgcccgggtgttgcatcacagaagttgcctcagcgtgcatcactgccactctggctggaccgagcagggcaaggctgggtacaccatctgctgccccgggggatgcctggaggccagcactagccacggctacacagctctgcacacacgcacacacgagcgtcagacttgaccatgaagctgggcactcctcttctgcaatcgcactggcatgtttcaggatttttttattttataaggtgaagtgacagaacacagtcttcaaaggaaagtaagagtgtttccaaatggcatcagagtgtgaacctgaattctaataagagaagaggaagctcaattcttaggcctggaaaagttcaatcatgatgccctagctaagacaatgctttacccaaagatttcgaccaggtgtgtccaatcttttggcttccctgggccacagtggaagaggaattgtcttgggccacatataaaatacactaacacaaacaacagctactaaaaaaaaaaaatcacaaataaatctcatatatatac

SEQ ID NO: 51385 - DNA, 4850 bp, Homo sapiens
cagggcacagataaaccaaaccaacacattcaacatgaacatgcaaacgctctgctgtgatgtcagaagaggcctaacatcctacgcttcagcatgcaacagacaagattccactgcaacaaactgcaaaggagagcctatgtttatttgcactggatttgcagggaagctgctggaagtaagacccttgacccaggcatcttctcatgaggtttttgtcattgctgcggctgttgttaagtgtgcctgtttcaggcagtaaaaaaaaaaaaaaaaaaaaaaaatcagctttattacttgagctcagcccaccaatatgcttcagtatgttccgacatcctgcccatggctagattatgtgacccaacccccatatgtcagtgctgggcagaggaaaaataaaagcaaacaagactgtccctgctgtcagtccaggtctcaccagagagtgagacacataagcagacggaaacggatagttcccaggtattagagtagaggaacacaaaacataggagagaaagggatcctttggactcccccacattcttcagcaacttccctgtctgattctgcagtgatttctgttgctacaacttagaacctagactgacagtatcagggacagaactaagcccttctcaattcactccttgagcaacgaggcactcacttgttgaaatcttcagattatgagactgacgtgctacctactgcgctaaggaggcaactgagttgctgaaatcttgattgctttttcatttcaaatttgaacctttcatttcaagtttacaaaaatagggatcgattaacaatcagattaactggcatttcatctagagactagcaattcacctgaactttggcctgccacaaatcccactgtttttctcattaggattacataagtggtaaaccaacagatggaaatgctgtccataagtggtaaaccaacagatggaaatgctgtctggtcagagaacgagggcagtgtctaccgctaccacacatgagtgtgtcagacttcgagtccatgcctaatgttttttccagaatcattcccagaataccagcggcaagaaaaatgattttcaggcaggcggggcaactctttctttgctgttctgtgaaggaaaccaggagctgcccctaaggggcagggtctcaccacttgcttccatttctaggagatcaaggacccaccagagagcccgctgggtcccagggggctcccattcagaccgcgagcagacgtggtggcccaaaggcctctgactcctttaacccatttatcctaattttcctggtcaattacaaagagcctggaattcagttctttcatttcttatgagagaaccatgagagctgggaaggttcttaaaaatcatcttgcacttcaaagagagatctcacctaaaccagagattttcaagagaataattttttatacggcagcaaccccctattttaatttgggatgtttcacagggcgagaggggtgcaggggatctccacagattgccattctccagccccaccacaagcccctgggcaccctctgcgagctcacctacctgatcatgccactcaaaatcagagtggacctggagctcagtgacctcagagatccaagaaagtcacttggcaaaatttaccaccatgttttatactcctcgcttgaagtagtaacctggtgctaagcaacgtctagactttatttctaaaatccctgacaactctatgtggcaggcatgaatattcccatcatagaagaggaaaatgagacacaaaggctatagcacttccaagaggtggcctggcacattagccctcattacgccctgactctatttttgggagatgaattatttacgtgggttatgcaggttttctgtcttgggtaaagtatcatgtaagagtactcaccccttctaaatggactgctacctaaatacttcctataataacattctcaagatgcctttgaacagagagggtaaggaacctgcctggggtcacacagctaacatgcaagggatctggatttcaaatgaggtcatgtgcctccaaagcccatacaccagactcctcagcctttataacctaaatctcttaggctgctgctgcccaggcctgtctacttcaaagtcccagacctcagtggaaggcaaacaggcagccaccctctacataccaatttttcccaagcaaatggacaagtacccaaaacaaacttttctgtttcacaacatttctggccttcattcatgccaagagtaagcaactgttgcatcgttccacatgatcacaagacagattcccaaagatgacttcaacagggcagggtctgtgtaccaattttttcatttttaatctgcagttgacaaaactaatacttgggcagctggcagagtagactcggtgaacatgctgctgaaaccacacttgctctttatgacctgggaccaggttgaaggacagcaactaggaacaggagctcagagtcattctttccaatccaaaggagacaccaagtatgaggtttcctgcatttgccttcacactggctctgcaatgactctggtagctggcagctctccataatgtagctgtctgctcatccacagtacaacaaacaccagaccagaagaggggcttttcccagatacttggaaaaaaggagaagaaaacaaatacaaaaagcaggttccaaggaacacaggaaaacagatgcaaagcaatcttagattcagtaacttttgcacatcctcagtgtcattttacactaacacaacagtgtcatggctggaagatctaaggagctagtgctttgctccaaatgatttggacagatgtttactaagtttgcctttctaaaattttcttgtacgtggttaacggcaggtgattaatattcatgcaaggaggttttcaccagaatttcatggagttgacatctattaaagttaacagacaaaaaggcagaactgtaagtgttcttttaaactggcatctgagagtctttgcaggaaacaagatcatcacaacctgccaacacacgcacttcaggtgacaggcgtcccggcagctcccaaatgctctgttcttgctcctgcttacctcccagcttctgtacacaccgttcagctgcttacctcccagcttctgtacactccactgctgggatggtgcccttctcacaggattctgtgcacctctaagacctcgcctgggtatcacctagactgagcagcatttcccatgctctgcctccaagggacccgcctctctgcctaaaccagacccctgtgccccgtcacacccgtcctgccattgtctctttactttttgtctcctctgccaagactaagcttcttgcaggtggggctcccctctcttgcacggtgcatggcacagagcagcactcaaaaaataccgctgaatgacgttaaagaggaaaggaacaaatcactgtgaaatttgggagggaggaggtgtcattaaagccaatgggaacacaaatgaacctgcacaaaatagatctggttaatcttttcagacttttttttttaaaggttttctgcaatcactagctggctggatgtaagcatcatggaattcagactcctggcaccagaagggcttctaggtcatgtggcccaacagctccataatgcaggaaacatgtgtctgctttatgatgagtccaacacattgctgacgctctgtcgtcctggcagatgcggttccctttagggccatcagcggcaggcctggttttcagccaggcaataacagtacaaaaattacagcacaactgtttttcttttcttttcttttcttttcttttctttttgaagacagagttttgctcttcttggccgggctggagtgcaatggcgcgatcttggctcactgcaacctccgcctcccgggttcaaagcctacctcagcctcctgagttgctgagattacaggcatgcgccaccatgcctggctaattttttatttttagtagagatggggtttctccatattggtcaggctggtctcagaactcccagcctcaggtgacccgcccgcctcagcctctcaaagtgctgggattacaggaatgagccactgcgcccagccagcacaactgtttttctatccactgctttaactttctcctgttcatcatcttcaacagatgcaaagaaagttagcagttggggcttcatacccaaacttgggcatttttgtctgtgggaaaatgctacactaaaatcttctaagagaaatagcttttgctcctctctagaaaatccaaggtatttgtggagggcatcggactggctctacaactcccaagggtgtctagcaaggtcacggcatgcattggacactccaaatatttcacagttgatcttttaccaacataaaccctgtgtcagccacatgtcttcacgtccacaggccttaattccttcctcctgaaattcccatcaaatggtacaagcagcagcacaggctggagtcacctaaaaagctaattaagtacaccgattttattgctagaatactcaagtcaggacctgaccacaggctgagcacagatgttagtggcaggaatggctatcttgttaacatagtaataacactgagaagaggaagaaaaaaccatgaggattttaaaacatcttttcatcttcctgcataaaaaattaaattaaaaagaagaacaatggaatttcaacgcctcactgagctctgatagagcgaatgaaacagtatcgtgaatggctggacagggaatacagtttcttgcattaaacaggatcgcctagttcagaggtcatccgcaccca

SEQ ID NO: 51386 - DNA, 4174 bp, Homo sapiens
tgaggcaggaatatcgcttgaacccgggagatggaggttgcagtgagctgagatcgtgccattgcactccagcctgggcgacagagggagaccctgtctcaaaaacaacaacaacagcaacaaactagcagtgatgaaaagtacagagcaggtcagtaatacaaacagaaaccaaaagtttgctgagaacgggtgcttcccatcccaggctgcgagtctgagctccaagacatcagccgcgtcagtcttatcatccgactcccagatcatactccccaggacacggcaccaattatctcttccaattaaaccaccgccacaggatgctaaatccagtgatatgaaccggcagcaggatgcttgcccagcccagggctggcatttatgatccttattagcaggaaagctctgtcttctgctccccacggctcagctgtggaacctggagctcccaccagcccccacagcaggtgctctgggaaggggcagaagaaaatgatggcaggacttggagaagccaggacagcagagtcaacagttccaactccattggggaactttccccatcgatgacagcaatttccctaacatctaattataggcattttgtcagctaaataataagttgcatggattaaatgcctacagtgagccaggaactccaagaagtaccttgtgtaatttcatctaatcctcgcaacaaccctctgaggcaattcttcattgcccatcctcattttaaagatggggaaactgaggctaagagaaacctgccataggtgggtagacctaggactcaaagccaggtggtgtctagctccgaagtctgcacttcttccattacaccacagcagaccctgaaagtaacacacacggattttacaggatcccaaagtatcttcagggaggttttatttcccaagagggtccttggggcaggagggaaatgagttaatcatgagagctcacaagtgctgggcactcatgagccaggcctaggcctaagctctgtgtacacattcattcattcattcatcttcattctttcaacagccctgtgcataagcactatcatcacccccattttatagatgagaaaactaaggctcgaattaaggagattaagccacttaaagttacacagctaagaaattctggagctagatggccaggcgcggtggctcacacctgtaatcccagcactttgggaggctgaggcgggcggatcacaaggtcaggagatggagaccatgctggctaacacggtgaaacccagtctctactaaaaaaaatacaaaaaattagccaggtgtggtggcgggcacctgtagtcccagctacttgggaggctgaggcaggaaaatggcgttaacccagaggtggagcttgcagtgagccaagatcacgccactgcactccagcctgaatgactccgtctcaaaaaaaaaaaaaaaaaaaaagaaaagaaaaagaaaaaagaaattctggagctggatacttagctatagcggtacctaactctgaagcccgagatctgacctctccctaaaacagacctgaaacacgagttcccacatccctggttggtgagacagccaagtgcctccaacgttaagtggcctcctgtcctgctggaggctggacaggtagtttccatcgtaacacacagaggccacagcctgcctgaggggagggttctctctcccagacaccacaccacaaggccacccccctccatctgggaagaaccaggggcctttccaaagtgaatcatccgaataaccagtctttatcattttaactgtcatcttttaaaaacatatcacacacaccgtgcgttcttaaatggagctactgcccagtggctgctgactcatcaccctgtaaagaattgagtcgctgaggacagatgtggcaaggccaagccagctgcgtcagccccgcttgcttaatcctgtctgaagcttcttgaaatacttcacctgctccatggaatataattcatcttgtaaaattgcttaaaacttttagaccaaaggcatttacatttaattaaatgaccagggagagttaacttccctctacctcccctggaagaggtcaccttcagaagtgacctatttcctccctgagcccaaagaggttgtggaccctaaagggccccagtctaagcccaccccatgccactgggctgaatgggggccaccacatcttttggcaagccatccatcaacagagtcaccaacaggcaagcagcctgggctacccgagcagactgtcagccacatgggaggaaaggtgggggtggggtgggagcaggaacagaggggaggacctgaaagaggaggtggagaaaggctgggaggaagaagaggatgaaaaaggccacttgtgactcagggggcctatgggccagcagcaagatcatggagccccagcactgcctgacccactgcatcaccgcccacatttttaacaaggctccaggccattcacaggcactggacagtttgagaagcactggtctacagcacaggctttggagtcagaaacatccgggtaccagccccagccacactactcactttctatgtgacctacaatgagctacatagccccaacctgcctccactgtctcatttgtagggcagtacctacttacaaggtggttttaagaggaaattaaaataatgcaaataaagtacttagcacaaaatctaatacaaaaaaaatgaccagctggctctgctatcaacacataaagcttagaacccaagtcaccagattctgcctctcattacttctcatcattatggaaacctttggaggcctttggccatggcattctgaacctgcttggtatattgcaatgctgtgccacctaccagcatgttcctaaatacacatgtatttaaggcagcatcatcactgagataaaaagttaccaactacacctggagccagaaacatgtgtataagaaagggaaaataaggaggactgagagcacttgagcatttcattggcctgcaccctgaggattcgcccttgagcctgaaacatacacgcagcacagaggtcaaaggcaaagagtaaggaatcagcagctttgggaaggtggggcacggggacaggccaggtctcctggactcggattccaggcacgctgccacagctgggtgctcccgaggacagcacagacaaaggtcactaccttgacccaccaatctccctaatgacacaaaacgccctttacttccagagccagcaaacacagcaacctgatttcacaagacatgagcccttctggaccctaaagagtacgtccacgtgctaggaaaagacgagcgctacacgacagtcccgacactgctgcacagctcagaccctgtcctggcccgcaggccactgcctcctcagaactctccttttcctccatgctcccaggctttgttggtgacctcaccgtgcaccagaccttaactcctggtcaatgccaccctgcccctcatctcatcctgagtctgagcatctctggcactaaaatttctctgatcccctccatagtccactcacttcactcccaaagccaccattcaggttctgactatgaaagccctcgggcctgccagcttctgtctctccaattcaaactgcttttagcaccactgcttagccaacctcctacagcgggtctgatcccattgtgccttgggtggctctccactgcttacagaatcacacccacggccctccaaaggcagaggcagcaaagctcaggcttcccccactgcctgtccacccactcggctcttccactgcagctactggaataacagatctgagctttgggcctgctgctgatgatggtggttgtgtcatttggtttttaacagaaagcaaagagaaagaggagaaaagttaaggagcatccgggtgcagtggctcattcctgtaagcccaacactttgggaggccaagacaggagaatcgcttgagcccagcagtttgagaccagcctgggcaacatagcgagactccatcccttcaaaaaaatttaaataattagccaggtgtggtggtgcatgcctgtagtcccagctacttgggaggctgaggcaggaggatcccttgagcttaggagttcaaggattcagtgaactatgaccataacca

SEQ ID NO: 51387 - DNA, 1035 bp, Homo sapiens
ggatccagattaatcttctccaaaacagagagtttccctttctatctgttgtgggcaacctgccatccttcataaactttccaaaaataatagtattaacaataaccatttccatttagaccaaaccctaaatcaagagctggcaaactatggcagcaggccaaatccggcccactgcctgtttctgtaagtaaagttttattgaaagacagccagggccatctgtttatctattatctagggctgcttttgctctacaatgggagtgttgagtggttgtgagagagacggtagtctgcaaagcctaaaatattgactgtgtggcctttcacagtaaaagttttccctgtgtggtacaaagcatggaaacctctaaggagaggtgtccatcattatcagcaggaagcagcccttccctgaacaaacccccagcacagagcagcgatggagtcgggggcgctgagatgggagctatgcttcctgaccagctttcgtgacaatcacatgaccctggcgagccttggcacctctggctatacaattcaggcatcaatacctacttcacaaggctgtcttgagggtcagccaagacagagtacacaaaaagctcccggcacaggcaaattactcctcaaggtgctccattaatggtaatgaccctactgaccactgttactcaagaaagaacacaggactaatgtgaatccctgcaatactcatcttcagtcattaaggttcctactgctatgacctcgaaaagatcatagactcagcacgacaaccaaaagaaaggacgcaaggctctctctgtgttgagtcatagaaaggcacaaggtcaggacttaatgttcttgtgcttggggaaaaacactgagctgtttcaggttggaatctttcaattatcaaacttacggcagcctcctagatatggaaaagactaagagcattgtcacccagggtctgtctccgaacattgtatctttcatccttttaacagacagcaattggtacaaggtattcccagacagtggccaa

SEQ ID NO: 51388 - DNA, 776 bp, Homo sapiens
gagcctagatcgcaccactgtactccagcctgggtgacagagcaagactctgtctcacaaaaaaaaaaaaaaaaatcactctttaagagtactgcctgcacgtggagtaaaagctggtcacaagcacatgcatgacccagatgtggtgccaagggaaccgaacccacagccaccattccaaaaccctgcgtgaaagtccccaggggaggtggaagagtgagagttgctctcagccactccaccctgtgctattttaagcaccatgacttcattcttgtttgttctgaagcagcacagatgggccgcgtcaatttatgttactacaagaagagaaggagacccagattcaaagctgcacgtttctcttgccttgtgttagggcatcctgaagctggaactgtggtgtgtcgagcagaggaaagcactatttcttttttttcctttctcttttttagaagcctaagagtatttcaccaacgtgcccatatttcatggaaccaacagccagatctacctgaaaaatggcacaaggtgagttgctaataaagccatcgagcctttgcagctttgtcagtgccacccaactgtgaaatccatggcccttgctccagacacaggaagggtcctcttcctcagagagcaggagacagggtcaatgatccaagctgcagcatgatccagggtggaaggggctccaaaccacatctcacccggtcacctcggagggcacaaggctcttccctgaacctttccaagaaacttaatgaaccagactg

SEQ ID NO: 51389 - DNA, 713 bp, Homo sapiens
aatttatcaaagtatcatatgtgcccccataacatgtggatgcatcaatctttttaaaaagaaaaaaaaaaagtttgctaggtagaaatagtaagactctaattacacgaaagagttctgggcttgaacaccaaaggcaatccagaagttaaaggctagtgaagtctcaattaaacaatctggttaaaataaaactcaggagcaaacaagagcagtctggctggagccaggaaacaacccagctgggaacccaaacaacccagcaccttctcccctcagaggaaagattccctcccctcctccactccatccatgaagcagggtgagtgccttctacccagttgtcctttgcaccagagacttgacctcagggaggggtcaccaagattcaaattctgaactccagggaggaatcctgccaagaccccatcccaacagccccttgctcgagaactgacgggcttcccaccaggatccatgagggctgcataaaagtggaagctactgtttgcacgcagtcgttcattcagcagatgggtctgcaccctgctgaaggccagatactcagcatctgggaaagtgagttcctcaggaaggagcaggtcctgttagaggtgtctccaatctggtggggaagatagtgacagcacagctaggggaatcctctgaccccagcatgtcccccgaggccctgagcaaggacccagtttact

SEQ ID NO: 51390 - DNA, 2220 bp, Homo sapiens
gtcatctgcctgccttggcctcccaatgtgctgggattacaagcaagagccatggccattacggccatgacatttcctttatgatttcagatagttcctcccatcaaaagagagaggaagaggtttatggttagtcactgcctgcatcagcagccacctgacatttgtatggccaagttttcaaaggtgaaaacctgccatgtgggaatctaaactgacgtcatgatgggcactgaaggcaccgcctcacatgtatgctgtattcgagagtacagaggtctttcaaaacaccactgaaagggcagctggtagaacaggcatttaacacttccctactaaccataggaaaatcgggcacagaaagagtaagtaatttgcccaaagtcagggaagggcttgccctcacgcccggttaactgcattaactgttatttgctcctaagcaatggttaattgctcctgagtttgctcagttgtttttgtttttgtttttgttttgagatggagtcttgccgtgttgcccaggctggagtgcagtggtgctgtcttggctcactgcaacctccgcctccagggttcaagtgatcttcctgccccagcctctgtgtagctgggactacaggagtgtgccatcatgttcagctaattttttgtatttttagtagagatggggtttcactatgttggacaggctggccttgaactcctgacctcaagtgatccacctacctcagcctcctaaagtgctgggattgattacaggcatgagccaccactcccagcctgcccagttctttttaaaataaaattgtataatgggttcacctaagactgactgattctccacatctggaaacctgggaactcaatatttaaccacctaatacaggggctggctgcttttacctagcatttgtataagcttaatcctccccagaataatacatatctaccctctaacctttgtcctcctatccagaggccaaagctattgctccatgtgtttattcctgtctataaatgtccacattagatattgaacctgagcaaaacacctagtggcttgcacaccctatgaaatgttagaccttctaagcgtgacttcacgttggtccatttacactcacccatttcttttccctggaagtgtccgctctgacctgcctctacccaactccaaaactgcttctgcattttagggattagttcctcttggggccaatctctccaataccctgaacagacacacaaacaccctctaccctagagaggatcatgtttgaggttttgctcccctaaatacacacatacctctgtattcattccatattcccttttttatgttcttttctttttctctttcttctttttttttaatttttgttgtttaatttgttttcttttccttactttttttaatccatattcccttttaaactgagacctctccgcagccaagggcagcatgatgaacttgtcacatccaccctggggcaagcactggccttgctgcgctatacacgcttagtgtgctctgccatcttccacgaagcagatttcccctttggaacggagacagatagcacctcctctgtgacctcaactcccaccccaggctgctaggaacgatgccctggtagccagtaaagagtcaaaggccaccagtgtcacagtgataactgtgtttgtcatttccatagccattttttttttaagtgtctttccattgaatgtcatttttcttgcctggcgagagggcgctgaggtgtagccatattccagagcctgaaaagccttgtgtggcctagtggttaagagcatgactctagagtcagcctgccaattccagatgtgctcactgggtgaccctgggcaagtaatttaatcacctggtgctgccctgtcttcatctgtaaaggacactgatggcagtccctgcctcaaatgatggttgtaggatgatggggaaaacaacaagtgtttagaagggtgactagcaagtagaattcaactctgctttgatgactcaatgtacgatgccaatcaccctgactgggccatgaatgggcacctactatgcgcaggcactgagtgaggggtgggccatagacagaaagagaccaaagcgttgaggaacgcagtctagcagtaaagctgatgtggaactgcagatcccaaagccccaagggcagcatactcgagatataaagtgctggacag

SEQ ID NO: 51391 - DNA, 1780 bp, Homo sapiens
gttgcttctattctttgaaacatctgagtgccactatcagcaggaggttctgccaggaattactagggtggctcaaatagatacgagcatttatttagcacttatttcatgctaagccctcgacttttacttatttaatactcaacaactttaagagggaaggattattcacctcttctcccattttacaggtaagaaaatcaaggctcagtaaacttaacttgctcagagcaatagagctaggaaacgctagagccgggcttcaaagcccaaggataaccactttttaaggtaggatataatcaatactaggtagaatgtcacaaagaatgtgaaaaatggctttagggttatcgagctttgagggaaaaggaggcaccagagaataaggtcactgtctaatggggcctaaggatgagaaagatttcagtaggcagcaatggcagagacaggacaggacaaacaacaaaagtgaggagcacaggctgtgtcaaggaagcctgggagtccgagttagggagcactggacacatagcgggccacttagctggggccaaatcacaggtgtcctcacacaaaaggttaaggcaggactgccacattcggcccatgggaagaacccagatgtggccaagacttgggaagctgctgccacagggcagactagaggcacaggatggccacttttggtggttgccccagaaaaaggaggaaactcaaaggatgtagatgggaaaagatgaccctaataaagcaactttccctcccccaggcctcaatgtatctgacttacaaatgtcctagccaaggaccccaccctctccttccctaataaacaaacagtagggtttgcaaatacagaatgcaaataggtcctgctgggccagctgacctttgtaatgaactcaggggcgatttacttagcaagaaaaaaactcaacttctccatttcctgcaacttcactgcaagctctaaatacagctccataagggtggggcagtgtctgcctaagaagtggtggagataattactccactgattctaagacttcaaaatacctcattcccaaatctacaagacagaatagtaactgcttctaacatttgagtggacgttcgccaggcaatgtgtgaaaaccttcacaagcaatgtttcacttcagaatcctccaacaactcttatcaggttcatcagacccattttgcggaagaggaaaccaagacttacagagattaaataactcgcccatgggatttgagtcagattcctttaacttcaaggtcaactctagctccagaatttctatggaggggtttaggggcagtgttgtagccagcagaaggtagaagatagaaagctgtgttgcaacgcaggcacactctaattctctagatgatatgttacagatctgcaactgttccgtacggtagctactagccatacacggctatttaaatttaaacaaatgaaaagtgactaaaaataaagtcaattccttgactgcactagccacacctcacgtactcaatagtcacacgtggctagtggctcacgtatttaacaatttccatcatcgcaaaaaaaaaaatcacaacggacagaatcaataaatcatggcaaagtattctaaaatcctttgttgctgtttatttttatgtttcagtttatttactttaacatttaactctaatttttttttttttttttgagacagagtctcattctgtcgccaggctggagtgcagtggcgtgatctcagctcattgcaacctctgcctc

SEQ ID NO: 51392 - DNA, 1642 bp, Homo sapiens
ctcagccttggacatcaccagaattacctggggtgcttttcaaaatcttaatgccatgaatgtaccccaaggcactgatcagagccctggcccaggcagcagcatctccaagctcccagggaacccaatggaccctgctctgtaaccacacgcatgcagccaaatgaggtacacctgcctagaacctcgccttctggtgagacccattcccacggcccttggagcccctgtcgcatagtaggcagcagaggggacccaggcaaaacctgctgcccacctccatgcccaggaagctgctggtgctgagtgagctgaaactttctactgctttgagagaaagcaagcaaataaaaagacacacagttcaaaaggcactcaactcaattgatttttttttttcacccacttacattagacaggaaaagaaaaacaacttagaacctatgaccaaggccagatacgccaagaggcagcacaggaaggagttttgttggtgagcccatccacttcttcaaacacagacttacaagggcccttgtccagcccccagagaatcttaaacaacccaaatcctcccatttgctcagtaggtaaaaacactgtcacctccaaacaaatcgggaagcaggcgagatgagagagccccaagcctaggacttccaggtgttgagacggggactgctctggagtggattctgcactgggaattgctacttttaagtttttggttgttcggttgtttctgatttgccttggtggctcatactcagatgaaacctgcagtctactgctaattcaagggagaacctcagcaatcgtgacaatgggcttccttaatgctcagccaattaatttactcctcaatttcattttcctctcctgtttgctacttaataaggccatatcagcagtgctatctccaaatctgagttaaacggctcacagcatcagttagttccctttaaatggcccccaaatttcttgtctgacatcctaggcagctaaatctgtcctctggcttttgtttggtctggagtgaggtatttctttgtttttgcagaggtgtgggtttttggggtaagtgtcctgaaggcagttccgagaagtaatggggaactcaaagtgacctcatttgtccatacccaattcgaacatctaaatggtctcactacagaaggaatcttgccagctatcgccacccatgcccgtgaagatggaaaaagccgagatgcaaattggagataaagcatctaatgaatcaatagtttcaaccttttcaccctccaagcattttaacagccttaagtaagctagccaaattgacagacatcattttagcttttttccttttccctgtggctgaggtgcaaaagaagagttcaaagggcaagaggtcagcaactgagaacacatagcacacagggaacaaacttaaatagtgaacaattttttagtatatctgaaatgcaaatttaatgggaaaccctacgtttttacttgctgaaatcattatgccacgtttggtgcctgaaacaccactgatgctcaataaatactacggaatgagtatatgttactctagtaagaactgggcaatggctgaaccaggcaaaatccaaactcagcttaccttctatgcaaa

SEQ ID NO: 51393 - DNA, 5774 bp, Homo sapiens
tccaaaaaatttgactaaatagtaaagggttttcacaaaaactaaatagggagggggttttcacaaagaaacactcaaaccagtatagaaacgatttccaaacaacaaaattggcacccaaaaaaccaaaaagatgactctacatagaagaggtcctaaatctctgggcacccatcccaggcagttcctgctgtcgattttatgacatctttacttcaccttcttctcccatgggcccaaaacgaggaagctgtaaaaccctggccaaatacaaccatttgctaagagaaaagccaacatggggcccatgtgtcctttacaagtgctctgcttgtcctgcctttggtggctgtcaccgtttatagggagcagcccacctccctcagagcacctggctgaggccttggttgggttttcagtgctgtcctggagaaaactttttttttgaggcctccaagggaactcctgcagagactgatgctcttctctaggctgaaccacagcccttccttcatgaccaccatattggattcatattacctgtttacagcccacaggacaaggagctctccaagggcagagcctagcaaaaggccttctacacaattgccctccataaacagcaaggaagtgtatctctcttctgatgggaaccccaaaacaaagcagtgaggggtaaaaaaaaaatcctgaaatcactatccagtgttggacccactacccacattctccatcctatgatatgggagggaaaatatcacgacatggcttcgaaccacaaaaagatttccatggaattcaagaagtccctttagcagttctaattttaggcagaacttaggaaagaggatagtgatggcaaacacaggtggggggcggtggggaggaactgaacaaggcctctattctgctcagcacaggtgctggtaacaggacacccctgtctaaagtgacacatggggtggaggaaccaggtgtggttggggttgtcttgcgccagtcacattctatactcctaacctcgtacaaagttctccccgcagcaggcccagttcagctctcgacatgctgattcttgagcaacaagggtgaagaaaatatttgatttcagacatccaactttgtttttttaacccaagttaattattaaaagaagaaagacatccgcagagtgagctgtcctcaattttggccagcaaagtctcctggtcttaagaactccccagacatcaccaaaatcgatgccggttcaatgactcaaaagcaaaggcacaaagctgctgtttgagacatggagccctcccttcccagagcttggatagaaactccaaaaagattccaggacctccttgatgcagtcaagatcgtctacacatcggaaggcagtcaacatcacttccagactactgttccccagacaaaccagctatgggcccttccctccagccacgtgaatatcttgtctcccctttcctctggaaccaactcacaccagccaatttgatcagcgatttactaatttgcatggatgggaggaaaggcagccagtaggtgattttgcacaacaccgttcattagcgaccaccaccacagcagggtagaataaacgggaaacaaaccaccaggcttcctctcgtcaaggaatcgatatgttgtttactagctgctgcttgctttacatggtgctgttccccagtggagaaaaagtcaggatttcttccacaccttactgcctgaaaaggataaaacccatgccctgacagccagccgaggacttagatgaagcatctttagaggaaagcacaaagaatcctctctctcttgcttttccatgtcttgaggttctctggtttcagaagatggagggtgccaggccttgaaattattccttttattgttttctttttttctccaaagaggaaattgactcccttcctgtgctgctgtacattttgaagaatcaaatgctactaataaaaccattttccttatccttttctcacccagcctaacatcacttctgagaaaataacctaaaaatttttatcaagatggcattccaaatgggtttccgacatttacgcttttccctcagagcaaacagataggagaccaaaggcattataaacccattatgggagtttaaagaagagaacaagaggataagcaggtcattagaaagtcagttgatttcagatattaaaaactgacttttgttgctggtgacttcatgcatctgcacactatatactgcttatcagatctgttcaaatttaaaaatttttaatttccatttaaaatgtcactgtcatctaatccatgatgaagtcttttaagaagcaaagtccaagaaaatattcaagaattgtcttatgcataaacaatcttggaaatcagacattccctctctcttcatctctcgagtctccaaaagtctaaaactctgcagaacccaaggcatgttttagtcttccattccaccttgcttttaaaattttactgccaaaacaaacaaaccaaaaaaaaaaaactttaaaataaatgatttcccataggatactgaacaaacctactaaactcaaaccgaaagaagtcaggatacacaaactctagattccgccgtgactgggcattaaagaaaatgtctttatttttaactggaaccatgcaggggaaaaaacaccaccttggcacccgtgagtccccagccagggcatagtgccacgcagccacaggatggcaggtggaaagcaggacagcccaccctttgggcaggtcaccttctgaacggctttcgattcaaacagtgaatgggaagaaccgagcctggattctggattaaagaacaaagagaaaaaactccagatgtgatcactccaggactacagtggacagatccgtcagtgtgcactgggggcaacagaatgaaaggggctgtctttcaacagggaataatccatctaattccaagtgcctggactataagcattcctgggcaagcagagtctggctgcagattatgctatgctaaggacaatttgtgacaaaaggcacgagagctgtagaaagatttcaaaatggacaaaaccaggacagaggcagcttgataaagttcaccctgggtgaggtggcagttggttctgaaaggtggaagcaggccatgacagctgagcattccttcccaaagaccatctccgaggcacgaagcctctctaaaccttacacttcatcagacaaaagctcctccaggcgcccaggcagcggctgaagaggggctgtccacacccactcggtgcacagctttccaaacctgcccactcgttttggaagcgagcttttaattaaacaccacctccccggatctggatctgttgaggcaaactggggctgggccagagccaaagagaagctccctaaatacacattaaaaaaataatttcccccaccgctcccaattcccacctccagccagctcgcgcggctggttttatttcctctggatgaataacacggggccctggtctatctctaggcaccagaaaatccacatccgaggatcaggttatccccagtcccaccctttgcaggaaaaaaccagggtgttgttccccgcccccacgcgcgcgcgcgcacacacacatgcacgcgcgcacacacacaccatcttcacaacccttccaagagaaaacctagagtgtgtgtccgtttgggtctgggagggcaggatacagttatttcgggggccccaatcttgcctttaggctcagctgggagaaggcggggcccctgcaaggctgcccgggaacttcggccccgcgccccgcgggagggctaagagagggcacgcacacctttaccagcttcggaacggcccaattaataactaatttgctcagataccccactccaagtagacctgacagccaaggagggactggctttccctctcagtctcctaggctaggggactccttcctgcgagcgggcagagcccccacttcctccccaccaccgcgccaggcgcccccaccccgtgcccggaggaatcaggtgtcctcccgggcatccagcccccgcgggtcccagacacttacttcagggacagacaatgggaaaacttgcagccagtgccttgagcccccgagggaaagaaatggtgccgccccctgggacaatgagcgggggagatggcgtgggacagcagacaccccccagagaagccacccgcccagtgaccccgcagagcccggagcagcgccccgggtgagcaggtgacactccggccgggagctcccgcaggtggccggtggccacactgcagggaagggccgggtgcccggcccggggtggaggcgaagcgcggcggcgaggtcagagcgcggcggccggcgccgcagccgcacccccggcgtcctaccttcatgtcgctgatgatggtctggaagaggcctccgagcgcgctgcattccttctcaatcacagcctccattttcccggctccggcagggcgagggcacacacgcggggccgctggactgcgcgcggggccggggctcgctcaccccagaaggaatttcaccttccgagagacccacctcggactcgcagcctcttctgcagcgaggacggggtgcaccagaccgactgttctctgcccaaaataataacagtaatttaaaaagccaaaccgctctgtagggtattcgcctacaagcagcgctcggctcctggccttaaaaatgccgggagaagactgacaatcaggccaccactggtgcccactacggaaacggcaaagcccatcttgatgcagagaaaatcgcccgctgacccggggccagcgccattgaaaaacgcaagattttccaatttaataaatttttctgcaattaaaaaaaaatcgcccaacagcagagcgggtcagctcgcggcgtccggatctgttgctcgcagctgcggccgccgcctccttttcactcctgcgcgcccggccccggcgctcgctctggctgggctcccggggacgttcggaggggcgcacgcgcgctcgcggccgtgcccgccaagcggaggcgcgctctcgcggccgtgcggccgccgcacgcgggcggggctgggagcgcgcgcccgagaggcgcgtggggcacccgccgcaaagaggagcctgctggtctgctggcgggcaggcggcgctgggccggagcctctccctccggtgcgcacagcgcaccctctcctcccccggccgcccgtcgcagcgcggagagggcgtgtcggcaccctgcctggcgagcgcccacccctacaatggctgcgagcgcgcgggacggagggtgcaccgccgctccccggggacttgcacgggtggcgcgcctagcccagagcccgcttgtagtgagcgctcagtagggcgggaaagctgctgccgctactgcggccttctgagaagacgcccattctctgatgtcaggactgcatcgccgagtcctgattgcaaatagcgaaatatataattaaggagagttcgggggcgtatcctgcaatgggatgccgagttcgataaagttgcaggatgctgggaaagtggattgatttgctgttgctaaatgaatggaaacagcgttagagcttctgtccacgatccatcagtctatcgagattgctgattgcctatgacttggacggttgatggttttcaggcccactgagagcagccagcgttggtataaccgcagggagccctcctgggaggttgaacctgcagagcgcaaatg

SEQ ID NO: 51394 - DNA, 724 bp, Homo sapiens
aatttagaaatagcagttctctctagagactcattcatgaatatggaaagatcttttatcagataattccccccaggggtcctttaaatagcaatctccttcgttttgattcaatttgtagaaatcccatctagatgcattactggaccacacattgtgtaaaggaaggtacattatgtgttgggtaaccatttggctctctctttcttcccaacttgtgactaattgattttgccattaattgggatttcccctggaggccatttgatctgtttgcaggatgagcagggagttagggcagtccctccagatgggacggctttcaataagcagacagtccaaaggggcatcagagtgatacagaaacgattaattgaataactcacttgaaaatcatgtgctgctttaaagacctaaaagctaagtaaatacctaagtaaaggccatactgatcaagtaagactccttgttgcagcctggctgagaataatgccaggaaaaaaaaaatttaagagcatcccattaatggattctttaaaatactggaagcatgattccaggcaataacatactgtaatccccataatactcacatttgcataactctagataatttatgaagcattttcgcagatactgtgcagatctcacactgacacgggggtgggttggctgtgaaagggctcaactggacttacattccaggagcagaaacaggcttgga

SEQ ID NO: 51395 - DNA, 882 bp, Homo sapiens
acgacacatggggattatgggagctacaattcaagatgagatttgggtggggacacagccaaactatatcaagggcatacagattgaaggtggaaaactcaggataaggcaatgacagtataatgaggaagacagaaatgctcatcaaaaccctactggcttggaatctactgtcctaataatgaagctaatgttcttcattttgcagccacttctactcttctctctttattctattttgcctttgtttaagcaatgaagcttagaaggcagggttcatacgtgggtcagactcttaggtaatttttccatgtacaacaacacaggaaaccaaagcaggaccttggaatccattcaggattgtgatgattaactttgtgtcaacttagagggtgtttctggatgagattaacatttaagttggtgaactttgagtaaaggagatttctcttcataatatgggtgggcctcatccaatgagttgaagatctgaatagaaaaaaaagaccaacttccctgagcaggaaggaattctccagtagactgcctttgaacttcattggcaccactggctctgctgaatctccagcctgtgggcccatgctgcagaatcggacttgctagcctctagcctccataatcacatgagctaattttttataatgaagctctatattcatttattactagaataaatctctttatatttatgtaaatctctctctcttgctctctctctctctatatatatatagatacacacacatatacatatatatttacagaggtcaataactgtggcccacaggccaaatctggcctactgcatgcttttataaataaagttttattggtagggtacacaacaaagcacatttattt

SEQ ID NO: 51396 - DNA, 707 bp, Homo sapiens
actgtctaattcttataacagtgctatgagaaagtgatgattgacttattttgtagtttgaaaaactgactctcttggccgggcacggtggctcacacctgtaatcccagcactttgggaggccaaggtgggtggatcacaaggtcaggagatcaagaccatcctggctaacatggtgaaaccccgtctctactaaaaatacaaaaaattagccgggcatggtggcgggcacctgcagtcccagctactctggaggctgaggcaggagaatggcgtgaacctggaaggcggagtttgcagtgagccaagatggcgccattgcacccagcctgggcgacagagcaagactccgtctcaaaaaaaaaaaaaaaaaaaaaaaagaaagaaaaactgactcttagggaaatgacgtggcttggccaatgccacactgcccagagactgagtcattatttaaactcagggttatctgatgctagagccaggctttcccctttctgccacccacctgctggcaacagaaggcaatcacatcagtgaccatggcaagaaggacctgttccgtgtcctcactctggtaggcactgctcttttgtcacttaggagattcttccagctgctcttccttggtgtccagtaagtaaaactgacaagaaacagaacaatctcttgtagcaaactgaattctctatgacatacaaacttga

SEQ ID NO: 51397 - DNA, 1683 bp, Homo sapiens
tacagggaatattaatttcttaaagtaggcaattaacttggctgaacttgaagtgcaaactctgtcttccctgtggtttgcagcagcttaaatatcttttaatgttagctgtgctgtttggcatccttgttttacatcagctatgattaccctgaactctattctctgattattcaagtcaaaaacactgcaggttatctcttggagatttaactgctgtgtatggcacagagtaggacctatcctcagacaaaaagccataaaatatgaaatttatcctgtactgtttctttcttccaaatgttatatgtcttccaggaattacttgtttttgttcactctgcagtgtctccaggtagtgtgtgtagttatatatgcttttaccattctttcagtggttacacttgagatttttatgtgcttccttgacatattattgttaatataaagtgcactttcatagagagtacttttactacttcccagaaaatgcaaggacctacgagagtacttgaactccattcgcctctcctgttttttgtgttcatgacacattacatgaatattatacatatatatctcagagggagtatataccacaatgttaagattattacttctggatggtgggggttaggatgatatatttttatctgtacattttgctttttcaacaataatcatgtgctttgccaaaaaaatttttaaagaagacagaagggagaagaacacttgccatgcagaccctttaagccagagcacttcctccctgctcagctgctctgcacagacagactcttgtctccccactggacaacaagggtgaatcagaatgtgggccaggctgtgagtgagcaggaaacccttcaggccagtgagggatgcagagtcacagttcaagcagaatgaggagacatgcagcccagttgctgcttgcttaccagctcatctgtcccaagagccaaaggccactctattcaggatgatcagcaatatctggttgtggacgtgtttgagcccagagcagctgagaacaggatgttgtgcaatgcctgggtaaatccagagccttcctttctcagagcctgtggatgctgccagcaggcctaagccgatacgaaagataattaggcacaaattcacagtaaccttttattcctcacactgccttctcaggcgtggcttttgtccaaattatggggcaggtcaagctcaatgcttcatcccttctctgcctgcctctgacttcctgagtctaggcctatcaaaacccaactgtcctggggtctcatttctgcaaaactctactctctgctaggtgataaggggggtgattaagtgaaaatactgctctgtatttctctaatgcttttaaactatttccatctagattttttttctgagtcctacaacaagagaatacagaaaccaccgaagtgaagttttctaccagttttcttttttttttttttcattttttaaaaattatactttaagttctagggtacatgtgcacaatgtgcaggtttgttacatatgtatacatgtgccatgttggtgtgctgcacccattaacttgtcatttacattaggtatatctcctaatgctatccctcccccatctccccaccccacgacaggccctggtgtgtgatattcccctttctaccatcgaacttataa

SEQ ID NO: 51398 - DNA, 518 bp, Homo sapiens
aatttgtcactgcccactgggaatctccactgggttgtcctacagttgcctcaaatgcaatatgttccaaacaaaacatatctttcccttgagtggtcttctttacttaaactcctctttccactaatagcttagacatgtgaggaagattgcaaaaaaagatcctccacccctccctgtgtccacatgtcattggtttatcttttgcaatttcctaacatccagtcaaatgagtcactgcatgcttttcaaatatgtcatgtgcttccccattaccataactttgctcatgctattttctctgtctggaatatcccctaccaactctctacctgtaagaatccttctcattcttgaaaacctatctcaactgttttcttgtataatacccagcctcattagccaacaaataggagcattgtttccttccaattttacttatttcatttgacttagttgactttacactaacatttctcatatacttttcttagcttcctaacatttagggagctcct

SEQ ID NO: 51399 - DNA, 884 bp, Homo sapiens
cttttaaggacatcagtcatgttggattaggatccactcatatgacctcattcaaccttaattacctctttaaaggccctatgtccaaatataggcacactgggggttagggcgtcaacatatgaactttaggatacttgcccgtcaactcctgatagctccaaccaaggataacaaaaacagtcccacacattcacaagtgtctcctagcactttaagaggaattcctattctgaggttcaatgtgcagaatttccacatcttctttaaatagttacgaatacctgtgcacttgccaatttggctatcattttctgatgacaggcgaaacatttatctgagaaaagcgactttttaatggactctgggaaatccaacgcattacttacatcattagataaagctgacaatatttctctgttcagaggttgctagccctgaaacaatatactattaacaaaggcagaaagatttaaagtgggtatttatgtattgcctccctggatcgaatacattttttgacaagtgagtattataaaaatcaataacattctgttctgaaatctagtataaaaagaatttagtaaggaatttaaagggaggaagagtctcaggagaattaaaagatggcttccagatagaagaagaagacaaaggattaccctccagcagagttgcagttacgatattaaacacattaacctggacaggtgccgtggcttgcacctgggaggatcacttgagctcaagtttgaggctgcaataagctcaaactgggtgacagaacaagaccctctctctaataaatatacaaatgcatgaatgaataaacacattaaccaggaagtcatttgcatgtgatttccctattaatactcacccca

SEQ ID NO: 51400 - DNA, 591 bp, Homo sapiens
tctggaggaagactggcttgcagaggtaggggtgggggaagatgggggggtgccaagatgagaagatttgacaactaactttagagaaaatctgtggccaaggaggaaaagtgacccataacattctggagcgaggtatttggcacctaggcactctctctctaggaattcattccaaatgattcacatcacagagtatctatgctcagaatccactgttacatccacatttattcatgttaaatctaattggtacaaatatcgctttatgtttgcataaagattcctggagattatgcagtgttggtttgctctgcagcctttcattttgctgccgtcttaccaaacagctgcctctgaagccacctgctgacacagcatggaattttgagcatttgacctaaccaaggaaagtgctatcccaagctaacaagagagaagacataatcatgccactgtgctccagcccactcgattgatgccctgggtttgctgtagcaccagagtcaaatcatcttgaacaattctttcccctcccaaagcccacacccactctcccagccaccttcaaaagagatgttgccatctccc

SEQ ID NO: 51401 - DNA, 1359 bp, Homo sapiens
gagatcgagaccatcctggctaacccggtgaaaccccgtctctacgaaaaatataaaaattagccgggcatggtggcaggcacctgtagtcccagctactcgagaggctgagacaggaggatggcgtgaacccaggaggcggagcttgcagtgagccgagatcgcgccactgcactccagcctaggcaacagcgagactccgtctcaaaaaagaaaaatactagattgattttgattctaatagtgatgataattaatctgatgatattctgatggcaaggaaaagtataagctccaatcaggcccctgtcgtaagccgcctgacaagtgagagaaatgaggttcacagttggctggtcacagcacagggaaaggaaatccacccccacgctccttctggtccaggaccctaagggttaagatcaacgagagtgggccatcactgtttcctagaacggccccagcaaagccgccgggggagatgagggtaacttcctgtttctgccttccgggtttgagagtttaggaccctgggttggtggggtcagagggagagggggtaccttcctcccggaccgctgggggtgcagggcgccttgggtgtagcacccagaacagtgagttccttcttggggggaagggagccgagggttgcgggctagaggagtggaaacagccccgtccaggctgcagtggacgtccgggagagagttcccgctgctgccaggggcgaaggcccagcatctcccgccgacgggccaccgtcatccttgtccgcggggtcccttacgggatcttgtcggccggagaccgtctggtatcctggaacttcaccccccagcgtctccaacttgtaccagccagcggttcttaaaactaggcttcaggcagtgcattttctttgaaggctttctgatcaaagcacggccccactctgatcacattgttgctctagaacagtgaaaacactccttccccgtggagagacatcttaatggcagccttgtatggtcttgcatttgccaccattttgctgagccactgttccgggggctcctttgctgccaaatttaatagtattttagtagggaaaatgggggagatggtaatgtgttgcccagactcttgctgcttttgtaaatactttgataacaatatgtaacttaggacagcaaaatatataactccattcgaacaactccacccccttcctttttttgcattcaggtgtatggttttttctcccccccaactcaaacactggggatattagtaatgtagactagtttcacgtttctctagaacaaatccccacttgctgagtgtgcttagggaatgtcgactcactttgttaacaag

SEQ ID NO: 51402 - DNA, 2592 bp, Homo sapiens
tcattaaatacatgttatggaggataaattaagggcagagcattgtgctaggtgctgtgggtgatcttatcagacacagatctttagggaatctagagattaaaaagtatgaataaagttatgtgacttggtgaaggtcaatggcgatttggtggaagaggtgacaatgcagccacgctccaaaaggcagaagggatttgcacctattatcataggggttaaagaaggaagtccagagttaagaaacaggatgagcaaagacactgaggtcttaagcctcaataaattttaggtaagtttcatcgtagtagaataagggctgtctcactccgagacttttgcacacttttgctccctcggactgcttgtcctggacaccgtgtaacctccccctgggcgcctcaccagacttctccaggccaagggaaggaccacctcttgggtttccatggctccctctctaaccacccccttctcaggacacctatgacacgactatttgacttctttgcctccgagcccccacccccaacgtttctggtcttgagagaacgggctgggcgcatccgtgtatctctagcctgagcacctggagcgtcctctccttttcttcttaaggcaaaagcctactcattcttccagcttcagctggaatgtcaggctctccacgcactcatggccctcccttccgccctctccacatacacagggcagggaagctgtgtctgattcctctttcggactccggggactgacatatcataagcgctcaataaatgctagcggaatgaatggaaacgttccgacccgaggcagcggatcactccaggcttctcctcaaagcgagcacacctcagtccagggagggcgcaggagctggggctgctgcggtgaaccaaccccaaccccgaccccgacgccgatcccggccccagagcgcctcctaggcgacccctggccccacccacgccggagccggcccgcgcccatccccacgccccaacccgcaccacgcaacatcgccctagcgcctttcggggcgtcgccgcgcaggttgcgccgcctccgattggccaaacgcggcatagcgccatctcggcctaccgcgcggtgcgcgccctcattggccggcggcggcaggagcaggggtagggggcggggcagcacgcggggcgcgcggtatgggcggactcgcgcctgagccccgcccccggtccctcgtctgggccgagcccgcccagctggctgagacgcgtggagcctggcggcgagtgggggcgtgcgacggttactctggttactggggccgcgccgcgctggcgagagccgccgcccgcgagggatgctggtgaggaagccgtcgggagccgccgccgccatctgagggaggtaccctggaaaccaccttttatcggtggggaagtgcagtcgcggtgggcggctctgggggccagcgaaacgggaggcctctaaatctttaggttggggctgcattgccctggagccgcactcttgagtccgaggccatcttttgttggagaaggcgtcggcgttggcgttttcccgaggttgggctgtacagtgtctccgtccgcggaaaaagaagcctctgaacccgcgccggcccgcagcccccgtgccttccggccgctgctcgccgtcgccagaggctaggccacgtttcccccagtgccgaggtgtttctgtgaccctccctccactcccattcccttctgaaagggcacctgctcttggtgagaaaagaaattatagcacgaagagccagtatcagaagagtatccatcacccgcagcaaccgctcagggaacaccatcaaaaaagaaaaaaagggaatatctggatttcctgggcgaggaggagcgagtctgctcgggagctgttccagcaggcgatttttaaatactgctttctacgccctatacaacttggcttcacatacttttacactaactttatatgatttttaaaaactggtctgatcggacttctcgtcctgggacactgtttactggagtctggccggctctccgtgctcctcttggtacctcattttggggagaaccttaaacccactcgagcagataatctccgccttgaccggtgccaccaaagaagccttggaaccatgtggacttttctgggcattgccactttcacctatttttataagaagttcggggacttcatcactttggccaacagggaggtcctgttgtgcgtgctggtgttcctctcgctgggcctggtgctctcctaccgctgtcgccaccgaaacgggggtctcctcgggcgccagcagagcggctcccagttcgccctcttctcggatattctctcaggcctgcctttcattggcttcttctgggccaaatccccccctgaatcagaaaataaggagcagctcgaggccaggagggtaggttgatttcaaagcgggcagatgaatgtcttatttaggagtaggattgggttcactcaaatataagttttatttgaattgcaaaaggcggcaggttagatgcttgtatacattctcatgtattttttattttaaactctgctgtgccttgg

SEQ ID NO: 51403 - DNA, 1986 bp, Homo sapiens
aagacatcgggaacaggtggaaggggcttatctaaacattgagaagacctaagacaacagatggcatacaaaatcggaagtgatgttgcaaaggagggagactgcattattctgtatgatttcaaaaggtaggaaaaagctcagcgagtgaaacatccagagacacaggttctaataatcacaatcaggaactttctaatgagaacaagacttagccagtggactgtgctgcctggagaggtagcacaagccccctcggtgagagtgttccagcagtggctgcatgactacctgtcaaggatgtcctagagctcattcatgcacttagtgggaggtcaattaaatgacctcgaaaatcatttccagttttaggacttagtagtattttgtgtggacttagaagatcactttggttcgttttattttttttgagatggagtctcgctctgtcacccaggctggagtgcagtggcatgatctcagctcactgcacctctgaggcctcctgggttcaagcaatcctcctgcctcagcctcctgagtagctgggattacaggtggccaccactacatgtggttaatttttgtgtttttttagtagagatggggtttcaccatgttggccaggctggtcctgaactcctgacctcaagtaatctacccaaagtgttgggattacaggcttgagccactgtgcccagccgctttgattcgttttttacattatagtggcaaaaatgaccaagcaaacatgacagcaaaggttatgtagccaggctgaccctttaggatagcagagaaggaggcacaggacccagcatctcatggaaataacttttttttctttatcccagaaaagccacatttaggggcaggggaaaagaactggcaggaattaaagttttataagcattgtatcaaatagcaactcttgtgaaatttgcttctctacatgcagacactgcccaggctttgacacactgatatgttctctgactcccactgaagtgagtggaatcatctcttggcagtggcccagcaggagtgcaggggctcgctgagattgaagagctgcatccaagagtgcagaggaacagggctgcactttcttccccatggtagttactattcatggtcctgagtcactcctggaaaatcaatgtgagtagaccggatggagttcccctggcagggtgactaaggatggacacacctgtaattgctctaaacaaggaggtatgccctgacttgctttacagagaagggtgagcaaccatttcccatctctattagggcgataagaggaatttggtaatgtgaggtttaagttaggttttgtgacaagaagtcccacgtagtcctggttggtcttctgtaccttgtacactgctccaccgtggagcagataaactggccaatcagcgccaggaactgctcggtgtaccgggaatggaactgcttcagcagagtgagcagtcccaggacaagtggtggccaatcaaccgggtcggtcggttttcggcagaccattcctgcaagggaacaagttgcaacaccatatgaagtacttgccttcagcaacattcattaaataccaacgctgtgaaggtcaaaatgtttggggcccatattctcgctggcagatgatattttggagggaatgacaattctgggccatattttgaattagccacaggattggtagggcattccaggggtctgaaggattcaaaaccaataaaacggttactaaattttgtaattatcattactggttcttttgaattactcaattaacatatattattgtagcaatttttaaagatacagataaatgtaaatgagaaaaaaaatcactacaactgacttctgttaacggcagcatgacatactagataccctgaactactatcttaagtgaaaagctggataaaatacttttagggtatctttaaacaaatgttgagtaatatatatacataaaga

SEQ ID NO: 51404 - DNA, 1832 bp, Homo sapiens
gcctttcgcaaaacctcagttccataaaggaagcactggtctccacaaatccattatcacaaacaaaatataacggttgctgatcaagataaatgcaagctgcatatattttccagaaaagttctgaaatgaggctgaacctgaaatcctgggaaaggcaggtgaaggacaattagagaaggtgtcccttgtagtgcacaaagacagtaaaacttcgccctcactacgcctcacctatgtttgagggagctccatgcgcttgcaatcaggagacccagttttatggctctgtgactttttttctttctcctgtccgatcataatcctgattccgatcccaggaatcagggccctgggaactttttttttttcccccaaatgcaaaggattttgacatcagtatgtcacaggtgaaggcattaaggcgcggcgagcagcaatgacttgcccaaactcacagcccatggcataactagaatgcaaatccacgtctgtcagcctgtaaaagtcctcactactagcctttcagttttctcaaaagcaaagagaaataacgacgacatccatacagcagtgttcccggaaacttggaaggatgagattcggaccaagcagctgaacggtgcttcctaaagcgaggaaggggtgtgcaaaatgatttccccctaagcggagacgaagagctggattacagcccccgccccagaaagcccctaagccctccatcccgagtcccccatccaggctgcacgcgactctgcagacctccccgtggccagcgcggcccagcggggaggggaagggggccatgcaaaaatggggcgcgctcactccatccccactcacctgtcagccgggccgcgccacggcgcacgcgcagggccggaggtcgcgcgcggagccggcacccagtttccacccctccctcaaggcggcggtcctcttctatccgcagtcccggacctggagcgggtcagaccccgacttccgcccctgactccccaggcggtcacatgaccgaagcggctgggagcagggaggggcatcatgtgaccactcgccggcgacggctgatgacgcaagagcccgctctcacttttcagcggcaggcgaagggggctgaggaaaggaggtgggtctaggcaggggaaattggggtgccaccagacggagacagcttggactaccaggtagggaagaagcgggggacggcaatggggagggtggcaggagtttcgccaccctcagggacactccacggggactccgagccgggggtccgtctacccggattatggttgtggaacttttcacgccacggtagtgagtctgggacagtttaccctcctgtccgagacgccatctctccatcctttcgcctcaagtgtgtaggggcaagattacgaatttttgatccaaatagattttgtttgaactgactttaaaagtaaggccacgggaaggtcgtttgaataaactctctggacctcaatttcctcttcagttatgtagattgcagtgagaattagcgataaggagaataaagtgccgggacaccagtttatggcattctgtaggtgaccgagaaatgatgatgtctgttgttatttttgtaactggccaaatctttattggtcccctattttgtgtgaggaattgctttatatgcaatagaatatgtcagggttctagtttaaggaggtgtcagtttaaagaagctgcagacatgtgagcaaatagttgtgatgagtttcataataggagtgtgttgtgtacatgtgcatgtgatagggataatggtagcatgagggagggaaaagcaattgtatgag

SEQ ID NO: 51405 - DNA, 1940 bp, Homo sapiens
aatgttaatgtacctcaaagatgtaaactacatctttgtagttttcaaagatgtgtcatctcttctcatgcctctctgccagggcaagtctgtgaatgggcttcagaggtttggttaatgctctgcaattctacaaaaatgtatgtgcatgaggattaaaagttttaccagattcttgctaaatatttgatagcaacatttagaagtaaaggattaaagttttctctatatattgcttttctttctgtgatttcggagctatagggcagaaagattacagttactatggtcaggcagttaattgggtatttgttgagctatgctaaagtatggtgatgatgatgaatttgttacatacttaactggtgctctttttacatgtgctatttcatttgatcctaacagtaatcctgtgcagtagggactgttgctgtccccactttacacatgagaaaaattgaggcttagtgaagttacatgcattttttaaggtcacaaagttagtaaatgtttgagtagggatttgattataagcagtctgacttcatagtttctgcccttcaccattacacttcataaaaaatgtattgtgccagcgtcatggcctgtgcagtcaaatgacatttagcgacgttttgcttagataattttggttgttgttgttttttttttttttttttttttttgaggataatgttatctgatttttttttttaaatacccaaatgaggttgcatgctttttctgaaacatcctctcatggaggtcatgtatggtcatggggggaaggagctgggacctttcagggcctttgtactgaccctagactgtctactttcagttcttgtaatggcaggaaaagaaacccctgtttggctaagcaacagctctcatgtttgctcttctttgcagctggttacagtcctgactcatggaagtgattcatcaaattgattgaatgatagtctgttctttcatacatccacaacttgtgttctggctaagaatcatcacctttttagatctagttccttttgtcttaccttaatccccacgcagccaaaaaagttttcactgtgtggcagttacttcagagttcatgatgagtaaaaaacaaccagcaaagtgaaaaattacatggtcagggacatttactgccctcatgaataactgaccttttacatttgcaaatgttaagcatttccttgagagaatagttttaaatccgggtgctttgggggtaagattctagttttgttcctgaataagacattcttaaatctagaaatttggtaagtatgggtgaaaaaaaactcccagaaaattgtgatcatccataaccctatcacccatcaccttattttatgaaaaagggataagcattttgcttaaacctttcatgttcaaaatgttttgaggctggttgcggtggctcatgcctataatcccagcactttgggaggccgaggcgggcggatcacttgaggtcaggagttccagatcagcctggccaacatggtgaaaccccatctctaccaaaaatagaaaaattagctgggtgtggtggtgtgtgcctataatcccagctacttgggaggctaaggcacaagaattgcttgaacccaggaggcagaggttgcagcgagccgagatcacgccactgcactgcaacctaggcagtagagtgagaccgtgtctcaaagaaaaaaaaatggtttgaaaattacttgataattggatatgtcaatacaactgacctgatattttcagggcttgattttttagaaagacttacattctggatttttcactgtgttgtgatatatttctccattagagcactgctttttgttattaggagtctagttgagtcggggagatttctttttgaccttgttcctgtcttttatttcataattattgaatagaaggagtaacta

SEQ ID NO: 51406 - DNA, 2044 bp, Homo sapiens
tgaggtcacgtgacctcagcctggccaacatacccaaaccccatctctactaaaaatacaaaaattagctgggcatggtggcacacgcctctagtcccagctactcgggaggctaaggtgggaggatcacttgaacccgggaggctaaggtgggaggatcacttgaacctgccaggaggcagaggttgcagtgagccgagattacaccaccgcactccagcctgggtgacagagtgagactgtcttaaaaacaaacaaacaaacacacacacacagagattgctggaccttgccactagagtttcagtaggtctcgaatgagtctaagaatgtgcatttctgagaagttcccagggtctgcgggtacactttgagaacccttctctagtcagtatttcccatttggtaggaaataccactaggtggcaccagaacacttcttatgaagtagctattggctttttgaacagtgcttattgcacagtttaggattatataaaagatacaatcactaaattattggaatttggagcctgaattatctcatgtatataaaaagtaaaaatgtgttgattctattagaccagagaactatacgactattaaggttaaatttttagatcaactcttccaggaatgaggactatacctctcacctttgctgctctccttttcagttgtgtgggttaatcagtttcatttaccagtgattgatgcagatcctttcacaaaataaaaataaacatttcatatgaatcataagtatttattcttccaggttaatggatcttgattttgttatcgattacattttaaaaccacttttaaaagacttatacatattgtgcgcataaatttcttgtaattttgtccttcctccagtggcccagttgtatttggggcagttttagaatgtcaaaaagggtgaaatgtgctttcctattggcttccttactcagaaagttgagtagtttcctttttaagagctattgagaggaaagttttggctgctgttcacctcatctcacctcctgttaccgtggaatctcactccataaatttccaatcattccaacacctccagattttctttcctccaccgactgtaacaacctgaaagttggcatggtttctccacatgatggcgtgtgtggaaataattacttgctgtgttcccctgtttgctaagctctcccattcacattaggatgtcactttgtgaaacagtaaatgagtcactttttagtttttaaaacagcgtgtatagtatctgaataccatctgggtttttctagaatcctgagaataatttttctattaattctgcttttttgtctttggagctgaagcttggtttaggtttcagtggcctaacagggtttgaaaatgaccatcacagaaaaaatggaattggagtcactcaatcagattaaaattagactagcactttattatatctctttgatcattggaaataattgagactagtttaatgctaagcaaagatgacagcttatggaagaagtagatagaacagactttaggattatttttgagacatcagattcctttttaaaagacataaaattttacgtcttctagtaagcagaaaggagctttttgtagattggcaattaacatagctaaaccaacttgattattctagagaagattattttattatccagacctattttttctccctcttctttctgtactttataaatgaaattatttgttatatataaatgtaaagcattatttatatatgtaaagcattattatttatatatgtaaagcattatttatataaagtgttagccacatgtgtaatttaaaattttctgctgtccttattacaaaaagtaagaagaaagaggaaagattacttttagaaatgttttatttaaacaaatatgtctaaaatattttaacatataatcaatatgaaagttactaatattattttgacttttttgatactaaaattagaatcttacagtacatgtcaacctggactagccatatttcatatatttagtag

SEQ ID NO: 51407 - DNA, 2104 bp, Homo sapiens
agtagctgggactacaggtgcccgccatcacacctgactatgttttatatttttagtagagatggggtttcactatgttggccaggctggtctggaactcctgacttccagtgatcaccctgcctcagcctcccaaagtgctgggactacgggtgtgagcccagctaggattttctgcatacaagatcatgtcatctgtgaatggagatagttttattttttcctttccaatctggatgccctttatttctttttcttgcctaattgtcctcgatagaacctgcagtacaatgttgagtaaaagtgtcaagagcatacatcctttttactgatcttagggcaacagcatctttcaatattaagtgtaatgttatctggagagctcccttcctcctgcagtggccttctaacgccctttattgagaaagcttcacatcattctcactgtaagagaaaatgcttcaagcacttccatctattatcacagagcgggtattgaagggtgaattttgagctgagaggcaattaattgataactggcacagaacatgaataagcaagtggaataaagctgtgaaggtgctgtgatagaaacctaattgcaggaaacagtgaaggcaccatggagttagtggtcaattctagcagaggacctttagtagaacttctgtactggaaatgaggacattaatgatgagtaggcattccctagagagtgggagagggtgtttctgagggtagcaaagatgagaagagctgtgagcagcttggtgtcaagatctgtgaaagctaacaggttagtctgccacagtgtggcaggatgttggcagaaggtgagagcttatgagtcagagacaaaggtctttatcacttgttgcacattgcacatcaaacagtgtgagtatcatagttcaccttgttgtcccctctgtcccaagtcctacattggtgaggaagggcccagggtgatactgtggagggtttgtgtcacagctgaggaacttgggggctaagggacccagatttttgtaacgagcagtaaacttccctgacctttgccatggaggaagacatcatcttattatactgccctctgatgtagaaggaggcacaacctcaatcttccagggttttgttcattatacaaacatccttgaaaactataaaagggcagttagtcatccaggcggggtgactcacacctgtaattccagcactttgagaggccaaggcgggcagatcacttgaggtcaggagttcgagaccagcttggccaacttggtgaagactccatctcttctaaaaatacagaaattaagctggcatggtggtgggtgcctactaaggaggccgaggcaggagaatcacttcaacccagaggcagaggttgcagtgagccgagattgcgccatagcactccagcctgggtgacagtgtgagactctgtttcaaaaaaaaaaaaacgagggggacagttattgtctttgctcacaagatgtgaggagatgtgtgagaccatgaggaatagtgtcccagcacctggcaggttcagggaactgcatgttaacttcaggttgggcctttccaagaattttaccaccacgtattatagcttcagcacttactacctcaagaagatgtagtaccttacttgatgcacgaaagtcctatttgctgctggattccttctttccctttttggcaaagagggcatcatattctgttggctaggcagaataacctcgagctttcagaaacaattttggaatcaggtcgctaggttcaaacacagctctggcaattattagcattgtgtaagttttggttctctcatttgcaaaatgaggataatattgtaaaatagcagttaacatctaataagtatttaactttgtacccacacacatctcccttattctcactttatttaggattgatgtgagaattaaatactgtatataaaatgcttttcacttggcacacagcgttcttattttatctgtcagttattttgttttgcttataattatttggttctttcgcaggtgagagaggtggatgctttggagcttttggctcagaaatgataatgtacataacacag

SEQ ID NO: 51408 - DNA, 3292 bp, Homo sapiens
atgtcagcgctcaaaaaagctttggattttggagcattgaagattttggatttttgaattggggatgctcacctttattagaaatacagcattgactaaaatagacatggccattgtgctttgagcagaagctggagagacttggagagggccagactagtggtagtaggctcttgtaagtcaaattaagaagctcttactttagggcaatgggaaggtgttaaagagtttaaaaataggaataggataattttattttgcattattctctggccataatgtgggaaatggcttcctaggaatatgcctggaggtgtgcctaacagttgggaggttgttgtagtagttcccagctattaggtagtagtgacttggactagaaaggtggtaagggattgatgagaagtagatcaatttataaaagacaaaggaggagtaattgatgaaacttgatggtttattgaatatggaaattgaggaaaaggaagaagtcaatggtgatactcaaatttctgacatacgcatctatgttaatggaggccccattttctaaggtggtgtgatgctttgctgttgctgctggaacaaagtaccacaaacttagtgacttaaaacaacacaaatctcaagcctgaagtgaatcttaactgggctaaaagcaaagtgtggcagggccatgtgcctttctggaggctccaggggaaaatcattgtcttgccttttccagcttctagaggcagtgcacattccttggcttctagccatcttccatcttcaaacctggcaatggcccattgagtctttctcatcctgcatcactatgacattaactaacctgcttttctctttcattaataacgggccttgtgattacattaggtccacccagataagcctggattctctccccactgcaaggtcagctgattaacaatcttatttccatctataatcttaatcccccctttccatgtaacataacataattgtggcactgggggattattagagggccattaatctcctcacagcagataagaacacgttttacagaggaaataaatttagttttagagatgcattcaagtggggatgacaaataaacagttggtttttgagcttgggataaagatatagatatgacaaaagcctatacatgaaaattgaagccatagaatgaatgtttgtttcttaggtggggagggaatacgtgaaatgacaagaaggcccgggccagtgtccttagggtttgggtaaagttgcaggtagtgagattgagaaggagccactggagggtaggaggaaatctagaggaatttgattttaaggaggttggtaatgacctttatagactattgtgtgtttggtctgaaaggatacttaaacatctttttaagcctattgctattacagatcaggaaattgaggcccagagagatgaagtcacttgtctaagattgtataactagttaatagaagtgcttcttcattcctacttagtttatttgccaccctgcaacccaggtccattaaatcttttcattttgaagatagtgttaggaaaagatttggctctgtgtgtgtgtgtgtgtgtgtgtgtgtgtgtgtgtctgtgtgtttcattgatattctgaatactgagagcaaattgctggaatgatgtctgactggtgccttatttacatgcaagttaaaaattgtttatactaaataatagaattaataattactttttaaatcatgtaaacttttttaaatgcaacttcatctctttttgcagtttctttcacctcattttgcaatctctctctatcctttttattttttcaataagttttttattttggaatgatgttagatttaccaaagttgtagatagtggagttcccatatacccataccctcacacagttccctcagttgttaagaagatcttatactaccatggtacatttgtcaaaactaaggaacaactctggtacattcctgttgactaaactaaatagtaagctccagactttatttggatttcactgatatccttttaaagaacgttgtctgggatccaatccaggatatcacattgcatttaatcatcatcttcgtagacgcttcttagttggtttcgcttttttttttcttgtaatcctgacagttttgaggaatcctgcttaggtgttttgtagaatgtctctcagctggagtttgtctgatgtcttattatgattagatttgcgttacaggtttttgggaagaagagcacagaggtcaagggcccttctcatcacgtcatatcaaagctagtgcaagtcatcaacatgaccagtaatgtcaaccttgatcacctggccctagtagtgtttgtcaagtttctttactggaaaggtacttttttctttcttttccctctacatactgttttttggaagcaagtagctcgctgtatccacactcaaggggacataattaaactctacctcctggaggagtaattatctacataaattatttgaaattctgtaaagagttttgttttctctgcttctgcccctgccttaggatcagctatttttccaagggccctggttctttttgattggaaagtggtattgagaaaccaagatctgggctccagatgtgcttgctgctaccagaaagtgactgcctctaagccctttcagcagacagagctaggaaatatgtgtatgtaggctaatgtatgtgtacatacatacctgtcacttgtatgtgtattcatctgtatctatattaaggggaacatgtgttcacaccattatcttcaacgctaatctagtgctgcgtggttaaattcttttctttttccctgctgatttgtaatttccctcaccaacattaagaaactggactcccaccgtccactgtacatttgcttctgtgtgtgcctccagtatacatgtaaagcattttcagaattattagcctgtgcttctgtgacaaacaagttcatcagctagcttagggtttacggacagttcttttgcctttagtgttatggttttcagtcagaacaccatttccaaggttacttaggtcatttccctttgttctccacttccttcagtgacatttgtcatgcatttgcaatacagttacattgttgtcatagtctggattctattacaggatcccctcattcctgattgttggcattgtggtagtttattattattatttttggatacattataattctttgtgagtgaaatttacatgggtcttgacatactgcaatctctttttgaaaatatat

SEQ ID NO: 51409 - DNA, 1191 bp, Homo sapiens
aatcctaaaaattgcatgcaccttgtttttattgttctatttgcttaaacatacaattgagaccaggtttagttactcattctctaactttaatatgcatctattgccaaattcttagaatcagataatatggaagagttttaagcaagtttaaaaataaagaagatcggtattttggtttttccagaagccaaacttatctttgttgactccagctgtcacaggaacaacacataaggcagttaaggtgggaacatagcaacatccttttcagtagtactgtgttgagtaagaaatgagcaatacgattgcagtcatgtttctgagaagtcttttgtcctctgagcagtggaaactccctgttgaactgattttgtatacctgtgtaataggatgtcttgtatttctggtttcgttatttgccttttcttacttacagctatgggaaaattccaaaaatcaaatattttacaagatcagtgattactcagtagaagatacatttttaaatcatgtttaatacctaagccaatgaaatgagcattatatagttagagtaagctttttttaatggttagtatttaactatagtatttgactaactttaagaatatcacctatatccaaataataaactcattcagcttgtaaaattttgacgtttctggctattgtgactgttagtcctggtcttatgaatatttcttccataggaaaatatgacagtgccgttatgttgacatcatatttgaaactggatggcacttagactagaggctttcaatttcagccgaaccctagaaccagccagtttctgaactctcagagattctgatttcattagtctggagcaggactgggacactagtattttttagaaactcattctaatgtgcattcaagggtgaaaaccactgacttaaaagaacaaggctgactttatagaagaaagtcaagtgtttactgccaaagattagagttaggcttgttacatggatcaatcttgctttgacccttacattatgtggcacttacttgataagcctttctatctttaactttcatactgtgcaaatgcaatagcacagtgtatattacagataagaaaacaagattttggagtcaaagaacgttatgttgattttttttccctattaaactctaggatttgcagatacttaaggtattttt

SEQ ID NO: 51410 - DNA, 3649 bp, Homo sapiens
caaagttggccaggcctggtggcatgcacctgtagtcctagctactcatgaggccaaggcaggagtataaggatgcagggagttataaaggtgccactgcactccagcctgggtgacagagtaagatgtctcataaaaagagcaccacgtatgtggattcctcctccactgtctcccacctcatctcccctccacatgtactctcacacaaagactggagcaaggcagacttctttcactttcactgtgcctttagtagctaactgtttcgattctagtgcaagatggctctttaccaccagataagctttggtatgaccaaccactactgagttgtgtagtaaagcgaggtttatctaaatatgtagaagaaagttgagattctcattagttagaaatttgattgctcgaaatcttgaatttgatgtaaaacagaataagcagttagggaagggaacataatataggctttgtgtattgagagttgcattaaaagaattgcaaagtcaaggcccggcatggtggtttatgcctgtaatcccaggactttgggaggctgaggcgggcggatcatgaggtcagcagattgagaccctcctggccaacatggtgaaaccccatctctactaaaaatacaaaaattagctgggttcgggaggctgaggcacgagaatcacttgaacccaggaggcgtaggttgcagtgagctgagatcgtgctactgcactccagcctggcaactgagcaagactcagtctcaaaaaaaaaattgcaaagtcaatcctaaggcaaagaggctatggaagaaattatgctaaagggatgggaatagtttaggctagacttggggggaaaaatcagtggaattctttttttttttcttgtaagattttttttttttattttaggaaacatgttttctacattagaaatgcaagcattgggggaagttttctcagttccacatgctgtgatgtctttgaggaggtgaggacaggaaagggtagacagaactttaatccttgataggaaaatatatgttgagtgccatctgggaaacttctctctgactcattttgtcaatgttggaaccaagctgaaagtcagtttggttgttcaaaggtctccttaatcatacagttcgggtatttcatttgataaacattacctggcttatcatttcaaaacctgttggaagaatttttgaaatcactaatcgatgggtttaatttctatgaaagattttatttttttttgtggactacttatgagtttaagctgcctcttcctaagagcataatgtctatatcacaagctcatgaagattgtagtgaatggcagcgaaacactgttctttgtataaatgctgagatgtgcttaaatagattccattgacaagctcttggaagtttctgtgttataagctgcatttagaaggagtgagaaaggaaacactgggaggaggatggaagaaaaggaagaagactgtctagagtcttttctgccagttgccctttctcaaagacaaatggacatttgtcttggttcatttggcctactgtaatggaataccataaaccagtagcttatgaacaacagacatgtatttctcacagttctggagtctgggaaatctatgatgaaggtgctggcatgttcagcatctggtgagggcctagtttctggttcttagtggcaccttctggctatatcctcacaagatggaatgagcaaacaagctctctggggcctcttttatgatggcacaagtcccattaatgagggctttgccctcgtgctctaatctcttcccagaggcctcacctcctaataccatcaccttaagggttaggatttcatcatatgaatttggagggcacacaggctttcagactataggtatagtttggtgcttttcaacgcttgttctttttgttactttggcctgcctgtctgacaaacagaagatatgtggtaataagaatgaagcctatttgtagtgcctagtatgtctaacactgtttgaggtgctttatacacattaccatgtattctcaaccagggtatagtagataataacagcatttttgtgtagatgaggaagctagggcttgcagttatgtgactcacccagggttacacacctagtaacaaatccagagaatattgttcagttgttctcttatttgacctctctgctattgacaactgttccttccttcctgaatttttattttcccctgactttcatgacaacacatctgttttttcttctagcttctggtcactcctccataatctctttggtagatcctacttcatctcttcactcagtaaagcctgctattcctacccgttcttcgattttctttctcacactgcatactcttcctgagaaatagcatctatgctcataacttgaattgctgtctttatgctgctgagtcccagatctttatttccattctagatttctcatcttagaaccacacacataaacttaatgatagatttgacattctctacttaaatgtgctataggctccttaaattcagtgtcccacagtgacgttttccccatgattttctcctgggattctgtaacttcgtaaatggtaatatcatccacccagtttctcctatcagaaatctgttgtcgtccttacttcccctacttagctcttcacattttacattccatctccaaattttcctgcttctcaaattaattcacctacctccattcccatgttcacagtcttcagtccccttgggcacactggctgcacacagttgctgtcttctcctatatttcttatctggtagcccacgagatctttctaaagtgaacatttgattttttttttcctgccttttccataactttaccttcttcagtttttccttgttactttcagctttaagctcaaatttctttacatggtgtacacccctccttacctctctagtctcattttgtactattcttttacactagctctttgaatgttctcttgcctctggccttagcacacactatctactgggagtgctttttttttttcatttccaaatagctgactctttcttactctccacagactgaggctagctcctttcttacagcctgctctgatatcatcccatctctgtttgccaagtggattactctcatgtgctctcataacatcatgaagttaatcatttttcatagcatttgtagctgtaacctagtcctctctccaaaaccacatctcagacatataactgtcttctcttcattttcactttatttcattctcataggcattgcacatttaaccttccaaaactaaactcttgtttttctccaaaaccagctgttcctcctgacttccccatcttagaaaatggcagtattactattccatttttaattagaccaaaatccagagttgtcctttgttccttaattttttcacagcccatatccagtccatcaataaaccttactctttatttctttttttttttttttttttttttttttttttttttttttaagacagagtctcgctctcttggcctcttgggcaggctggagtgcaaatggcgctgtctcggctcactgcaaactccacctcccgggttcaggagattctcctgcctc

SEQ ID NO: 51411 - DNA, 2272 bp, Homo sapiens
atgaagactgacaagtgaccactgaaagttaggatgtatgtctgaaatcatgtatgttttcataaaattaaatctattctgtgttgttacttggaggcacaagcaaagtaaaacatttaaggtgaacgggggtttgagtaagttgaaactggctgacactgactcactatgaccttgggcaagatgctgaactactgcgagctgcctattcctcatatctgtgaaattgggataatgatatttttgtgtatataaggctttgaaccactcagacgaaaggtgctgtgtaagtgcaaagtgttgttaacaacaatactgataatcctcatttcaccttgccctcagtatgacctgtgtttaaattgagcactgttaaaaagattgcctgtgaaatggtatcctgtatagttatgttgctgtatgttctcccagcacttgatatatttccttcccaacactttttatagtttgcaataatctgcttgattatttgaatatttgtttcccccactagatccaaaaacctctgagcacaatggggaccacttttgtctgtttgttataatatctccaaggcctagcatggttcccacatgtggtagatgttcagtaaatatttactgaatgaataaatgaataaataaataatgcatgtttctgtgaatttctgccaaaacaacacaaaaagccagagatgtaaaatcagtttcgtttcttttccaccagtacgggaattctaatgctgtattctgtgtaaataaatcattccggttggtcatcgtattatagtgggcatggtgccatgggaaatttattggagtaatttttaacagcctaaatgtttagtaacagatgcacatagatggcaggttgcctcattcagcttccatctgttagacaactgtctattctaataagactggtctattcaaactagacaaataacattcttacccatgtttaagcttattcattttcacaatttttccgaaaggctcgaaggaggaaaggtgtttccatgtttggttggctgctacttaatagtagtgtattacaacaccttggcaaaccgtgaagtccacttgatgtgtcgtaatgctcaacaaggaagtattctctcttaagtgttttgtcaaaagtcaaaaccatgctaaataatggcactaggaaacacactcagctacagataatttggtccaatagagttcagtgtaggttgtgcaactggcaacagaaactggcatgagatgaaggggtataatccatgctggtcatcattagtatgtgtgatttttaaataggacagaggcaatatactaaactctagaaaatatagtgtgtccatatgtacatgcagttaggttatacccagtgaaagcatgatgattctcagcttgggcatgccttttaagaacaactttaccaagtttttttttgctatataaaggtggagacagtgttggcctatataaatttaccctgtgcatgacgaattgggttggtggtgtgtcattaagtgtgggccaacttccttaaatgtcttggtgcttagcataatgcctggcacccaactgggactcagtaattatttgttgaatgaatgttctaggatcagttgaggcaattccctctggatttctagcatgaaagcagtcccataaccttagatcactatgaattaaaacttggaataaaaagttggcatacttagagtactagtactaagcagaacacaaagcaaactgcttatcactagtatgtgtctgtgataaacttctgaaggctgtgtcatttcctaaatgtaaatcactgggtatgtgttattttgggaggcagacatctaacaatggctgttttggagaaagtcaatctatctgggtcttggttcagttacaggaatgactaattttatactagattctcacatgattcaaaaagtgtgtgaatgactcagctcattaatatccttagctcctgtgatctcccctcccagtgaaacgatggttataaggcaataatgataattggaagaggaggagactttgactttgccccgtggcaataaaatgacacactttaagtaattacatgtgcatacaatattgtttgaaagaaatgagttatattatcatcatataaatacatttaatatttgtgttaaaatatggtgaaaataatatgtagtttcagcgtggatgaggactgagttctgctttttgtttctaccattatcttttttcctgaaacaacaagcctctatatggacagagcc

SEQ ID NO: 51412 - DNA, 969 bp, Homo sapiens
caacctttctgcatatttgaaaatttataatattgggaaataattttataatattggggatggaggagaacatgggttgagaatttagccttgaacagaaccagggggcacttattccttggcatggcaggacattatggaaggtcaaggctaaagccccagccacttttgtaaagcagaagtgactctgacctgctagggtggagggccaaaaaaaaaaaaatgttgagcatgaaggatggaataaccacttgtgagtgtgagagaggactgagcagacttgggtggtgatgctcaggtctggtgaagttgccacatttgtgattttccctggcagttatcagaagacaacaagttagtaggatcattgaagggccactagcttacggaagccaaaatagaatgagtagttggcatgaatgagtcccttcagtatttgccagcagtctgtcctagaacatgtcccaacctctctggtgctttgttcaagagattgttttcaacctcactatcttttgctttgaattatctgagataaaaacaatgttgcaaaactttgttaacactattattattaacatttaactcaggtaattttgttgtctcccttaggtgaaagaagaacgtccagaaaaaataccagatttaaaattattggtagagaagaaatttttggctttacagagcaagaattctgatgcagactttcaaaataatgaaaaatttgtacagtttaaacaacagctgaaagaactaaagaagcaatgtaagtcaacatgctttgctttggttcggctttttgaaattagggaactgacttgatgaacagccccagttaactgattttataaagtttgcttatctgcttggcttgatcctcattctaagttgcgttttattgttgttgcaattctgtattttgtctaatttttggttcaaatcagcctgctcatttctgaaagccaacag

SEQ ID NO: 51413 - DNA, 881 bp, Homo sapiens
agaatacagtgcctaagaattatgtttctggtggaatagttggtgtgttatggcagagaggaggaggatatttatggcatcccaagtttagaacaaattccatgaaatttatttcaaacataacaacagtaatctcttgcacatacatcatctcgcgtaatctttacaacatccacacgcaggaaaggaatgcatgaaaagtacaagttctgtttttagcagactgaacaccatataataagaatcttggaggtgacatatttacccagtgtctcacagtcaagaggccacaaggatagcaaatacgttcacaaggaaaggggaagttttaaaatgacagatagctataattaaagttagtgaagaaaggttcagttatcaagggacaaatgagtcagcagcaagtttaaacacaaactgtgaactctgggtgtttctctcattgtgacttattttaagagagtatgatgccatccacactcagaaagtagcctgaatctagattaggaagaccaagtcttaagtgtcccagagatgatgttacattatacctaagaaaataattatcttgttgagttataattcctgaagttagaatgatttaagtgttatatttgttagatatactggaagtttcaggcaaagttattgagcatttctgtctacttctacttcatttttaaaaggtttttttttttttttaaagaaagtttaagtagaattttggcatcttagtgcgtggtgtgttattgtgtgtatagcaagtagacatggtttactcattaactatctgaaattttgaagtcaaatgaaatgtttcaagttaatattgtaatttggctttataaagcagctataattgaatattatatgtatatggt

SEQ ID NO: 51414 - DNA, 3225 bp, Homo sapiens
gccaccatgcctagctaatttttgtatttttagtagacgtggggtttcgccatgttggccaggctggtcttgaactcctgacctcaggtgatccacccgcctcagccttccaaagtgctaggattataggtgtgagccactgcgcccggccaaaagttgagatttgtaaaaaataaattagtatagagagtttcagttttactagataaagttttagagatctgtttcgcaacaacatgaataaacttgacactaatgaaccatacatttaaaaatggttaaggtgttaaattttatgttacgtgttttaaacacaataaaacaatcagttagatattggtgatttatcccctgtaaccaatattttaacatctactatataaggactccatttggtctctgcagaccaaattttctgcagtttttgctaggtactttaagcattttagtcccctgtggttacattatcagaaaaatgtgagtgcttgtgattcttaatatagagccagataaaatccctgaacaccagtccactaaatctactttaatgggataaacttttaaatgaaccattaataatatactccacatatttgctatttggggtctggggaggcagatagacagaaagagatggaagaaaagcctgagttgactttcgtactttcagtgttccaaagcctggatataaatgaaagatgagcatttctacttaatttatctggctggattcctgtgcctaatggctgcatatataccataaacactgtgaagaagcaaccatggaaacacttgttttcttgttgggctaaatttactctggattgaatattaacacagtgcctggcagtactttaaaagcaaaaatagcttaagtgtgattcactctgagtcatttactgctgctgctgctgctgctatactgcctagagcttgacattgaacaagttggcagcctgtattgctacattttttctaggaactctgaacacatttcattcttgtgaattcgcttgtgcaacgatattaaatagagtaatatgtttattttgtttcaaagtcaaatgaatttgagaatggtgaaactgaattatttttcttgggctttctggaaaagctagattctcagaattctcccgtggttataagacttactctattttataaagaattaataaaatgtcactgaagttttgttttagacactttgggcttcgctgattgaaaacaccacaccaactgaaaaatcactgtgaaaaagaacctggtagtactgtcaatatcaagtaggattcattaattttctgacattactggacaagatggttcgtgccattcagaaagctctttttctttcttcttctttcctaatacagtgaggcatacaacgtagcctgccttatggttaagttgggtgtatgacttgtaaacttccctcttgctattaaagattatataatgggaagttcattggttttgaaaggcagaccaaacccacccatgggatttctattggctttttagatgtattgcatttctctgagtaaacccatgtggctgagaaatagtgagtagcttgttggctgactgtgggaaaacctatgaaggatcagttgatctcatttgggcaggagtcagaaatggctgagaatctaaaactatatatatgaggatggttttctcttgatgttgcaatctttattttaacatgtttttgtgtttagcttctggagttgcctaacagtataatttcaaatgaggtttagtttcagctgtttaattttaaactgtagggaacatgattaaaaaaaaattaaggcattatcatttgccttagaattttaatggtttgtatagaaagagttttcctgtgacaacctaaaacaaaaatgagcctaacctaattcttgatattatttgttttaccataaaattcttacattagaacatgtaactctgtcagagaatttcaacatagttgcataaattgtgtttcatattacaacttgttctctgcttgacttcattgaaagtaataaaatgactctttcagaaggatctggtgagttaacatcattatttaaaaaaaaaaaaaagtaaagaacttactcataatgtatcctgtgttgctaagttttcaaagttagctatctcagccacacccaaaagccctttcagaagattgaaatccacttattcatttatgctggcttagaattttcttcctagtaagatctgagatcgatataaattttccatgaaatatatgatgaatgcaagaaaaactaacatttggaatttgagttgctgccaagtcttgtgtgtaatatatagttctttattctgtggttaaagagatttcttatagcagggctttctctaacttgggccctgtgtgtgctaaaaatatctcgaaggtattttttatgttccaaagggatactatcacccttcctcagagctagaatataggataccagtcctgcagtagcattccccatatcatggtcatacccaccctctactgctacatttccaaggcatataaatgagtttttcatatggcttgaaaattagctcaacaaagtttaaataaccaaccatgtcaggttgtaaactaaaggggatagtctaaatgagtctcagcatagcccagtacccactgtgttattaatgcctttacatagatgtatctcttttattgagacaagatctcactttgtcacccatgctgaagtgcagtgacgcaatcatggctcacttcagcctcaacttccctcactcaggtgatcctcccacctcagacctgagtagctgggattacagttgtgtaccaccatgcctggctaagttttgtattttttgtagacacagggttttgccatgttgcccaggctggtcttgaactcctgggctcaagcagtccacctgcctcagcttcccaaagttctgggattacaggcatgagccactgtgcccagccagatgtgtcttatccatagacatattataggttgcgtatcacttacgtgaaatgcttgaaaccaaaaagtgtttcagacttcaggttttggaatatttgtatatacataatgaaatatattagggataagacccaagcctaaatgcagcattcatttatgtttcatatgtagcttacacacatagcctgaaggtaattttatacaatgtttttaataatgtcgtgcatgaaacaaagttttg

SEQ ID NO: 51415 - DNA, 1570 bp, Homo sapiens
gaacataaattcatagatttatttctgggctttctattctgttccagtggttggtgagtggtaacaattttaactaatatcgactgttgacctttgagtacttcctatgtacccagctctatttaaggtgcaataaggtaggtagatagtgttatccccattttacagaggaggatattgaggctcataagaggttgagcaatttgccaaactttatatttacaattcaaactcaggaaatcaagctgcagagtccatgccctttactattacgtaaactgcctcttgttgattgactttattgaggaaaaagaaaaaatcttagaagttggaggaaatgggaagtcagtacagcaatgataatgtgatctgttttgtaggacattagattttttcaaattagtgattattttggagtacttttgctaaagtctgtgtttctaaaacaaagtgccttcatccagtgggctaaatctgagaataatttatcacatatttggcatatctttcttaggctatatgtgctaatccctaacatgagctgagtttgagaacttaatgtttttacatattacctcagagactgaaatcagttcttaaaccagtattgggttttgccattcagagaggcactgtggggccatgccaagaaacaaattagctaaaagtaaggctttccttcagtcgacagcagtgggtctcctttcatcttgtggctcttttaagctctctaacaacctctttctgtcctttcgactccattcacctcaaacccaacagttcttttttgtagtcaacactgctaaatagttattcagagccctgcagctctcatttcattcttggctttgtctaagttcctgagagagctgcaaaaagaggttgaagaagtgaaaatcatcagctcaccctgtttgcatatcctgcagtttgccagcaccccctgagaaagttcaaagtctaagggtacagtgagcagagaagcctctccagggagattcccaatagcttgtttgtttcacattgtgctctggggtatatttgtttttattcaggaaggtattgcctttttatttcttgatatattttataagaaaatgttttctcttaacatgagagcaaattatacttatttgctgaacaaagcaaagctatctgcaaggacattttagttttcacttcaagcatcattgcttttggcaattgtagacaaattatcgtactgtttgatgaggtgtaaaataacacgctttaactggagaatgaacacatttccagatacaatattatcgttctcttctttttcaagtaataatttccaaaagatgaattttaatggactttttgccatttaaccaaagtgaatccttgagtctctgaagttgcccccacttagcacctgcgtatataacacttaacaattatttacacttttgattaaattcaacctttatgtctgtttgcaaaaaagaatacatacaattttcttcacaaaaaccccagtgtcagacattttgttttgatctttttcttggcatattaaactgacattgggcaccaagatgatgaa

SEQ ID NO: 51416 - DNA, 781 bp, Homo sapiens
tttctttttaggtgtagagttaggagacaatcttgaaaaattaggtaagaaggaaattatgatggaaaatttcaaacatatataaagtaggcccagtagaatgttctgcgtactcatccccaccttcaacattgggcaactcatagccaattttgtttcatttctacactctcacctcccctttcttatgttatcgtaaagccaacatgtatttattttcttcttcttgtttttttaacctttttggatatgtagaaatacttttaatattcttttaaaaatctaattataagtactaaaaaagataggttggtagttgagactaaaggactgttatgtgaatgagttattctctgacaggaactagcaggtaaacaggatattttatttctcaagattttcatatgatggtgaccaactgcattgcaaaagaatggtcacattccagggttgtaactagttctggaggcttagttacgcaattgccggctctgtcatcttctacagggatgtgaccttacggaaaagtaaggaatctgaagcgtggcagatcactttgaagcttgcccagtttttgcatgttatcatgtaatagtgctaaaactttttgtcctccagctaggcaacataggtatgtaatttagactttgggaatactgtagagctgtgataaaccctgctttaagctacattctgggatcgtaacatgtaatttagaagtcaaaatccacttagaagaaaagaatttttaaagcacggtaaatcagaaccatttttgtga

SEQ ID NO: 51417 - DNA, 1212 bp, Homo sapiens
tggagcaggtcaaaacttccgtgctgatgagtaatgagatcacacttgtgaacagccactgcacgccaaccagggcaacatagtgagacaccatctcttagaaaaaagaaaaaaaagaataaatgtaagtgggagggaaaagtggaggcagggaagtcagtataagactactctaggccaggagtggtggctcatgcctataatcccagcactttgggaggccgaggcaggtggatcacgaggtcaggagttcaagaccagcctgaacaacatagtgagaccccgtttctactaaaaaacacaaaattttgccaggcatggtggtgcgcacctataatcccagctactcaggaggctaaggcaggagaattgcttgaacctgggaggtggaggttgcagtgagcagagattatgccattgcactgcagactgggcgaccaagtgagactccatctcaaaaaaaaaaaaaaagtattactctagtgatgaggtaagtagtgaggggggtctaagttaagatactatcaaagtggacataaaggggaggaattaaatttgagagaaacaattaaatttgaaagatatttggaatgttgtggtaatcacttgaatggaagagataggtggaaataagagacagagtagagtcaaggataagtttcggcttaaatacctaggtattaagggtacataggactgatgtcagcctttggttatcttggacatgaaggattacaatagctgagtcatcaaaggctgattcagtccctgacatgactcctagctgttcatctttgaaaccagtaatgaaatggcttttggccccttaaaactgagacctttggaagagtgctgaataggtatgaatcaggtttcataggcaggagctcctggggtttcaacatcagcgttctggaggatgcatgcttgattttattgcttttgatactgtttttcactcatgctttttaatgactctgtaatcatgtgtatgttttatgtttcaccttgagaatggctgttatacttagcactttatatcttcaaagaattcagcaatattaaataatctgcataatatctctgtgagtttataggtggggattattgctccgtttttcaggtgggaaaacccagagatattcggtgacttggccaaggctatttagccttacattgacaactgaatattgaatctgcagtttctttctt

SEQ ID NO: 51418 - DNA, 1860 bp, Homo sapiens
tatatatacacatatatatacacacgtatatacacacacacatatatatacacacgtatacgtgtgtgtatatatatataaaaggctgtgtaatacggtggaaagagaactgacttgggagctaggccagggttgaaacccctcccaagagggagctgggtgacacggggcaggatcctgattctgcagcagtgtggaaaggattagatcttgatgtatgtcagccgcctatcatagaacctgacagttactgcttcataaatggttgctgttacttttattctcattcagagacaaagtataatactgaaaaggccagtgacttccttgttgaaagtcaggaccaggtaaattcaactgttgaggtgttacagcctattaaagacgccagtgagacattttggtattgagtcaaccagatactgataccatcccttgttcactgacaaatatgggaaggtaatttcagtaggtcagccatcagtgtgtgccttccaaaacattatagtcatgttacagtaaactttttatatttgttgcatcacaaagatttattgaagtgataaaagttattatggaaaacagtgtgcggtaactatggtaacagttatttgatctcacagtaattagctaagcatttagttgcacaatactttcacaatgccttcctggttagttcattaaacaaaattagcttttgtttgaactgccttcctacagcgtcctaaatttgattttagttcaaaggaattggaaaatgtattttaaaactacctttccaacttacagtttatggacatatttgaggttgcaactggcttttatttaattctttatttatactacactatgataacgattcactggattatcatctgaatttctcttggaaatgacctaagaaatgaacagtaaagttggagaccagtgccttaattatggccctgttcctcactcatattgcagattggggtcaacaggtgtccttcttaagactttgtttttatacctgtgagtttggggtgctgtataaatgttagagtcccaggatcacacaagtggagtcatttcttgatcatctgcatacctcctgctgggacctggagctagcaggtgcccaggctttttctaaagcctccctcctccaggtgcctcctctgccctgctcagcatagcttgtgctgtgtttagcacctctttttgcaaggtggaatgtgctgcagatgattcacctaaatgatgatgtcatcctcagaggacttcagagctcttgagacaagggcctctcagactgtttctactctgcacccactctccactcactcccagcagacagggaagcttaacccgtactgcttggcagattggagatcccaagcacaaaagaaagcttcaagcattcaagattttgaaactgaaaaatacagaaaatgaaacaaaaaaaaactttttaacttatttactaaacatgaaggggttccaaagtaaattagtgaaacaggattttttaaaatccaatcaatgttccttgtattaatttcattttaattcctgtcacctcagtgatttttttttagttcatttaattatttttaaaataatactagcttttaaaaatgaattgctttctgagttgtgagtcaagctcttctctcagttaactccatgtcacctaccagttttcagttagacaagtttttttgcatatggtccataacatttccagttctatgcatttttatttgcctatttaggtcattattttctaggtaggagagatgcatcttcagtttcactgacaaggaatagaattctagtaagtaactatttgtggccaggcacggtggctcatgctggtaa

SEQ ID NO: 51419 - DNA, 929 bp, Homo sapiens
attgggtataaatacaacttttaatatgttagatatggtatcagtgggagagcctccagaaaacgaacatacttgggatccttaaaataaactgtctgggtccaaaatgctgtgcacatagcccgtgaaatatttgctggattttaattgattatagttaaatgatgatggtcttttttgttgtggaaggaaggaagcatgggtattttacattattattttgttttgttttcttttatttataaaaagaaaaaggagttaagggaattttcccagcttaggtggaatgagtgccacattcctgcggagatattgagcaatctttggggcccttgaatggcaccagtaaggcccttcagagcactctgtcctggccctgctcttaggtttgcttgccacgctgtctggttccttcagaatgtaggaagttgggggtggcacagaagccccaagggcagtatgctagtgcagaggaagcgaaggcaagccattgccaggtgctgccagcagagcagagcgtgtgctttcgtgaggcatgagggaactgacctttccacttgcccttcacactcagggtgactcaaagtgctgacctattgttttaggtactgattatacagcgaacatgttgatgatatggtagaggtgtttcctcagcaatgagtgttgaatgtttaaagtcaagtagatttttggtatgcttttgctttggtcaagagggtcttcttttttctttctttttgtcttttggatattgttttggttttcattctgtagtataaattgcagtcccagaagctgaaattcacttccacctgttcaaaaattgctgtagactttagtgcttttactaactatgcataatattgatatgcccttgctgctgaaattttatatctaagattatcttcctattatctagccaggat

SEQ ID NO: 51420 - DNA, 952 bp, Homo sapiens
attctgcctcccaggatcatgtgattgtcatgcctcagcctcccagagctgggattacaggtgcgtggtaccacacccagctaatttttgtatttttagtagaaatggggttttgccatgttggccaggctggtcttgaactcctggcctcaagtcatctgcccgcctcggcctcccaaaatgctgggattacaggcatgagccaccacgccaggtcccaatttcttttttaacacatatttattggatgtctcctatgtgctaggcactgttaaaagcattggggataaatcagaggaatcagtccttgcaaaggccctggtgtgggagttggcctggcacacattccaggagtgacaaggaggttcccatggaatgagtgagggaaaggaaagtaggagatgagatcagagagctaacaaggggtggatgacacagggcttcccaggccattgaaggactttggcttttacttagaggttaatatggggtgagaattgagagaagaatgataactactgctgattattgagcttatagaagatagctggcactgtgctaagtgcttgacctgtgttatacttcttaatcagatagaacaagaagattagaacaatgatataaagcaaatggcctgtcccgagaaaggaccctgagacagaggggttggggagcgtgcaggggcagtattcaaacccagatctgagtgatttcatgatgtcatactgtcatttaatgaatatagacatgtgtttgccatcacattgctgtagcaagactaatcttagcctccacttgaccactctgcaagaccactgctcaggaactggataggaagttggtgcctgtgcctccaaacaactctgggaatccgggacaaagaatctgagcacacatcatgcaccacacacacattttccccagggcacggagcagggtaacgcagtgtcca

SEQ ID NO: 51421 - DNA, 2717 bp, Homo sapiens
ctgtctcaaaaaaaaaaaaaaaaaaaaaagaattgtgttgtgaaaccacagagtatacttactgcattgtagaagtttaatcagtgtataaaaattcattaagcactttaggagctttggataaaaagtcatatgtgaatattagtcatttattttattgccatcattgagtcactttaccatagaagtgttttattaagatcaggtgcagtggcttatgcctgtaatcccagcacttcgggaggccaatgggggaggatcgcttgagctcgggagtttgagagcaagctggacaacatagcgagacccctgtctctactaaaaatcaaaataattagccaggcgtggtggcacatgcttgcagtcccagctacttaggaggctgaggcaggaggattgcttgagctggggagatcaaggctacagtgagctatgatcacgccagtgcacttcagcctgggtgcagagtgagacccagtctcaaaaaaaaaaatgtattaattgttcaaatttccatgactccagtttcacatgaggccgtggacttctcaatcaaaaagtttttagtagcttcagtaggtctgaaatttcagagtattgagcaaggcctacactgagctagagcatgatctaataagattggactgtcaaaacaagaagcaccagtctgtggtcaaaaggtttttaagaaggaaatgttaaagctctgctgtgagaaactcaagatcatgaaacatgtaagctggcaggctgtttctttctcatttctactatgatggggggaccctcatcctaggtaaacagagacactgaagcaaaattaggtgtgattaaacagaaacaacagatggtatctttctattgggaaactaatcgtttgtgtaactggcaggatgaaacatcagaaaatacttgacacattttgctagagtcctaaagggcacctaggaagactgactccaaaatgtcaaaataaggaaaatacataactcagactagagtcagacagaagggagttccattcccagcccaccacctgtcagatttggggcaagttatttaaccttttttgctcctcagttttttttaatccctgaaatggggattggaattggaacattataggattgtcatggaaattcaaagaaagaatgagtggagaatgtttgaaagagtacctaccatatgatgagtgcccaatcaattgtagctattgcaattatgtaaaagagaaatgtgtaatagctttttgtttggtgtattcaatatggttttcaaaataaagaccaatatcataaagttttgttgctgtttctcataactacatttaaattcccggttactttaagccccctttttttttgtcttctgcatacctgcaagtacctcatccattcttccgtaatgtttttctcccttagccaataccattccaatgaataaatgctcaagaccaaatgtgaacagaggtttaggctgactttaggactgagtcactgtgatctgtttcagcctcctggagctcttttttcctccatgctcatttaccgaggagtataatgtttgcatcatacctgctgttgaattaccatgtaacgattaatgagatatgtttattaacaagatatgtttatgaaatgccttatgtttgtgatcacttgtaataaaacattaataaagaatatggtttattgatgaatatattagatcgcaagggggaaaacccagtgctaatgatgatctcacttttaatatgttagataattactccaactgaaaccgaattgatttttatcagataaattgggggtcaaagttacaccgcagtaattactgctttcaaactgtgtttgtgtaacctggggaaagattttgctctggggaccatattgaggcatttgcccttgccactagcagagaacttggatctgtgcacacacaactagaagcagaagcatgtatttcctttcttttaccaaagaatagaaaccatgaagaaaaccactctcctcaatactggatgaaattagacaccaaagaattccctttcactcagttctctgcttcatttaaaacctagaatctttgtagaaatctgtaaaaaaaaatgcgtaaattgtatagtttccttttcccataaaatctccaaagaaggaaatcttatttttaccttggactttcaaaaacatagataataaaaacatttcatttgctctaacacagtttatgatgtcactagaagttcttgataaaattgtcagcgtgagtatgccactgaattaataagccatgctttattcgtggtatgttgtgcaatatgtcagcatttcccctttctttcctgtaaattgtaacttttccgatgactagcatttaaagtcttttcctgattaaggaattgtcagctgaaatcatcagggatttccccttaactattttggaagaaatctgaagaatgtaatgtgttgcttggaaattaagaaatttggaataattcatgtgaacctaaatggtgaaatagaatcaagaaatgatagttttcttaaaaataagatggccaggcacggtggctcacgcctgtaatcccagcactttgggaggccaaggcgggtagattacctgaggttgagagttcgagaccagcctgaccaacatggtctctactaaaaatacaaaattagccaggcatggtggcgcatgcctgtaatcccagctac

SEQ ID NO: 51422 - DNA, 1964 bp, Homo sapiens
ctcccacctcaacctcctgatagctgggactacaggatgtacaccaccacacccggctaatcttttatttttttgtagaggcggagtctcactatgttgcccacgctcatctcaaactcctggcctcaagcagtcctcccacctcagcctcccaaattgctgggattacaggcgtgagccgcagtacctgaccagattgcgaagtatcttgaagcaatctggaaagaagtcttgaagcaattcttgagggtgttttgtaccacagagtgaagtcccaacaggactctgagaaggaagccacccactcagaattactgccaagggaggggctgtaatgacacatgatggagtgaggaggtatgggaagcagctctggagggttaaggaaatcattgccaccatttttaaacagcgattatgtgccaagccccatgtttagcgttttacataaaatgcctttatcctcagaacagccctaccagacaggtattttcatccagacaggtgtttcccctgtgcgtatgacaaaacgcactcaaggtgattaggtaacttgctcaaaaacacagagggactgaggcaggcagtatttaagcccctgctggatccttccaaatatgtctgctacaccttaagccctctctaagaatattagagatagttatggatagccagccaggaggtaactaaaaatttccattattgtctataaacaaacaaaggagcaaaatgggggtgatactccatgcagtgagggtgggaaaaccacacaagctctctcagtgttctgaattatgcccaagaaaggatgagcagaaatgactaaggttccttatttgacagatcattgacatggtgacgtgacccagtgagatagaggagatgaagaatttccaaagaaagataagcatatgtcatttatagtaagagttactgatgattagggtgtttaagaactaggcattgctcaaccaaaggggaaagttcaaagtgaataggtaggttggtgtgtcatctaaagagacgatatagtgtcatcaagtgagatagagcctcagaaaacatcacttttggatctgtgtatatatgacattgtactaagacactgtagcatggaagtgaatagataagaattaggaaaatcacaagctaggagaggacagatgttatcacacagcaccttgtaataaagggagaagagtagggaaagttaagcctgacaggaccccactcctggtagaaaggaaccattgatatggctttgaagataggaaggacagagcattgaggcagaatgtaaaagcaaacacctctagtatcatggaatccagggaagaaggaaaggaaaggaagagaagacctgtgagcattttattatgtgctgggcatattaaataatcaattactcaattaaattcaattcaatactcagttaaatactcagtccttacagtagtcctgccagttaagtcttctcccattttacagatggggaaactaaggctctgagaggtggtcattttcccgagatcaaatagctaggggaggcaggattgtcccaggtctgactctgaatcccttgcttctgccacactgcttcagccagaagttggagaaggggaaggaggattggttatatgcagagtcagaagctatgagaggatgatgaggatcagagtggatttggagaagtgatgaggatatgggtggctttgttgggtgatactgctgcagagtagaaatgggagaagttggctacaaggaaattcacatggttgggttcacagtttcatctgccatgtgtggcattttactacctggtatatggaagattaaatattagctgcatttaattctctctttggagaactgcgagttcctttttgaacaaattctttgcaagcacttctagtctacatagttgggcttccaggttgatgcatcttcagattatagttccaaga

SEQ ID NO: 51423 - DNA, 1983 bp, Homo sapiens
tccttatgtggtttttgttactgcgttgattcatctgttagttttttttttcctctaatgagggcaaaacacttgatcccatcttcacagtatcctaatgatacagagaagaagaaagtgatagcctacaggaaatttgacacctatcccccaatttatggtagagccaaggtccagacttaacctaccctcccgaagtccattcttgtatgaaactacagaacagttgtctctgggtcttgcagagcactcctttactcctttgcagaagaggtagagagtgggcagaaccaacttgaagccaccaaggaccctttaggatcgagagtccatgtgcaatgcactgaggatctagaaatggaaaaaaaaaaaaaaaaaaaaaaaaacctgtctctgcccatggagcttacagattagtgggggaaacagccacacaaacagataattatgaatgatgtgtttgatatgttaattgcctcaggtggtgggggggttaaggggagactcctggggacccctgagtgagaagttttcctagaggaaggcagtggccttgataaaatgccctcctggactgcttctcagcactctatttctgtgtggcacagcctaggctcatagacatcacattctctgtggttctacttgtgctcactcgtaattgtcacctgccctggaatatgtgagctttcagtgagaaagaacatctgtccctcttgacacctttgggtgtgggtaaggaaaagagtaaatgttccatgctaagcatattgtcaagcactgtgaatgtcatgaaggaggaagtttgaaaagtgtgatttcttcatgtttacaaaatgaacaaatgactcagatctgttgtacacattcacaagagctgtgtcctaagctgatcctgattttgaagtcatgtgtcttcctttgcatgtggggaggattttaaagggatggaaagtggacaaggagggggtgggtgagaggaaggaaggcttagaggcaaggactttgttctacgatgctgactcagtgatgccttcccttgggctctgcagaaataaagattttcctcatcttttagctccttccttccctcctccctccctccctctttccctccctctctcttactttcattttatttcttccttccagtcagcaggtttttgtggggtatgttttctgttaggctaacttcagacaagaccctgaaaactaagtacagatgtcatcacagatgagtgttccttactcttggaagttcaggtagccctgcctcgattggctctgaccactttgtcaggccgtggagctgagctacattttggggatttcacccacattgttgttgacaggattgttaggcttcactagatttgcaccctcgggctttgatctttttaatatcttccggattgaatacccttttgggattgttctcctgactttttttttaaacgagtatattgtgccactagaaagaagaatgtttaaatggatcaaaaataaatcttgatactctctatcaaatgcatgtaaaaaggaaaaacaagcatgtttcattaatactaagattccagggcatctggtaatgacagcgctgagtaaatcctatggggcgacatatttgattagattcggggtcagtgggtgaggggacatactccagtcattacaatctgaggacagcgctgagcactaacagatgtgacaacttataacacaggtacttcctccttcactgcactttatccaaaaatagacatcttcagaggttctttaccttttagccttaaaggatttgagaagctttagaaaacaaattatgatatcaggtctagatttattttgctattaaagtctcacattctgtacaagtattttattattgtttgtctaggtctctgaaattagaagagacagaagaaaacatattatataaatttaaagtatgaattagccaggcgtgttggcacgcacctatag

SEQ ID NO: 51424 - DNA, 1695 bp, Homo sapiens
ggtagtgcctggaggtggggacccagccgctcctgcgaggcctgaagggctgactcctgcacagcgatgatgcggcagctgaagatcgggtattgccacactgaactcgctcaccaagatgtcgtgggattaatgccgaatgcttacggagacagttgtttctccagaggaggcatgccttgattcagcactgtggcatgatggccttctcttatcctttctgctttaaaaacttgtgtttattggagacgaaggagaaacaaggtccttcccagttccagcatcaacctcgcctccaggaagtcttccctgagcccttattcatgctggacaaaatgtcgttagcaccccatgtcatgccaacattgtcagtgcagctggctcctctccacgagcttcttgagagcggaagctgtggactagggcagggactggtgcacggcaggacctgaagtgaactccccagtccttgacacacatcagcctgcttatttctcagccttattggacaggcttgtcctctgccttcatgttcttaaagggaaaaactgaggcacagagaatttagtcacttacccagagtgacacagccagggggtttaagcccaggtctttctcattcttgagcctgcaattctgtcagtaggccatccagctccccttgggagggctatttggttcatgcctctaccatcagagtctatctcctcagtgaactcagaccttgtttgacatggctcactctgggatccatcccactgaagtgaaggtgggcgcctgctctgcagctgagtgtgtggttaagtccatcagacattctcagcatgctctcatgcactgactaaaaccatgatgtcatcaggaagtcctccccacctcactctccacttccctctccactgcttattcactgtctggctatgaaagttaaggcctttgctgggtagaatggaagagaccaaggccaggcagtccaaagcagatattcagggttatgttttaagggagggtcatcccagcaacctacttggagttgcatttcaatgtcatggaagccaaagttatgatacttggcttttctagtcacaaaagtgtctgtatcctcttcatgatcttagctgctttttttcatacttacagacataattcaccaggcacggtggctcatgcctgtaatcccagcactttgggaggccaaggcaggtggatcacttgagctcaggagttcaggaccagcctgggaaacatggtgaaactctgtctctaccaaaaattttttaaaaattagccaggcgtgatattgtgcacctgtgggcccagctactcaggaggctgaggtgggaggattgcttgagcctcagaggcagaggtcacagtaagcagagatagtgccactccagtctgggtgacagaatgagaccctgtcaaaaaaagaaagaggaaagaggagagaaagaaagaaagaaagaaagagagagagagagagagagggagggagggggaggagggagggagggaaggaaggagaaaggaggagggggagggaaggaaagaaggaaggaagaagagaggaggaggaaggagaagagaggagggcggggagggagggaaggaaggaaggcaggaaggaaggaagaaaggaaggagaattcgctttgagacttcacagcgtagggggacaggctgggaaaaaaa

SEQ ID NO: 51425 - DNA, 1173 bp, Homo sapiens
agaggttgcagtgaaccaagatcgtgctactactgcactccagcctgggtaacccaggaggcagaggttgcagtgagccaagatcacactactgctgcactccagcctgggcaacagagtgagactgtctcaaaataaataaaagaaagataaataaatttttttagatgcaggaaataactgaatttgacatctactgggcagtaaaatccactaaataataacatatttgagtttaaaagcatagtctaacatggttgaattaattttgaaagcacttttatggaattcagaaagtagtatgaaattcagttgtctacaaactaaatgcttttgaatttcctaagatgctttatctgaatcagactttacggaggaaatgattgtatttaagccagaacaaacatacttttcatggaatgtggttcttttgtgaaatactttgcttactaaacagataggagtaagcataaaatgcatcccaagattggatttgcatttttcccaactctaaagagaattctggaatatttgtataggtaccaataccagttagaaaaatgcaaaataacagtatttcacttttgaaaaggtatggtatttatatcttctgaaatcttccccttctttagccttcagaaactgtttcataaatttgtctagccattcaaagagtttgatgttttacacaaaactgattttcatcttttgaaggtctgtcatttgattgttagtatcaatctggcatattattagcttgttttttctttttcttttttctttcttttttttttttttttttgtgagacggtgtcttgctctgtcacccaggttggaatgcagtggcgcaatctcagctcactgcaacctccgcctcccaggttcaagcaattctcctgcctcagccttctgagtagctgggattacaggtgtaaatcaccacatctggcccaatctggcatatttattaagtttctgttataggagttttttttttaatggaagcttttcttccattaaaattatattcatcttctttagtaacccaatataaaagacagtttaaaggggagcagttctagtcaaagaggaggtgggagttgcagctctccttttcccaggacaatcccagagtactatctgagattaccccaaggccacatgagtggcact

SEQ ID NO: 51426 - DNA, 839 bp, Homo sapiens
agatctgagtttcacaggagaagtgtgagctggggctcagactccccgagcgcctcggtgctgccatcccaggtcacacccacacagctcagccagctgttcctattgctcccacgagtcaccaagcatgaactccccaacatgtccccatctgtctccttgaagcaggtgacatccctgtcagccctgggagtctgaaggagaagcctgctgttgttggcctgggagacttccattctacaaatctatttttcctgtgggcctgtttgcctttgacgccacatatgtcccgcatccaaccacgtgtcagaggtggctgtttaatgccagccaaagaaaacaagcctttccagcgctctgcgctaaaggtgaggtgacagctggcagatagttagtgactcaccccggtggacgccgccccacagacgcgttttgaggggctgctaccaagggcacgtatcaagccaaagatgggaacccaggcttggctgttgggtgaacaacgagggattgcaacacctttttagctaaccccagctctgcagtgacaggcgctcagggagtgaggtttagggaagtcaaacgccctcagtgtttttcccagaacagctggacatgtcagaagacccgagttccaatttcactctcttacttactagctctgtgacctgaggtgactcacagtaacttctccgcacctcagtgccttcacctgtgaaaaggaggtggccccagctctgcagggctctcggggctgtgttgagtgagctctcaccccagagacgctggaacatttggcaggattccctcctcagcgggtaggaatcaagcacgcaggg

SEQ ID NO: 51427 - DNA, 1213 bp, Homo sapiens
cgcaccactgcactccagcctgggcgacggagtgagactccatcttaaaaaacaaaaaagcctctaaatttggccatggtcgtttgtgcaacaatagataatggacataggaacagacaccaacagcaccaccattttgtgctcttctctccttttttgcctcgagagtggatgtaatatgtggagctgcagcagccatcttgcaaccttgagggaaagaccaacagaatcatagtatgattggcttcgacgtcactgtgctgccaaaaatgcaagaacagttcttctgttctgaatttctttcaatgtgagaaaataaacccctatttattataatactataatttcagttactcgcaaactaaagaatttctaatgaatacatggcaagttgccaggcctctgaggcagctgggaaaggatcttcagtggccaggaattaagaagacagaaatgatgtttgatgagggaaatttgtgacctgggtccaggggggttctgttccctcttctgaaccttgacatgccttcagcacaaacatccacagcacatccttccggtggagagaacttggagcggactccagtgaagaatgcctggaaacgcacctaagtccaccctcactgataggactcagagcgcttgtccctctgccatgtcttctgtgaagggaagtgactcacggcagttatgaaactccaaggccaatgtgtatttacatttttgccctctcactaccctggccaggaagatttccagcttgaggtaattctcccaagggaatctttgcggggagggaggagtggctgaagggggtgggattgaacgcaaggtagagtgaatagagcacaaaggtgaaggccagtgggtgctacagaaggaaatatcccagagccggcccagggccagcctgggtccccttactgtgattccttctcctttctggaagattccaattcaatctgtggagggagagctctcctgcacttcccctcaaccacaccctcccccatccccctaaatgtgctgtttcctttaatttacaaaagctctttttttctgagacagagtctctctctgttgcccaggctggagcgcagtggcacaatctcggctcactgcaacctccgtctcccaggttcaggcgattctcctgcctcagcctcccgagtagctgtgattacaagtgtgtgccaccacacgtggctcattt

SEQ ID NO: 51428 - DNA, 969 bp, Homo sapiens
agaagttaagcgacttgtctaaggtcacacagcttagcctgtaagtagtgcagccaggattacaacccagccattctgacttcagagtggaaactcttaactatctccctgtcccctgtgtggaggaggaaggcccagaaaggttaagtgacttgcctgatgctgcagagccatgatttgcagttgggtcagtgtggctacaggccccttgcacttgctctcttcctgtcacctctgccattctctcgcccctcctaatagcatcacccattgtctccagtgtagggccctaactgtggagaaatgagcactagaccaggagtctgaaagtcagaatcctttacttatccagcgacctcgaacaaatcagtgttctcatctgtgaactgagacttgggtttgctcctcccacctgagaggaccttgtggagcaaatgggattaggggcatgaagagctggatcctcatggggttattgttggtgctccctttgtttctctgacgcctagccttggggtaactgttcttccctgtggtttgacctggagggctgtgttctggcagctgggtgagtttgggatttcctggtgccacttagaattaccaacctccataaaacgctcagggatgcaagggttttgcaatcagttattgcatcaggaaaactctctgaatagcctcattctaccctcttgcccgcccaggtgccggcttagccaacgggaggttgggcaccgaggggaaggacagagatttcctttcctatcacgcagacagtgcctgtggcaggaacttcgggaccttggatctaccccaaacactgctggggaaagtgctagtcctctggaggggtagggagagaccaggaaccaaaggaagactggggagtgaagtagggaggggggtgcctgaatgagttgggcagcagctctcctgcccacccctccaaccccaagtagctctcagtcc

SEQ ID NO: 51429 - DNA, 730 bp, Homo sapiens
cctcagcctcccaaagtgctgggattataggagtgggccactgcgcccagcccccaaactttttaattcattttattttttagaatgtaaggtcagggagcataatgcactggacgcataccctctgtgtgtggctacaaagcctcatgtgccgtgagacagggagatggaaactgggggccctggcctctaaggatttccattttagaatgggtagaacactcagagccttcctaacgttgctgccatgcatctaccttggcatgaatgaaaatgaatcaagccagaggtcatcagcagcctaaccttgtccaaaaaaatcgatacaggtttccccatgttatgtaatatgtgagctcctgaaaagtcagagttaaatcaattttctcacagctgaccatgtactgagcatccagcatcaagctgagcatcatgccgaggctacgcaggacacacacgcatgcacgatcagtggtgattctggctttcaggcctcatcataaatgcaccagaggagcttgtggatggcatcgcttggtagagaccctttaatatgggaagaatgacttcctaattaccatcctatttatttagatatttgtatttgtcgatttggagtttcatagtacggtctttttgttttttttttcaattctcacatatagcaagtccttaatgaatatttgttgactaaatgaatactgttcaaaatcaaggcacacccatacct

SEQ ID NO: 51430 - DNA, 523 bp, Homo sapiens
gctgggattataggcgtgagccactgtgcttggcctaagtccctcttttataacggacactgggctgggggctggatgaacacgaatgaacaagacacaacccctgccctctgggaacacagttgcgtggaaagggtcacgagagatagttggacagaggactcgacagcatttggtaggacactgagatctgagtgcaggcgctggggaaatccggatggtgttttgaaggatgagtaagagttcctttccttggaaaaggaagagagggaattccagtgggagggaacagcgcaggctgaagtgcagagatgtgaattggcagatagatcagtttggggccctgccaggagctggcatgggtaggacagaggggaggaggcaagaaaggtgaggcttggaagggaagtgggcctggaaggtgaggctcggaagggaaatggggcttggaagagggcctacttttccatactgtggtgtttggattttatctgggggtggggtccctgcaaggttttaggtc

SEQ ID NO: 51431 - DNA, 7234 bp, Homo sapiens
cctcgattcatgttagctattattattattttaattttcaccttctaattcccagcgtttagctcttggtagatgcttaattagtatttgttgaatgaatggagaattaataaggaaaatgatttattcctggggctcgacctggttttagaaaattaagtatttagcagaaggacaagtaagggctctctaataatagttatattgttgggtgcccagggactccaaactgacctggttcactcaagaaagaaaaatgacagattccaagttgtttcacgcgcaactttgatgctcttccaaatcacacggaatgaatgcatgcgcaccaccaggcagggctgcccgggtgcaggcggtatctctggcagtggccagaatgacttccaccagcctacccacctacccaggttggcactcaggccctagaccctgcggcgcgtgtggaggctggggagggagtaggaatccggcggcagccacgtgggccccttccgcccgctccccacatcctttgtttcccaccggccctggctcaggaagctctttctgcgagtcaccgcgaaggggcggcccgggagcctggagaagctatttccgtgcaatccgggcgggcggcaggcgcgggggggttgggggggcgtggaggtggaggcagcgcagaaggcccagtgtttgcttttatttcctccaacagaaggttctatttgtggaagcgaacagacgctggggattagagctgggagggggcaggaaaagggaaaaaaaaaagccacatccactaccacgcacaggtcttccccggaactaccgcgtgggggtgaatgactgattctggaattcatcacctccctatccccctccttcctccggctgcagccgggcctcggcggcgcccacggctccaaccggagctccccaggcgctgggcggtggggggatccccggggcgaaaggcgtcgccgcggggctgcagcgagcggcgggtgcagagaaccgtggtgcgcgctcccgcctcgcgcccgcagcccattgtgcttactgtgaatgaggcgcgcgcaccaatcagcggtcgcttcgctccccgcagccccgtccctcccgcccacttccccgggcccttacgtcacgggaacttttcctccgccccctccttcggcttctccgctgagctgggggcctgcgggagggcgcgcgcgccgcctcctgcccagcccctcccagccctgggggcgtgtgcgcgcgtccaggccggcccgggacgcaccacctgcgcccgagcgcgcgctgcccggagcatccccagccctaagtccacccccattccccccacctcctactccctctccccttcccccagtctcctccctccgctccggagactgctcgctgggcggcggggccggagtcgtcgcagccacctcattgcacaacccggcttcccaactgtttacacagcccggcctgtgagtgtgtgtgtatacagcgtgagtcaccaggaggcggaggaggtggaggaaaaggagaaggaggagtgcactggccgggatcggtgcagcgctcacactcactcacagtcactctctctgagcgcgtctcgctcgctctcatacacgcccggagcccaggagcgctcaggatcccgagcgccgcgaaaaagttcccccggcttttgctggagactcatcgctttgggaagtgcatttgcttcgtggctccgccgagcctgctgaatcctgtcctcgcggctcgggaccccgggatcgctgaccgctgccgccgccgcctctgcctcccggactatcggcagcctcggcaacaatagtggcggccgcccccagcgaggctccgggagcccttgcctgcgggggtccggggactcgagccggcctccgcctcccggacgcacagccagcgtggtccccgcgtgcaacgcgagcgccggggagtggctcctgctttgcccctcgtgggggccgagccaagaccagtctgcaaactccatcccgccggctggaagaagtcgcggagccggcaccaaacccgcagcgtcttcccgcgcggatcccgggacttaaaaagccggggccaccccggcccaggacgggatgcgggtcggtccggtgcgctctgccatgagcggcgcctcgcagccccgcggcccggccctgctcttcccagccacccgaggcgtcccggccaaacgcctgctggacgccgacgacgcggcggctgtggcggccaagtgcccgcgcctctccgagtgctccagccccccggactacctcagcccccccggctcgccctgcagcccgcagcccccgcctgccgctccgggggccggcggaggctccgggagcgcgccggggcccagccgcatcgccgactacctgctgctgcccctagccgagcgcgagcatgtgtcccgggcgctgtgcatccacactggacgcgagctgcgctgcaaggtaggcgctcccgggccaggacccggctggggtcgggggcgcgggacggggtggtaggcaaaggtgcttggggtccggccaacgcttgggctgggcacagggcggatcagtagattgggtcagataagacgccatttgaccaggttcacgtttttgtggatcgaggggtttcccatggagtgatataatgggggcgcctagaggaagtgcagtgttcagtggctttctctatctgttcctttcctcagcgcccagtgtagcgcgtggcgttccatataagttgtggaattgaaatggattccagggccatgccattccccttctctcattctcctcgctctccaccccccctcccccgccaatgtcctggaaggacgccctttagtgggtgcctcctaggagcttggagcagctggcagctctcttgccgggcttgcacggcacccgggctcagttgtaggtggtaagggggctggaagactgtgtccggctcctgccttggggattccgaattgaatccgcgctgagactagaacacgccctcccaagggagcagtcccagagtcatccacccgaggcggaggaatctgctcggagtagaaatgttgaaaagcccacaccggccaggaaccctcgcttcgattcactttattttccagccagcgattttcctttgaacatagggatcccatccaggaggaggagacacagctcctagaaacaggatccgccgggtcctcctcctgcgcgggtagacgcagaacgttcccacagtctactttatgcgagcgtggcacccctgcttgaggcaccccagagcaccctcgggccgctccttttcacccgaaagataggatcaccccccagttaagtcgcttctgggttttccgcaactcacctgacactcccaacaccccgaccccgtcccggggctcgctgctgccacctactgcccaacccgaatgaaatttcagacgcatgatcaagcccagtttaatagggaggaaaaaaaaaccttttcttctccatgactggggctaagagctgttctgggacaagcatgtatgtgtgtgtggtgggatgggatgggatggggtgggaggagggggcagcaggggatttttctagctggtgccagagcagccaggcctcttagaggtggggtgagtctggccattgtgcaaccccttccagttcctctgagcagataatagctgaatccagatggtgacagcccgtgtgtcaccgtttccagttgagtctaggatatgagtaactggactgaacaaaaggcctttaaagagaccagccagcttcctagaagagaggagatgctactcatttctaggggtggggtcgggtgtggggggataaacaaacaagtggaaaacccattcgcaggattccatacccttcctgtgagaattgtaactcaaggctgcttacacttgagtcggactgtaggcaggttgcttaaggctgcattgtcccagcctccccctccaagtcatctgttccttctgattaatgacagctctgcatgttctctggcccctgcttccccttggaggctgcagagtcaccacattctgtgccctttctgtgttgagcactttgggtctgcaggaggcacatgcacgtccagggactgcttttcagctcctggacaggccaggggcttccttctatcagccactcaactagtgtggcctgcaaacaggaaagggccacagagggtggggggtttgcttagctctcaggagctgacagaagatgggaacatgtacaggagacagttctttcaaatcatctgtgtgaaagcgggtaaccctttgggtatttgcaagtctagagctttaggtgttactggttttaaaggtgtcaggggcagctggggctgcgtaaggtaaggtggcagaggaaaggagtaggtgaatggaacttactcacatcctaagcccacaggttgagaacttctgttcagctccctcaggggtttgggaggctgcctttgcttttctagccccctaaacgggccccccttctctctacaggtgtttcccattaaacactaccaggacaaaatcaggccttacatccagctgccatcgcacagcaacattactggcattgtggaagtgatccttggggaaaccaaggcctatgtcttctttgagaaggactttggggacatgcactcctatgtgcgaagccggaagaggctgcgggaagaggaagccgcccggctcttcaagcagattgtctccgccgtcgcccactgccaccagtcagccatcgtgctgggggacctgaagcttaggaagttcgtcttctccacggaggagaggtgagcggccgccacagcttctcctgtggccttttggaaccaaagcggaggtgcaggtcatgtagttaggtgctgtgtgttggtgcaaaacaaagtcaagggctcatatgtcccagatttagtatttagagcttctgttcctgaggagtcacagccaaggttggtttattctgcattctcttggacggggcctggggacaccgtggcgcttctatgggatggcaagtgttgacagggtgctcttcctctcctaccccaggatcaggttcattccccattgttgtcagaaaggtcagttgtctggggtacaaatattaaactgccctttacgatattgccttctgaaggaagtgttcaaatctttgcttatgccaagtgctgttttgtacctggaaggtttcacagagctagtgagactgtcatatatgcagaattccaccctcttgtttcacacagcattcctctcccatcccagtccaggttctctgtaacatcacattctctggtgactttttagacagcttgtttggatccgtcttcagaaaatagccacattgaatagtaaatggaagttggttaggatggattgctaaatatagatcatagcttacctcataaagaacaagatgagcttgataagagagtaatgaggcattaagattcaaagctgaggtttcagctagagaattcaggaagccgcatgagatagaccacacttgattttaagagccagccacatcccttgtggaaagattacaagcagtaaggctgtaacattgtagaggtgagagtgagttagtttgttgtaagaagtgggcttatctcacctgtgcatttttacctttgactccagagcatatgaaacagtacagggttgagctgtcataaagcatgactttgtatctgacctcgcaataattattggaacacactgattagcaaagaaaagcaaactgttggcaatgaagaagtttctaattcctggaacatgctcctttgatatggtgatgcattttctgaaacatgccttacacacctccttactagcttttgaaatctgcattgcacaggcgaatatcatgggcatggggtttggcaacccgggggttaagcaatgtcaggctgacgctattcgtgtaaccagcacaggtgcagggttttagtgctgtagcagccaatcaggggcagacagtgtgggttgagtcatattttccgtttacagaaccaatgggtattttacataacgacagggaggtcacgctgaggacatactgaagttagcacatgtatactacactccagggaacaggaaggcagaaaaaaaaaaaaacagacctttgagaggaaaaggaattgacccatcagccagtaccaaatgtttgcatttaacttcacaagtgacttactgaaacgggtatttcagagaagcaggcagagacagggtgtcactggatatcagagcttccccaccacatggctttgagctttgggggatccaggagacttgggtggctggttctgaataaggaggcacctgcagcttcataagagagcctttgactgaaggtgttttagactttcgttgttacctgaacagagaccccccctgtagaatacatatgctcacatgttgatgtgccatcccagggggagtgtgtgtccctgtgtaagaatttcagggtccctgcgtccctgaaatccatcagccacttttgtttgctcgcataacctctctgtccaggcaaagtgttctttgcagttaaacaccccaataaatgtaattaacattccttgcaactttcccatcctaattgttgcagcctgggcccaggaggacaaagtttgctctgtgtgcatgtatcagtgtgggcaccagcgctgatgacctgtgtgtaatagcagtgactttgggctccgtgttctgtaatgcagtgtgggtccaggtagccctggcagtcataagagggaagatgggttcgtaggatgctcaggccctctctgaagaagtaggatatgctgctcttccctgctagcttttgtagagaatgcagcattctgagacaggctcccagttctgcaatgggaacttagtaaattgcgtaactcctattaggatatctcttgtaagctccagcattatgaatactatttggggctttgcctcataccctccaccccaggcgctctgccgatactttgcaaacatttattgcagttcgtgttagtttgtgaaatcaggagccctcggtagttgcagggcactgcttactggacgaaggggtaaatagcattcctggagcctttgctgttagtgcctgtgggcgctgttattgggaaggctttgtttttcatagcagctggtgtggaaataatggcttggttcctctctcttgcagaacccagcttagactagaaagtc

SEQ ID NO: 51432 - DNA, 1296 bp, Homo sapiens
ttttttgtatttttagtagagacggggtttcaccgtgttagccaggacgatctcgatctcctgacctcgtgatccgcccatcttagcctcccaaagtgctgggattacaggcgtgaaccaccgcgcccggcttatggtcttaaagagtgtcttttgaagaagtaaagttttatatttttagtaagtccaatttatccatgtttttcttttgtggttcacgtatttgtgtattttctattcttggaaattttacctaacccaaggttagttacaaaattataccccctatttattttcttccaaaggttttgtagttttaggttttacatttaggtcaatgattcatttgagttaatttgtacatatggcgtgaagtagagtcaatatttttttaatattaattgtgtaattgttccagcagcatttgttgaaagatctgcttcacagatagcaagacagaaaggtgcaagacttcgtcccccgcctctgtgtcaaatagaatatctagtgcagtgtgagtgttgtcagagaaggggtgaaggtgcaaactgggggagtcctcatgtgagaaatggggctctaaatggcctaccaaggtggccctcatggtagccaacagcgagcacctccgtgatgaaaccaccaacccgaaaacagcacgcaggtcggccagggaggtgcctggtggggtgtttctcttggtgttctcagagatttgtactcctcttgcgtaagctgcagattaggaaagcattaggtaacgacagggtggccggagcgtattacacaccggcctggcttggggccacggaatgtggcctgcggggatggccttgcctagcaagtcaaatatagcttgatccaggagagagatggcttcctctctccctgctgcagccagaatgatattccgctggtctctggcaccaggaaaacagggtctctggagcctccttggtgtcgcacagcctccggaggtagaagtggggagggaagccaggagtccttgggagccgcatcattcattccactttaaggagtcagactacagagcctttgcccaggggaaagttagcaacaaatagcaattcattgctaacctcctgcctcctccagttccaacatggcccgacccccactaaggaccacttagagttgatcttcaccaccccaaaccagggaccaaggagactgctcctttcacatagcactgccatggctcagatatttgtccagcatctacttattttattttatttatttattttttttgagacacagtctcattctgtcacc

SEQ ID NO: 51433 - DNA, 1961 bp, Homo sapiens
gcacagagggttcccatatactctagtttctcccattattaacatcttacgttaggatggcacatttgtcacaattaatgaaccattactgatgcgttattattaagtaaagtgcatagtttatttagattttcttagtttttatctgaggtcctctttctgttccaggattccatctagaatcccacattacatttagtcaccgtgccccttagggtcccctgggctgtgacagtttctcagactttcttgtctttaatgaccttgacaatttggaggaatgctttgctgaaatattctgtacagtgtctctcaactgggatttgtctgatgtctttctcacgattagactggagggcataggttttcgggggggatgtccccagaggtcaagagctgcacctatttttcagatctaaatgcagcttattagtttagatgaaaatgtgttgtggttgacgttatatgcttgcgaaattgccatgctgataagggataggcggacttaatccccaaacagaaaacaaaatgaaacaaaattacacaaatcccccacttaccccacctcccaaatgctttccaccctcgacttcactttccccccacaaagcaacaatactgccatttctggatattggtagctctttctaaagggaattgaactgactcagaaggaaccaggaagtagttgcatattcagcccgctccggatcaacccctatctgtttctgtgctttctttccaaacaaatctttttagaatcagaagggagggaactgattctgttctcaaggatctacccggccgggcgcggtggctcacgcttgtaatcccagcactttgggaggccgaggcgggcggatcacgaggtcaggagatcgagaccatcctggctaacatagtgaaatcccatctctactaaaaatacaaaaaaattagccaggcgtggtggcgggcacctgtagtcccagctactcaggaggttgagtcaggagaatggcatgaacccaggaggcggagcttgcagtgagcagagatcgcgccactgcactccagcctgggcgatagagcaagtctccgtctcaaaaaaaaaaaaaaaagaaaaaagaaaaaagaaaggatctacccaactagggagcctctccctctgtccctttctcctttacacatttagtccctgctgtgttccaggagccacccttgagctgaaaagttgactgaaacagggctcttgtctgggatttggaaggagagatacccgatgtatgagcacggccccacatcataggtgttggagaggcggatatgtacctgggattgtgtggcccaatgaagggaagattattcttttgggtctgcatgaagcatgccagtcaaagggaattgggcaggaaaggatgccaatcaaatgagcagattaatgagcagggtagtcccccaccagtcaggggacaataaaagctagatttaacttggcccattctttctcagataccatcgacctttgcgtgaatgtgaggtgactgttctcttccaaagtctgcctttgtgatggcaactggtttactttgtacccagactcgcctgagggagggaagccagcttatccagaggctgtgctgcggtgtaccaagccctaatccttaaatccttggctctcttccacatagcacatgtcaaaccaatccctaggagtgggcaggacagcactttgcaaagcactctgaatcttgagccagaggtttgggtttgatttaatattagtgaaaattgcctctattggggcatatacaaaactcctgcctaagtgccttatgtgtatcatctcatccaaccttccagactgcatacgataatgatgacactaataagagttactaattttctttctttattattattatttttttgagacagagtcttgctctgtcacccagtttggagtgcagtggtgcgttctt

SEQ ID NO: 51434 - DNA, 727 bp, Homo sapiens
tcttgttgaaataacatgagagtggcattaaccctatgaaacagggagggggccaggatgttctaccattttacaaaagagaaaactccctcagagatgtttagtgagctgtctaattttgcacagccagcctgaggcagttggaaaatatttctctgaactttgacctatagtttcccttccctcctgcgcccttctatcccccaacagataagccatggacaagaccgctttctagtttcccctccagggattctgtttccttcctttggtactggtaaggaagcttgggtaaagtggctggcactcaggcagcctaccagagctcagtggctttctcccagcctcccatcagatgcctgaggccccctccctcccccacacccctgggctctttttcgaaacacatagaaaagggtcaggaagatgggttctcttcgggctagagatgtttactgggtcaggctgatggattgcaaaatggagattgggcaagggtacagagggcaggacccaggatctcagggctatggttggaccccagcagaccctaaggccatggcccagtgccctgtcaatctaggtgataggtgttcctcagatcccatcacttccgagggcagcgaagctctgagggccccttagagcccacagcccaggtggttgcggggcttgaggcacatacagcgacgcctggcatctagtgagtgctcgcccatgctggctc

SEQ ID NO: 51435 - DNA, 932 bp, Homo sapiens
ctctctcaaccccctaggggttgaacctgtgtcccagcttagcctaagaagctacatagccccagatgcccatgtgtggataactgaggccaaggtgatgcagacctcacctgcctgttggtctttggaagcctcattttgtaggtgacccgaggctccaactgtcctcagcatcttctgtttgcatttgtgacaatatccgttctgtggcccttgggtcttgggaaaacatggcgcaatcataaatgagttaaatgctatctgatcataagccagagggcctgttttcattttcaaaactccgtgtgtcagtggctgtaatgcaatgtccagcaatgtcttgagcaagtgaccggcaggggacagaggatgctgtttactcaagatagccccatcacgcaaaagcagcttgcctaaccgggtttgtaagcgattgttacgagaccaccgttgcaacagggattgccctgggtgatggtcccaggaaggggctggtcccctcaggccagatttggggctatctccctctttctggagccctctgggaccctgggcctctggcaaagagcagagaaaaagcattgttgggaaatcccactcagatgtggagttgtcctcctaaggaagggtgccctggggagaagggcttcatgctaccctgagaggagacagcctcctgtgtcagaggaggctggaggggtggctagggacctgcagaggcggaggatggtgtggtatggttgctgagcaagaacatggtgactcggggttttgaaaggcttggtctgggtaatggttctgagtttgggagtggtcattgtttctccagcaccaaaattatggtgggtgggtgatcacatgcatatggctgacccctatgggtattttcctgaaggtcaaactattaaatcctttatcctttcaccccttcc

SEQ ID NO: 51436 - DNA, 1654 bp, Homo sapiens
aagaagaaaaaaaaaaaaaaaagtgtttctgaccatgggctgttgttaagcaaagtttgactgtcccagctcaagagacctcatggcctctggccagccacctctgtgactgtctcctcagccactttgatactgcctccatttctccaactgtcaaatgatgtttttgttcctcacagccaatctcgcaaatcctgcatttctctctctctctcttttttttttttttttttgagatggagtctcgccatgtcacccaggcaggagtgcagtggcgcaatcttggctcactgcggcctctgcctcctgggttcaagcgactctcctgcctcagcctcccaagtagctgggattacacgtgcctgccactatgcccggctaattttttgtttttagtagagactgggtttcaccatgttggccaggctgatctcaggtgatccgcccacctcagcctcccgaagtgctaggcttacaggcatgagccaccacacctggcccaaacccttcatttctttgctcttgacactacagagctctcccaggatttttttttttttccttccacgtgcaacctcatagatctttctttggtctctgtatgtcacaaatccccaggaacttcaaactttaggagatgctcctgaagattttctgggctttttcctttccctcccactgcacagctcctccctgattactgtagaccctccaggtccctcccagtctcatcttgcctcctgagtagctatcaagggatttataatcacttcagagtaccttgccaaaggtcatgcaactctgccctggtctgctctggtcttcctcccctctcttcaaggcttcctggtctgggtctgtgcccggcggccagttctccatcagcagggtagagctgtgtgtggagtaggttcctccctgggtaacaggtaatgtggacagatagaaggccaggatctggatgcaaagggcagagtgactggtggtgagacactgtgctgtagagtggtgggaggggctggtccgagcctttcgcccattccaccccaagggcagcggcaactcatgctatcttcagggcaggctgttaattaattatgagggactgtggccttagaaagaagggtgctgggtctgagtgtctggacactttctccagttcccttgcacccatctaagtgagggagcctggctcagccacttcagagtcattggtcaccctgattagctcaccctggatggaggatgttccctgagtgtctcttcttggcccctggaggcattgcctaacaccatgtttgccaaatgatccacatggtccagtgttttgaaatgaagtttttaaagagaaggcaaaggcaatttttttggagggggtgggtggttgttttgttttctttgttttccccatagagcagaatttctttgcatcatgagagagttgtgtgatctcaggtagataaatctgtcctaactcagaaaggagaagtgtgactagactctcaccggccttcaggagacgtcagttctcttcccaaagtaattgcatgatggtgaaagtggtttctgaagctcagtttatgaagtggagagggcgagggaagaggctactgggtcctgaatggtgaggacttgtaaaagggcagcggctaat

SEQ ID NO: 51437 - DNA, 2484 bp, Homo sapiens
cgctctgtctggggcgtcttctcggctcactgcaacctctgtctcctgtgttcaaacaattctcctgcctcatcctcctgagtagctgggattacaggcaagcaccaccatgcccggctaatttttatattttttaaaacagagatagggttttgccatgttgtccatgctggtctcgaactcctgtcctcaagcgatccacccaccttggcctctcaaagtgctaggattacagatgtgagccaccgtgctcttccctcatctatcttgattaaaacttgatctgtacaagctgtaaagctctgggtccctctgtctttgtgtttaaggcagggtctccccaaagtgcttgttgtgaaggaggtggtggtatttggcctgagtgtgggagaggcagccagaaggggtgggggcatgggagtggggagctggtgagccacatgcacctttccttaagaaccggtgggtaccaggcaggggcactttcctcaggatctcagggttcctccaacagacctagaaggtaaatctgtcatcaacctcacccgaaaaaccaggaagccaaggctcagagacggggagtgagttgcccaggacgccccagctttctgagtgtgggatctgggagcacagaggagagcccagagcttgccggggatggagagtcagcaaggtggggggcctccagtgtgggccaggcatggagaccaggagggtgagacaggaggctcccagcttttcagcaggggccttgaggagactgaggtgacagcagtggccctgccttcgtgtcctctgaaggactctgcagagattaagactctgtggctcatttctttctttttcttttttttttttttgtggcagggtctcactctatcgtctaggctgaagtgcagtggcatgatctttgctgactgcaacctccgcctcccaggttcaagcaattctcctgcctcagcctcctgaatagctgggattacaggcgtgtgccaccacgcctggctaatttttgtatttttggtagagataggattttgccatgttggccaggctggtctggacctcctgacctcaggtgactcacctgcctcagcctcccaaagtgctgggattacaggcatgagccactgcgcccagccctctgtgactcatttctacctgacctaccagcttttccctctgcgagttctggggcctgagcattgctggaaacccttgctcagaaggtgacttcaaagcctccccagggctggccaccctgtagctgctgtctctgagcttttgtgtcatttcagcccttgaggtggccttccctccttcttatgaatctctgctttcaaaaatgtgtcacaaaccttgcttccacctggaagccttctttgattacttccactcactgcacagacctgctacggattggcatttagagggaacttgggttctgcaggtgggcccagctttacaaaatagcaaagtgcagatgctcatagcagatgaatgaaggggctgttcttcactttacccaaaggtccagtacttgcctttgctaaatatcaatcatgcattagaaaatgatttgatatgtgaaaattagatttacaccaagatcactattagggcctaagatgaggagcatttatgttcatattcaatcatttacatgctttttggaaaacaagttgcgttcacttttcctccctcttttcttcttttgatgggaaaaacaacataaaaataacatgaaagatttctttttttggaaacaagagagagaaaaaaaacacttttccacccataagccctcttatttttgaacattccatcctctgtttacatgcatgtcgacttaaatagctgcgatcgtggaacttttgcttggctgctgggctgtgaacttccggaaaggaaatagagacagatgtcattcccccggcagctagcagagtgccagccgatggcagacactgggcatgggttattgtgattattgctactgctaccagcttgttgagtcggcggggccgctgtcttcatttggcaagtgtaggcatagcccttgtcatttgatctctacaacagtcttgcagtgtaggtattattctctccatttcacagaaaagggaagcaaagtaagtgacctgcctataggcacagaattagaaagcggcacagctgggagttgaacccagtccctctgagattagaacgcatattcttttcattgcactagggtttctcagcctcagcaatattcacattttgggctggataattttttgccgtggtgggggaggggctgtcctgttccttgcaggatgtcagcggcatccctggcttcttatcccctggatgccagtagcttccccgctgcccacatccaaggttgtgacaaccaaacatgtctctgtacattagcaaatgttcccagaggacaaaatacctccatgttaagaaccactgcaatacagccatgaaaagcag

SEQ ID NO: 51438 - DNA, 1676 bp, Homo sapiens
ctaatttttgtatatttagtaaagatggggtttcaccatgttggccaggctggtctcgaactcctaacctcaggtgatccgcctgccttggcctcccaaaatgctgggattacaggcgtgagccactgctcccagcctttattttttttttaatgaaaagatattgtttttatttatgtgtaataggtttgtcattgttattttaagtgaattaataaagattaaaaatttcttattttaaattttgaatacagcaaatatcgatagatataatccataaaaataaagcttgttgcaggccgccataattaagagtgtaaagaccaaaagctggagagctgctcacacggtagatagaagcctgagtgtggaggatgactagcccagagtcccaattccagccctgttcatcactagctggttgtgaaacttgggtaagtttttaaatttttcggaacctcagttttctcacctgtaaaatgggagtctcatgccctgctgagagggtgactgtgagaatttcagatggttggttggaacccctgtcccgctgaagggtggctggctctgggggagagctggaggtggccccccaggggtgtgcgttcagtggagccctgccacagggggtggggctctgagcatgttaccagcctcccccgcaaggtaaatatgtgaggattgggaaagttggtcaaaggaaaggaatttagtttgtgaaatagcttcaaaggggaattggaggcaacgtgttttgcctttgattattggatcgtaaccacttttaagttttgtaaaactctgtttactgtctctctctctccctccctcgctttttaatgcactccttctcagggtgcagaggagctgtcccctgctggtctggggcccattcaggggagatggtggtcatgtctgtggagcacacagccttgggagtcccaaggcctggatgtggctctgactgctcaaggggaccagcattagtctgaccagtacagttgaggggggagctttgatgctgtgtatactgtcctcgggcagccagatagctcttccatcagcttgacatgccacctctatttttaccacgaggtttttttcctttgggctaaggctcttatttactggaaaacttctaccaaggtatgaataatagaacaatttgtcactagctactgacacgcatggtggacttacttatttgatagcaaaaagcaaggctcggggccatgtaacgcaggacggataagtgttgactgccacaggtcctactgagtttccagcctccatgtctttgctcttctttctcctgggggccgctttaacccagccctagtattaggaccaatcctggagatgacaggtctaagatctttaagtctcagcatcaggaacttagcatcagttctccctatcactcagctcccataacttggcatttgttttatttgtcccaactctgggtccaattcttttatgacccaagctaaatgaactccacttggctacattctgagaaatgccaagctggaaatttgtgttgtaatattcaggagcttgagatgaccctgagactgtcctaatcttgatgatgctgtttcattttattttctttctttctttctttctttcttccttccttccttccttccttccttccttccttctttctt

SEQ ID NO: 51439 - DNA, 3882 bp, Homo sapiens
gcaccctggtttactgtgggaaccgagcatatttgtgaaattgttttgtgatggataaacagctatacatgcatgagctgtgactggttgaaaacaaaatggtggctgcaaattaaagaggtgggggccagttgattgtgaaggccaggccctgtgggagtctgaacacattttggtcagtggtagcatcattagaagggcctccccaaaaggctcctgggctgggacaacagttttctgactgtgattacccccatatgctgcttacgaagcagtccttggtccttcatgggtgtgccttagagatactgtttgtgctaagaaaggattggggttctggtcttgtttcttggcattcatgagctggtccctaaagagaagcatgtgaccctggggatgaaccaagagctggcacactgggctggtccaagagctggcacactgggctggtccaagagctggcacactgggctggtggggtgtggggcagggacattgggattcctgtgaacaccgcagggtgtcatccatgcatctcacaaatgcgtactgagcaggtaccacgtgccaggcactgagccagtgctgggatgcagcaggagacagagcctgacactgctggggctcacatcccatgggggacaaggcaataaacaaataaagatataaggtcaggctgtgccatgaaagaaaataaagccaggtgggggaatggagagtgatggaaggcccactgacttggaagagtggccaaggaaggtggtgtgaggagctgatattgggacagagcctgggatgatgggagaggtgaatcaccattaggggtaaaggtagaggtgatagtcagtacaaatgccctgagcggggaggatgctcagtgtttgagcaaggtggctagagtggtagaggaaggtgagggagagggagagagagggacagagagggagagagacagagaaggagagagacagagggagaggagagagagaagagagagaggagagtgagagagagagggagacagagagggagggagagagagagaaggagagacagggagtgaaggagagaaagggagatagaagagggagagagagaaagagacagaagaggaagagagagggagagagggaggtagagagagaaagagagagagtatcaagtcaaagagtccagagaggtgttggggaggtcggatcatgcatagctttgcaggccagtgtaaagttcaagtctaatctttgtcattagctgctgtgtgaccttgggtacatcccttcccctctgtgggtgtagtttcttcataggcaagtgagagactggactagtagttcttacccctacaacatctgctttaaaaaacacccatgcccaggccccactccagtgatttgaatcagaaactctggagctggggcctgagcatcgtgtgtgttccaagctcccccgtttgactctgtgagcagcgggaagtgaaacactggaggagtgggaaggtttgaagggcagcaggggtggaaccaacctctctatcctctccgtccatctctgcctcttgcctagccttctagcagcgtcagcctgtagcctgtcccacaccaaacacccgaatctgcagaaagagcaaatcagccctgtccccttcttcctttttacagacccccacagccagagggcaagaggcaggggtgaccctaggccctgggagattttgtttatggtgcatatttcacttctacaggatcctcacagctgtgatcttgcctcatcgcagttgccaacactgaggggctgccttcaccccatttgctaattccccaagttcctctttcgggcatgttcctgtccctccgtgttcccgtggccgcgtggaaatggaccgaggcccacagggtgactcagaggggaagcccctgcgctgcgaggctcccagcagctcctggattgcgtaagggctatttttgaggagattgcagacgatctgatgaatcatagcaaacacacatggctccggcgggggacagcccttcctcatgttgctgtggaaagtggagcttctcaaaatgaatcagcagagcctgaaccccaggtctgtgggaggaggatgagggtgtgaattacacatttccaaagtattggggtgcggtcgcctggacctgggagcgggggctgcagggacccaagtctttggttttctcagtgactcaaagatcctctctcacccacctgagcctgccatttggaatctcctgaccctccatcagtctagagcaatcacttgcacttcctggggtccagggagaaagttagggtgggcgcagcctagtgtaactgctttcaagtggtggcacacagggtctgaatccagaaatccagaggccaccccttctctgggttgcccatatgagaaattcctgaccacgaggaaaaggctcaaattacacctgctaggggtaggggaggccccccttgctcccccaagctcagcggcatgagaactaagggggagagtggaagggtggttgggagtcgtcaggctttagaatcggacagtattggatttgaggccccaaaccaaaaccacagcttggaaaaagtcctaggacatagctgagcctcagttttctgatttgtcaaatcaggtaataatatctaaacacacgaggattacccaaggcagccggatataatgtaaagaacccccactctgcagccgggggcctagacctcggtctgttaatgatcagctgtgtgttcttgggcaggtcactgaactgttctgtaccccagttttctcctctttaaatgaggataatagtgccttctcatagagttgattaataagctaatagatgcaaaattaaaggaagagtgcctggtgtataatgcatgcttggtaagtgctagctattgttatgtgaagtgagcatcatagcaaggtatggtagatttattacagtcagagctcaggaaaaagtagttgccatcatcatcatcatcatcatcatcatcaatcatcatcaatcattgtcattattttttctagagaactgaagtagatttggataaaagctggggggcctcaaagggcactggagagaggaaaacctgaagtcactgtcgatgtcagactttgggtttccttcataatgttgcttagtttggcccaaagcagagggagattttgcgattagctggacagcaggagaaagacaagggggacagtctgtcttggagaagactgaagttccagggtgtcctatttatgtctctgcaaagatggaatgacctttaggattgcccaattcatagtgtgcagagaggacacggaggatgcaccagcagagagcctggacccatggcagcatcaggtattgaagctgagagatgagagtttccatacacaccctgctcagaataacatgctctgttgggtaatggttaaaaattcaagagattttctgtggctactgctgttggtgaacctgctcccttacagacaggctgttgggattctaggttctggctggtatctcttctatgcataagccttacagctgagtttaaagttaacctatttctataaccaggatgtggtaataccgtgcttctcactcctggctgcaaatatgaatcacatagaaagcttttaaaaataatggtgcttgggccccaccccaggccaattgaatctgaatatctatgggtagacctgagcattatgtggcataaaagctccccagatgtttccagtcttcttctctgaactgagttttttttttttttgcttccttttatcttgaactacctgcccctccccatctcaccccaatctagctgattccattctatcttttccttttgttgaatgattcagtcata

SEQ ID NO: 51440 - DNA, 5448 bp, Homo sapiens
tgcactccagcttgggcaacaagagtgaaactccgtctcaaaataaataaataaatacataaataaatacataaataaataaatcctccagggtacttgtcacttcttattcattacttactcattacttccaagatacttgccacttcttgctcattgcttgctgattaatagggtcatgttaataaagctgaccaatgcaatgttttgtggaatgtccaggtggtcattccagtgtggcactgatgtttaccattccctcatgatgcaatactgattttgatttattaggttggtgcaaaagttattgtggtttttgctattactttcaatgcaaaaactacaattacttttgcaccaatctaatactatctttgttagtggcgggtgggttgaggcagtttcccaagtttcaccttcggaacccactctccccaccttgatagctcttgtctcataagccatgggggttttgccaattaccgagtatgtttatttcagttgtatacgaggaactgaggaaagactactgggtgagtccatggacctggctgtgacctggactggagtctggactccatttgttacctggcctccatacactcccattcgaacaagggccaaaataatattttggatctccatgtatcaactcagaccatgtatccacagtccttaacatttctgactatgaacagaataaaagctgggagatactttgacatggttgtgcagagtctttctacctggaggtttggtcttttcttcagtcaatgggtttcatgtctgaaaataggttcaggtctagaagcttggcatgggatcctgagtcttggtttattttgactgcatagattgagcaattcccttgttagctgcctgtctagctaggcttcaggaatgtcgtgttctattaatcatctccatagctgtctgtgggtcaggcccccagctgctttggtgacttggctgctcattacaatatttgcaatcatcttccctttgatggttaagtgccatctggcatctattattttgggatcctatcatcccccttgctatcacagaagtctaccaggcccagtattttctggctggataatgctataacttggctctagttatggatttggcagtcagggggtaaagtggggtctaaactgagaggtgaagggggtgtttattttcatgtaacatagaagcttctgtatcatttttaagctaggagggagtgctagtatttactaggagtcctgggacacttctgcaggctcagagagtcctgagtatctgggagtttaaggattcttgagggcatgaaccctactgtccctatccaacagcttagggccccacttctttctaatcgaagccctaaccttggcatgacagaattacccaggttgagaattttctggtgctctgttaccctcataattaagacctgggcctgcttctgggccttttctgtcctttggatgcaggagaggggaactctgtacatgctaccaaagaggccctctgactttgatgctttgccttatgctggcaatttccattgtctttctgtagcacgttagtagcactcagcaagccaccccattttgttgtcattatagttagtacttcatccaaacctctcaaaagcctgagatattgcacccgttggttcattcccttccccaagtagtccatcccaatttaccaccagtgaaaggcttcacatttatgtcactctatcaccccaagggctgttcatactccacctaccaccatcctgtcacctcagtgatgtccgccagccagtgagtggatgatccagttataaagtctcatttagtctgctccttagaccaccccacttctgataccaactgtcttaattcttgtatcccaagaaataaactttgagacagaaatctagatcctgggtacttactggggagtgctttggaaacaacacctgcaagcgggtgaagaatctcagattggccagtgggagaagttgaactctgatgcagagttcaactctctgatgcagtcacagaagaggccttagtcgattgcatgggggaccctgaagctgagatgatcctgcagaattctctcagactgaggcctctgaacttctacattgctagtcgtgggttgccagtgaggggacatgactttgggtgaggcagtgcccttcagtgaagggcgcttcctggggagggactgggctctgagccgttagcagccaacactcctgggagctgagccagcctttgtccctaagggagattcatctgggtagggcaccacagcatccactatagcagtggttctcaaagtgtggcactcaaaccagcagcatcaccatcacctgggaactcgcaagaaatgcaaagcctcaggctccacccctgacctactgaattagaaactctgagtataagatccagcaatctgtgatttaacaaaccttcccaatttgatgcggctaaagtttgaggtccacagcactacagggagcaagatctagcagatgactcacacagaaaaattctgccctaggcccatttcaatatatattctcagagctatgtttgattatggaaagtatacatatagtagtatatatttataaatggtttccttgatctatttttttaaaaagcattcatttatttcttttttaaaataatttttaaaattttttttattgagacagggtctcactatgttgtccaggttggtcttgtacccctgggctcaagtgatcctcctgtctcagcctcccaaagtgctgggattacagacatgagccaccgcaccctgcctttttattactttttaaaaaatgtatttccatttgtttcttaatggactgatgcgtgagggcaactggctcatttgtttcatctgcttgtaactcatggtatttcccagagaaactgccagcagctttcagtaagtgctaggtctggacttagcagcttgggactgtagggatatctatgtaaatccaaggcagcccagtggaaagagtttgggtgctgaccttaatttggagcctggctcccctagcacctctcgctgtggaatcttaggaggtcactttccctttctcatctgaaaaaaaaaaatggggttgatgtgatgatgaaaaggaaatcacacatagtaactgctaaaaagcctgagctccactttcacttccagccgcctgtgttccagttcctgctctgccacaccacacggtgcaaccatgggcacgcccattcccatcttgtgcacgtcccttcccatctctgggctgttacccatctacaaagtggaagggcattgatctggacagactctgcggttccttcctgtgcctgtgagcaagagttgtgttggttacccttgtcccccaggcatttgggacccaaggctccaggaagggaaggatcctacaatgtgtttaaaatctccctccaaatcaagtcctaactcctgccatgtccagcatgacctggcacctggaggcatctcaggcctcacccctttccctcaccctgcatacgccagccagtccagccccttcttaatctttgagcaagccagccagcctttctcactaccttgtggactttgcattggtgaacattttctggaaaattctacccccagctctttgcactgctggcttcttctcatcttctggggttcagctcactgtcacctcctcagcaccccactcagcattcccctgcctcagttataatcgtatcagcacttttgtttcctgcaaaacacctttcacaatcagaagcactctcgtttgattgtaagtttagctggctattgtctgtgcgattttctagaatgtgcggccgtgaggctgaaacttctgatctggccttaatcatgacagtgtccccagcaaatgaccctaggacatagtgctcaaaaaataggttggcatgtgtcagtgaatagagacttgctcttaggaatgcaggctggctccgtctctatttgtcaagccttcttgggctctcatggctgagaaatgggtttcaactggcaggcctgtttacccacaccaccaccttactgtatgcacctcgtgcctcatgccatcttgcctcaggaacccatgggatgtgccagatgggctgggcctggctctgctacatgtgtgtccactcctagctcctggctcccagcagtcttcccaggcttccaaggcaaagaaagagaaagagagaagagaaaaggaggctagacttggctttgctctccaacaaaccagcaagcaaacagtatctggtttcgaatttcaacaaggatgtgtcagcagagcctgggttgcaccagcctgggttgggggagagactggagaggttatgtcactggtgaggtgtggtggtgcaatgcgggtgacaacaccacgcaggcccggatgtggtgtcaacaaacccgggctcgagcggggctcctgggtgggggcatgcggaagtgttggggtgacccctcgaggaaggaaagagccacggtcatttcctgagcctgtctgccaggtgctttcgagtgagaatcccacgagaatcctctcacctgccaggtggggcccatgttatcaatgtccttttacaggtgaggaaattgagtctaggaattgaaatgacccgcccgtgatcatttggccctggtatagagctgggaaccaaacacaaatccagttttgtctcctcttcctggggactctgggttgaagttgtgctcaactgtttcctggctttaggaggctggtcaggcttcccagcctccccatctcagcctcctcggttacaaaatgaaagtgttgttgccctcattcattcggttggggtgaggtttgaatggacgatggtggcaaaacccttagaagaccacctggctctgtgtgccccagacccatcttccttctttgtgggtgcagaagtcccagccccctggggaagaaggagactctggtgggcaacgatgtatcctcggaatggctccaagggaatggaaccagcttttagacccccagacattgccagctctgggcgtcccttcctctcaggccctgctcagtagatgactctgtccccatggtgtggtgatgcctgggtcaggctgtctccccacttcctactctgttggctacaagagcaggggcagcaatggctgagagtccagacaaaagcttttagaggaaccaggtggggagagggtgcccactgcagaccaggccctttctatagctcttgagatgcccactctcattgacctcttccccaaaaccttgatgagtgacacagtatgcttcttctttttttttttttagagatggataagctgaggattggagaggtgaggtcagtgcagcagtcccacagcacaccagagctggatttgaacccaggtgcatttgcatggcttctggctcct

SEQ ID NO: 51441 - DNA, 3887 bp, Homo sapiens
tcaatacctgttagctgtcactattatgccatatattatcaagttaaatgcacattcattttctatcgtctctgaaaatgggatacatctaatagtcacttttgggaaggaggcattcttgatgtagttttcattgtctgtacaattaatctggcagaatgatgtcagtagcttggaagaaaaccccaagacaagagcaagagcaaaacactctgtgaagaagtactgcatccttcctgtgatcatccctgggtccagatggctcagagggtggcattgtggggaaaacgttgcacatagacagctctgagtcaaaaagtgactcagaggagctggattctgaatgtgactaagttttaggaataccttaaacaacttacctcatttctattttccttttcatgcatgcatgaagctgatatagagtaaaaacccgttctaaataaaactaaaaaagctttcagtaagtgcgaaatacacattctgtgtaatcaaaatccatgtgtcataattgggtaggtaacatgtttttctttcttagaggtatgtaaaataatgctgcatcttacaatcaccagcatcttagacggatgaattatggtgctgtgcatatccatctgtcatcaggcgttgtctgagcagccagcccactgtggcaagtgccgtgggaggagagtcagaggtgggaggaggagaaagagaggctgaagtccctgcctggagctggctgcagggccatcctgcagagtgggtcattgactgggcagcccaggcctcccatggtccctcctcagcattctgcttccaaactgacctgctctgggctttcctgggtgtcctggttttggctcaccctcacctttcaggtgagtcagtttgcttcacctgagcaagttgcaactgcctgggcggagcctcacctgtgactgtacaagggacgggtctggatcgggcagccaagtaggtctgataaggaggatggggcaatttcttgccagcaccaccttgtagggagtttgggcttcttccccagggctcacggaatgggcaagagaaagaagggtggggacttgaatccagtgaaagtaccaggcctccctgaataccactgacaccccaaagcaggcacatcctcctgtttccctgtgccaagggcttataagaaatcaggtagtgatccttgcccccacctcccaagcatggaattctctaggcttgccccttgggtttctagaggattctgtgggaaaacaaggtttcatttgttaagaagagtaagtgacgatcacttagtttggtgaccttgggtacaggtggtgacatgtggatgttagggcaggaagggcccaggatgaggtcacaggttgaaggaggtggctgatggtagccaaggcccatattacaagttggggagaatgattagcccccacttatttccgaaaatcactgccaggatgattttcagagtttctttgccaaagtccaagttctctggccatttatttcaattcaaaataaatgaaattttgaattcactatgtgctatgaattcacctcccaggaaagagataattgacttggtttggccattactagtttaaaaacaatcaaaaagaaaaaagaaaatgaaacaaagaatgaacatcctcaaagacagttactttctgtattacaactgtaggatattgctatgttgccatcatttattggtttgttgactggttttttgattgactgctctattgagcaaatatttattgaatgcttgtgatgagtcaggggccgtgctgagaacgaggggcatatagtgatgaaacagagaatctctggctttaagaacttccaaaccagtaaatgagcaaatacttatgatatgaagcattgcttgagtcacttggttttcacaacctccctttgaaggagccactggtatctatttcacagataaggagattaagactccaagaggtgaagagacaagagtggataaagggctgggcgagttcagagtggagagaaatcatttccacttaagagtactctgtataagctctggaggggtggcctttgagattgagatgaaggcagagctggccatagcaggtggagagcaggggcaggcagcaccgggctgtggggcacagccagaccacgatgaggggaggtttcacggatcatagagcagccagtgagccatcagctaagcctccattcctggacctttcagtgggggaagtgcagttccatgaaaacaggtcaatatcccagccagacaaggagtagtccctgcaaagctgcatcgcctggagttgcacaactctgatggcatgaacagttgtgtttggagggagagctcagcactgggaacagcacaggcaaggtttttctgcctcatgagtatcttctctgagcaaatcagctcagctgcagggcccccagtctatggaaatctaggtggctgctagagaaagccagctgtaggcagggggtttagcagagactgtggcttctattgctcattcatgcattccacaaatatttactgtgcacttactgtctgccagatgctgtgctaagagataattaagacaggatctctgcaatcacaaacttagtctagtgaaggaagggacaagagaacagctgatgaccgtaataataaaaatcagacacttgctatgtgtcaggcattgctttaagtgcctttcatcatcacaataaagtttggttgtattattattttatagagggagagacagggacacagagaggttaagcaacttgctctaggtcacagagctagtaagagacagagccaagacttaaacccaggcaaactggctgcacagcccaagcctttaaccactgtgctataccaccttgtcatccaaccaaatcaattataattcagtgcagttctactggaggaaacacaggatgctacaagagcaaaaagagtgggttcccaatccaggtgttgaggaatgggtgcaaggaggacttcctcgaagaaatgagactatgctgaagcctgaaaggtgagaagtggcacccccaggccgaggagagtttgggaggagagttctgggcaatggaatggaatcagaaggagctgatggtaagagagagcacagatggtttcaggaactgtgaggaactcatgttggctggaaggggtgtgtggcagtccagagtggaggaggagacaggcaggtgtcatggtttgggaggtggcaccctctagccactctgtgaagatacagcctggtaatacctcaggttcccaagaactccagggcctgtaaacatgccagtcacacgtgggcctgcttagaaggccgatggcctttgagtaaataaacaacaccttgcataaatctctgcactttgagtggcaaagaggccattccctgagggtgacttggaaaaccagaggtgcagtgactcagcctttctgaacctttttgtcatctacaaaatgggattttgtaataaccctttatgcacagcaaaggtggagcctgataggatgtttgtcggggacccagattccttcatcttgttattggcagatttctgtatgaggggaccttgactaagcaagtaaggaggtttagagcaacagctttcaaatgggggttggaaaaaaatctcagaatgtgcggaatatgtttataaaaacaacatgataatttccattatgccaccatcctctcccagaaacagtgtccaattgttatcagggtagcatgccttagaacttagagtttggattggaatatcatccatgacaatctatcaacaggtgtaggtcattcttataggtgagactggatccataaaacaccacctgtctctcatcttgcatggtcaacttcttcaaatgc

SEQ ID NO: 51442 - DNA, 1676 bp, Homo sapiens
gggattgcagatgtgagccactgcgcccagccggacaacttattttaactaaactcttagcttctttgctttggctggaattaaatcatcaaatgctggtcagaaacttagactggctgttgatgacatcctaggcattcctggaatatgattagcaaatcaaaaccatggcagcaatggtgcccaaaatgagcatgtccagttatagacaccgcatacacacacacacacacacacacatacacacacacacacagacttggtgaataagaagtggggaaatatatttgttattactcaacaagtgcaatttgtttgttagacatgatctttcaaaacatgaggtccaaagggaaaaattatgaaagggccctggagaataaaaagtgtgggaatcattgctgtggtccagctgtccgatggaagacttgattcttaatatctccaccaaatgatcagcccctgtttgcctcttctagtgacagggaactcactactctctgatgcagagtagatgcctcacctgggttcaatgccttctatagttttcctttgcccagtggagtgtgggtaaatgtgatttcccacatttccaggcctggctgtgtacaccataaaatatccctgattctcgttcccttggcacaatcttccaggctttccccatttctcatggctagatgattccaggttgactttgaagtcacatgatgggagacacaataccaagcaaagtaggtccctgagtcacccttttatagcagatcctcttgaccagaaacaagaggcatgagatgagaaatacaacttctctagtgttaagactctaagattttggggttgtttgtaacagctgtcagcaataatcatcctgaggggccaaaaataacactcgttccttctcctcctgggttgagaaatgaagatagaaataaatgatgtttttacggataaaatttgggttggagaatgtgcagaggtgtggccacaacaatggccttcataatactgctccctggagttagacagacttgtccatcccatcattggcaactctgtacattcccagagttccttcttatggtcatgcttttgtagatatatcttaaagcagctcctaaaaagagcagacttatttgtttttttctcctgaactcattgatcagataagtgaatccacctctcatgaggagggagcctagtgaggaagcaagacaggaagtgttaccctggataaggtccctctgcatggaaatagaagagacaggaagtgttaccctggataaggtccctcctcatggaaacaggaggccaggaaaccaaggttcccacccaaggttcctttcagacataagagttactgagtccctgtgagtataagctcctcgaggacaggagccatgtctcctccttgtgcctttctcatagcacctagcacaatgctaggcacggagacagtgctgagtcaatgcttgcctattgaccagtgacacctcatgagcatacatgacatttcccccactggttcacttcagaaggaggagaaattgctgtggtctgacccctcacactgccagtccttgcctaacccaacaatttgggagtgtgaaaggccaagctaatgacccaatccttccttggggagatatcagccctctccttctgcccaccaagtc

SEQ ID NO: 51443 - DNA, 2659 bp, Homo sapiens
ccagtttccatgagaagggcaggtgcagtgcaggcagcactcattctcttgaggcaaaggtattaaaagatgtttcccgaccgggcgcagtggctcacacctgtaatcccaatattttgggaggccgaggtgggcggatcacttgaggtcaggagttcgagacctgtctggccaacatgacaaaaccctgtctctactaaaaaacacaaaaattagccgggtgtggtggtgcatgtctgtagtctcagctacttgggagactgaggcaggagaatcgtttgtacctgggaggcagaggttgcagtgagttgagattgcgccactgcattccagcctgggtgacagagcgagactctgtcgcaaaaaaaaaaaaaatttccctttctggagatttcaaaaagagaaggtgtttcttgcagtagtcatagggcgggtaaaaagggatttgtgagtggtggaaagtagaccaagttctgatttagtgttcttgatgttctcttgtatcctgataaatagctgagtatgagaaaaggaattagaattatactttcagagctcgacatggggcccctggctgcaggtcagggatttggtctcgccatttgcatgtatccaagaaattatgtaggtgtaagcctccacagtgacactatatggcagtgagaacctgtgagaggtccgtggcatttgcaaattgaacagacaccagttcctctgtgcctgatgtctgaagaggactcatttttgttttcacttggcctccccagggttttgggacaatttgttgggagcagaggaaactttcagaggaaaattctggacttcctgcttttaatgtaggtgactgcttaagagatgtttcagaaaaataagtgtaatgtgatggtatttgtgctctgagtttatggagcagttcatactggttatactaatcatcccagagggcattgtgaaatcccggtcttaattaacttgtgtcttgaggattacaggatgaatggttcttctgaggggaggagatagtctgtttcctgggcagggacgtggtgaagaacgaggtacgtccgggatccagtcagaggttattggcctgggtcgtgagtctgtcaaggggagttgtgggaagagatgaaactgtaggtgacttctgggccatggaaaaccttgaatgcctcactaaggggtttggggtacagcttttggccacttgggaggagtgggtctctctggctgtaaccataaggggtttcagggctgaaagaactctccgtctcctgagtgctgacgcagtctccaaaatggccacctctctgggcatcccagcgctatcaggcctcaaactccttatccgcagttcgttctcaaaaaacagccaacgcggcagctccgggtgaccaggattgcaacaccaaatgtgtttgttccccatgtttgtgaaatacctcagaggcactgttccagtgccacctgactagttttctgattgccacatggccctggctctatctgccaatactcaaccggggctgactggtcagagattttgagatgtttgtgggttcaaacatagaaacctcattaatgtctgcttgggtgaggagattttacctcctcaaagcttctgaataacacttatcggacttggaggcggctctggtggcctggagtaagcagtgtgaccttggaccagtcacaatctctctgagctttaattccttcaactgcgtaatgaggatactaattcttactttgcaggattgtgacccacaagtatgctatacagatggcaggtcaagaatcagctcactcaccaggcttcctgccccataggtcactaaaaagcaagcgtgacctcaaatttccgagttgttaaaattcaatcttgcatttaatttttgcaaatgaattgctgtcaacctttgactgagagcaggaagaagcctggctaatatataacataatgggaactcagaagcccctggaaattggctgaggattggtcccgtggtactctgcctaaggaagggggttgcaagggatatttggccttgtgtgtcacttctttcattgacctcctaccaaagggaaaaaaactgaagttgcagaggggaggggctgactgttttggggctttgattatgtgccaagcacacagagaatagttttgcatatgttttctcattttgtcatctcctccatcctaagaagtagccagtattacccctaaataacagttactcattcagtaaatatttgttgagtgattactgtgtgctagctattgttctaggaactagaacatatgagaaactgaggtccaaggtggtgataggactcggtcaaagtcacacagctgctgtgtggccaatctgcatacaatcccacctctcctgggattgattccgaggttgttttcattccaggtgctggacagacatagacacacatatatgcacacctagtacatacacccaaacacatccacactcgtgcacacacctgcatatgcacatgtataagcacacacagtcacgtgcacacacacatcgtgcaaacacacacattttcacacacacactaatgctcacacacacatacgcatgcacaaatatgcccacagatgcataccacatacactattctaacatattcacaaaca

SEQ ID NO: 51444 - DNA, 2635 bp, Homo sapiens
ctctgcttcccatgctcaggtgatcctccagcctcagcctcctgagtagctgggaaaacaggtatgaaccaccatgcccggctacctttttgtatttttttttgtagagacagagttttaccatgttgctcaggctggtcttgaactcctgagctcaaaggaattcacccgccttggcctcccaaagtgctgggattacaggcatgagcaaccgtgcctggcctagccatgaaatcttagggaattatcaggactatcagactcatgttggaattttcaaccagaaagtaaagactccctccagggctaccaaaagctgaatctgtttgccaaattctgcctaggttctttcctgcatgcagctgcataatacccagagtcccctccccaccatcaggcatggcatgctcaggttcaagtcaagctcttgcagccaggcgtccccagccccagcacccacctaccagctctcccgtgcatgtgccaagtgcctgtgaaggcctcttccaagtctttcatcacccctcagggtggggatgcatctatttctgtgtttcaacactttgcttccacctggcatttcatttgccagctaataggtgaagtaactcatcttgctactggcaacatggaaactgtgctttatggggagctgtgctctggtccataaagtgtttgcaggggcatggcaagtccaacctggagtccttagtggccaccaggaggtaggccgggttgctgggcttcagtcaagctcatcagtacaggagaatcaaactcttcagagtatttcatcatcccagtggctcaaggtgcgggtggtggtatttgagaaactttggcaactcccgtgtctcagtctctgaagagtgccaacagagtcacctttcccaactcatctattttctttggtatcagggacttctctcactcaataaatctaaatcacctttgcttttaccacgaaaggatatcgaaagtgtgcttagagactccaagttctcattgggaccgttggactccagggtctagcatttacccaactggccacattgcccaactgggtgcatttgctagaggcaggtcgttaagttcaagtgcttgtaaacaattcccagggagcggggacagccaattctgcagacagcttaggaatggttttaccaacatgcacttcatctggggcaagctgcctgtactatgagcacgcacacagacacatatatacatgcacacacatatcccactggagaagataaaacaggaagatggaaataggagctctagtgaagatgatgtcgtggaggagaacagcacccagtaagagaaggggagcccaacaccaggtgcctcatgggcatcaggccagactttgggattgtttagagataaagaaatggacttccggaggtggggttctcctgggcactgagcctaaagccttatatggtgattacttacaatcaagtcttatgttgtaactagaccataaaccctcagcaggtagggatcagggctcctacttattttccctcttctgttccactctaactcagagccttatgcatagacagtgttcactaaatgcctgaaaggaaaggagcttaggctacatttatatcacatgctgtcatgttcaaaccttttaccgtgagttagccccttctggttgctgagctcactttcagtcatgtgacctcctctgctcctttgtccggcacccattaccatggggaacagcgtcaggcttcggtgaactgtcttctagcagggaggcaagatttacacatacagagcagcgtgtgatcacaggctacagtggattcactgaagcgttgtaagtttagacaacacgttggtcctgtgacagccagtaaaaggagtatttatctcctccattaagaggagctatgagggaggcatccttggagcaagtgagattaaggggtggccttgtgagaaggaagagaagagactggttcaggccaaaggaatggcgggaggaaagggacagtgccaggcgcacacattcgtttgctctttgttcctcttgtttactcattcatccatccaaaaatacttaatgagccctgctgtgtgccaggcactgttccagctttagggacagagctgtgggcacctctagtccctaaagtttataaagataacaaacaaatattacaagtgagcaaagcattagctagaaaagcactgggtgtcttaagggcattgaataggcaggggcagaaagagggctaacaagggctgaaggataaggggggcagcctggaaatgtgacatgaggcgttgaggaatagcaagaagtgttccaagcatgaagttccagggacaggaatgagctagactctcaaaagtcacttgaagtcctgcgtggccagagtgtaggaagtctagggaagggcagtggggtggagggaggagtgagtgaacaagttggggtgggaaggtgaggagtagggggtggataaggtcaggcagaggtcacacagaaccttctgggccatgataaggattttagacttcttctaaggtaagccaagcaagtaacgctattgacttgaaagtgggtgcaagtagtgtaaagatgcaacagccccatgaaatattccgggca

SEQ ID NO: 51445 - DNA, 984 bp, Homo sapiens
aataaccaaatcattttacaggggagaaaactgaggcccagagagatgaaggcccccaaagtcacacggcaatttggtggtgccaaaatttgaatccacatctgtctgactctactaccaccccactacagttgacttggggcaagatgggtgtcccaaagcatttgggttgatttagattttttctggagtggttctacagatctttcccccaggtgaggcaggtgccctccctttcctgggaacaggccactctcagtgtttgggaaggaagggacagcaacatgtggtggggtcaaaggcatcaggtgctggccgctgtcattcccagtgggaaatggatctccttctcaggaacctgagcaggagctggaagtcctccctctgcaggcaggatctcaggtgatggccctgaacaggtgattgttttgcaactagtcagggagggtggacaggtcttgaagtctgagaaggcacagatttccagaccaggtctcacccaggagattcaaagggcaggattgcgcaaggacgacctctacttgggcccagaaaacgagaaagtcagcttcttttccgtgtactgtgagtgagtcacctttcccagaagccaggccattctctggttcctcctgcaggctcagagtggcctggctagggtggagcagagcagggaaggtgaggagccagtgacaactccgtcttccccatctccgtagggagcatggagcttagtgcattagactgggtaagaacccatcacgcatccccaaccctctgcaccccatccacatgtcacaaggtcacagctgggtaccgaggctggcatggggccgatcactgtgcctgtggtgcggaatgggatgtgtgtgtgtgtgtataaaagccatggaagccatggtacaatctgagggccagacaagctttttgttccccaatctcatctttcctgcttggtgtagacgggcttcaaagtcagacatc

SEQ ID NO: 51446 - DNA, 2917 bp, Homo sapiens
ttaataagctgtaggctgagggtatagagagaaataaaccattttccttgctttaagacacaggtacataaagtgttaattacacacagtgcaactggagtaatgtgcaaagttctttgagatcagtatttgcatgtggtgtattggaaaagacacaggctttgaggccggacacctgggttttgattccagctctaccactcgctgtgtaaccttgaacaagtttcttaacctctctgaacttccgttttcttatctagacaaaggagaatgataacccacctatcagcattgatgaataaagagtaaataagataccactggtaaagggcgtgggtcaataacctaggactatcatcaccaagtgcaagggcttgggcgagacattcaacctcttcaaccttctgggagctttgaatgctctcaccatacaatgaggtgatggaagtgaaatgtgcttcgtaaaactgtgatacgttgagcaaatcacttttgggattattagccggtcctcattagcatatgaaaggcaaggtggcagggcggttgtcaaagtccagtgggttctgtgggtcggaagccaggccagtctctctgattttatgcctctttcacccactgcccttttagcctccagtcatttcccttccatcacctgaaacctaactgcattgtggaccagaacctgtagatcttaggcttggtttctattagtaaagcccttctcctgggagagggacttaccatcaggcctgagaaagaagtcaggcgtgcttggaatgcaattgcaaaagaggttacaagagcctgtgagaatgccgaaatcaagtgatgtcgagaggttttgttatttttgaaaaaatgactcattctgagaaaccctgacagcctcagaacattcacctagttgcttgcatgcataacccggagcccactgcagaggaaaacaaatcctgttatcacagctgaaggagggggtggtgggggcagtgagggctggtggtgggaatgggaatagggatggggtgaccatttaatggaggaagagtttgaaaatgactcttgctctgcgagtggactgttttaatttcgcaagtccttttctctaaattgttctattcaagccattacagaacacatccgcttggaggcaacacatattctttttgcattcaactgagccagccacgggagataagatgattcccatttgaccctcaaaggaaatggactctcagatggctgaagctatttgtccaagatgagggggcagaagaagaaaggagggagagaaaaaggaggaggaggaggagggagaaagaagggggtgggagaggaggggaggggaggggaagggaggagaggaaaggggaggagaggagagaaatgaaaaccatgcttgtcttgtggagaaagactgggaagggctgtttccagtgggggcacctgttggcctcctcattgtgagatgctccggagcatacgggacctcgggttaggagatgggttctggttctgcccctggccttagccacctgtgtggctttggggaaacaggttccttcaccaagtcaccattcacatctgtaaaagtatgaggatgagtggagtaaaataaactgagagcttctaaaacttagcaggcacatgaatgttctggaaaacttgttacaatatggattactgggtccccgctccaggaattctgatcaggaagtctggggaagggctcccgggtgaggcagatgttgccctttagtctactgacctcccttgagtagccttggtggatgatctttaatactccttcctgttctgccgttcagtgattcaaaatattcaagagctcccggccgttgtgcgctgagccggggctgggaatacaaaatagaataggtttctgcctttcgggcctagcagtgtcagtgtggaagcagatgggtgagcgaatggcgttgtcacacaaggcccacgggggaagtgctaaggcaggagtggtcagtgctttgtgtgggaggcaggcagggcttcagggaggagggtgtcggggtgagcctgtagggtgagcctttaggcctcggttgtccttagccagcaagatgtgtgtggggcgatttctggggagagggcggtgttggctgtttggaacgtggccctcagaggactgttgggccaagtgcttgttgcgtgagctgtggcttcagtgctgctcagagtgatctttgggctctgtcctccagctgagcacctgcagtgcccctctccttagacggccccgggaagagcgggcaggagcaggtgggccaggaccctgggaccaccttgaaatattttctaaatacagtgcacacacacatatccacacacagataaatatatagagatagatgtgtacacacacaaacacacccacacacagagttaatcttccttattagcagattctatatttgtgaatttgcctacttgctaatatttgctcgcaacccccaaatcaatactcacagcactttctcagtcattcatgaacctgtgcagaacagcagaaaaatggactgactcaacacccgtgttcccagcagaggtggaacaaggtgatgctttgccttcttttcttcagctcaaactggaaacaagtctcttttttgaggcctagttagtatcatgtttgggggacttttgtgctttttggggtgattttgatgttttaaatggcacccaagtgtagagctgaagtgctgtctcttattcctaaatgccagaaggctgtgatgtgtcttatgaagaaaatacatgtgttagagaagcttcattgaggcataagctatggtgctgttggctaagagctcaatgttaatgaatcaacaatatctattaaataaggtgtctaagcaaaaacacacataagacaaggttg

SEQ ID NO: 51447 - DNA, 1101 bp, Homo sapiens
caggggaactgagacacaggatctggcgaggtgaggcagccaggaagtggccggccaggcctgcagcccctgcaggctgaggcaggaggccaggctcaccagccctttgccactccgccccttatgtctgtgtccacccttggccttgtcccttaggctacgtcaaacctttctgccttgcttctgagaaatgtgctgaaaacacaaaaggccccttcaggccttcacggggttaaacgtgacctcccagggagccagggccaaggggctctgcagtcttccgggactgtgaaccccctgcctcccactgggacggtggtgtggagggcatctgggtgctcccgggcctctgtcactcaggacagaggcctcccgcaggtcctcgggacctggttggccagtggagcgagaggaagcagtgaggctgaagaagcgggcagctggctgccatcccacatcaacaggccccgtcactgtaaattatttatgcgccatcgggaggctggacagactccttgatgggcttgttaataagaagcctgcagatcctgccttggcccagattcctgggggctgggggtgcgtggagaagagtggagggggagctgtttctttttgctcagcatctcctgattggaaaccgcagcaattccctgtcttctccaggaacaagtctgagctccacggcaccacattcaaggcctctgtgcaggcacaggtctcacacttcgcctctgcttcagctgggacaagttttgactgtctctgcaaatgaccgtatcatttccaactccaggtctttgcgtcatgtgctctttcccctacttggaattccttctctctcagaatccaggaagacagcccagatactacctgctctgtgtgccccagctgcaactcatccactggaaggctcagttcctccttccttgtgctcccacagctgaatgcatccttcttagcagcatggcctccattctgcaccccagctgcatgcattgctgaggaaccttgtgtttactcagatagaacacaaggacaatgacagcatctcccttaaagctttgtggtgcagactaaatatgcacccagttttacaga

SEQ ID NO: 51448 - DNA, 876 bp, Homo sapiens
acgtggacagtatctagcatttattgggtgcttactgtctgccaggccgtgttctaagcccttgatatgcattaactcatttaatacaataatcctatgagatagctattatcaatattctgattttacagatgaggaaaccgagtcacagaggggtgaagtaacttgtgcaaagtgacgtatttaatgagtaacagaattgagcttcaagaccagagagattcatacctcaatgagttccactgcctctcaaagtctgactctcacggcacagagcgggtatttaattgtaagtgcctggcacagagtaggagtttagtgaatgttgaatcagtgctttaggcttttatgtgttttgattgccaagactaaaggcagggaagtcccacagatcggttactaaaaagggcaagtttctatttgttaaacttatctctacaaaacgtttccaggtatgtccccattgttgtgtatcctctcctgagctggcctgctctagatccagcacttgatcttcctgaggcaggggagagcctgtgtctccaggcagaccctgtggccaggctgtgtgttgcatcctcattaccataatctctgcaggctgcgggacctcatccctctgcctgaatattcctttccctctctgctgcaattctgcactgccaccgtgatcttccaggaaacattctttttgtcctgaaaggtcaattcacagggactgtcctctggaagatcccaactgccacctccatttctcagttcccccacaccgggcacacgtctacattatttctgtgtgcacacatttatggcaaagtggtaaatggcgagggttttagtgccagacccctggctttcagcctggctctgccaccc

SEQ ID NO: 51449 - DNA, 1776 bp, Homo sapiens
tttgttgagcacttactgtgtactaggtgctgagtatgccaagatgggaggcagccaaaaggtcaggatgcatttacgtaaagacagctaatgagagactgagtgggtcccagtatgatgcagtcattggctcatttattcattaaggcttttgttgcaccaggttctggggagatagatatgaataaaatgcattcctggtcctcgaagggacatgcatgtttgcaaaatgtacaataggagcgaatgactgttgttgtagaggtatgaacaaggtagaccctggggctcagaggtcagagccagccagggattgcagatgggtttgtaatggcaggggccaggggagctgggtgagatggactgtgcctttgtacttgctgacccttcgcttgagatgctgttcctcctccacatccttctagcctcagagggcctgtcccctcctcagtgcatccttcttgggaagcccacctcctcatctgtctgtcactgtgctctgttcatttcttctgaagtgctaaccacaatccacagtgactgaaaggcagagaaggaaggaaaccaacacttcttgaatacctactaggtgccaggcgctgtgatcttcaactgacacacattatttaattaatcttctcaacactcctggggtgccagaattattatcgtcattttgcagactacaatagaggtcccaagagggcacatatctttgcccaaggtcaccagccggaaacaggaatggaactagaatcagggctagctgccactccacacccgcggcactttcatggcaacgggagaggccaggtaggcaagagaggaagtagagtgactcattttccgccccaggcattttcagcaacaagtaagtgatttccctaattctggtctgctattaatacttggcagctaagaactaagttgcagaaaaacaggttttcttcctaactcagcagcaccacctgcagcatctaagggaacactgcaaaaatgatcagcagtgggaactctggtctttgctggagccccaagagggtatcatgaaggaagaacctgaggcatcatccagtcacttttcatctttaaaaggagcaaattgagaccaagaaaggaacttacttcaagtcacaaagttagtgatggcatatttgaagctgtatccctcctgactcctagttcagtaccccttctcctcactctccctttcatctttctttcttcttcttcttcctccttcccttctcctcctcccccaccttccttcctcctcctcctcttctctctcatttattcactcagcaaacattaattgggcgcttaatagatcttgagcatattcctctttgtgggatataaatatggatagctaacattttcttttcatgttattgcctggattaattgacacctccaatgtacttcataattacaactaagatgcattgagtgtgactgtgtgccaggcaccatgctaaggctttatctcagttaccctcacagatgaggacactaaggcttagggaggtctaggaacatgcccagtatggctcaattagttgtaaagctgggattaaaacccagatccttctgactccagggccagagatcttaactgttatgttatatttactctttaaagtatctaaggttaattcaagaagtatccatactctaaaagaattttgctcctatttaaaataacgacttttttttttttttttttttttttttttttttttgagacagagtcttgctctgtcgcccaggctg

SEQ ID NO: 51450 - DNA, 2658 bp, Homo sapiens
acttgaggtcaggagtttgagaccatcctggccaacatggtgaaaccccatctctactaaaaatatacaaaaattagccaggtgtggcggcgggcacctgtaatcccagctattctggaggctaaggcaggagaatcacctgaacccgggaggctgaggttgcagtgagctgagatcgtgctactgaaccccagcctggatagtagagtgagactgtgtctcaaaaaaaaaaaaaaaagaaaaagaaagaaattgtccaaggtcacctaactggtgacccacattcaaatctaggtactgtggctccagaatccctacttgtcccactgtactctgcataccacccaagcttgccacagaaacacaggtttggggtgctggggatgcttagacagcattggagctgacacccttttttaccaggtgatggccaggcttctggggacactgaggctcatgagggaaaggaacgtgttcaaactttccagcaaggtctgcgtgctctaggaggtgagaggttgtcccaaagtgacaacatttgggaggccgaggtgggcagatttcttgagctcaggagtttgagaccagcctgggcaacatggtgaaaccccgtctccacaaaacaaaaaacaataaacaaaaaacaaaaattagcctggcatgggcacgtgcctgtagtcccagctacgcaggggactgaggcgggaggatcatttcagctcgagaggtcaaaggtgtgacgagccaagattgcataagtacactccagcctgagtgacacagtgagactctggctgaaaaaaaaaaaaaagaaaagaaaaagtaacaagaataaagcagttttattaggaaaatttaagaacacataaaagaagagagaatatgaggtttaatgaaccccacatacccttacccgtcagccagcttcaacagttatcaacattttggcaatgtaatttcatctattacctcccaattttaggatggggagcagagtttaaaaaacatatcctagggcaggcacagtggctcatgcctgtaatcccagcactttgggaggccgaggcgggcagatcacctgaggttaggagtttgagaccagcctgaccaacatagtgaaaacccatctctactaaaaatatacaaaagttagacaggtgtggtggtgggcacatgtaatcccagctactcaggaggctgaggcaggagaatcgcttgaacccgagatgcggaggctgcagtgagctgagattacgcctctgtactccaccctgggagacaagttttatatatatatctggcatcctgttactttacacataaatactctagggtccaaatttcttttggtgaagggtttgagagagaaaaccctcagcctaggttagcactctggggcagaatgggtggctgtgatgagggagggtgctgcattttctgcaaccatcagggcaggtttgcacacacacatctatctttccctgggccctgactccagccccaggcctccctcccttatgactaatgccagggcctgccagattcaggcagctcctgggggaaaaaaaacaccttgtgaaatgctgtctgaaactaggatgagaaaaaaacacgaaaccctatcttgagtggatttcttattcaccatcatcctccttttccaaaagcagcctcttgcctgctgtgggctgctgagccctggcctatgtgtattggtgtccgctgagtcacctgtgtcattcctattatcttatttacccatgtttgttattttctagctgcatgactcacccggccaagagggtaacagagcctggagagatgagtctttcgttaaatgctctcagcccctcctttggaggtgaaatccttttcctcccaactctctcatctgagcaaccaaaagaagggtgtggaaggccagagatgcatggagcctttcagaaggaccagccagatggtgccaggctcagggctaggtataggcagcctcgcagaattcaggaaaatgtctgctctgttttccaacctgcccagctgggccttcctgttccattctccactgtgcccagtcacagctggggagagggtgctctctatccagcaccccaagaaagcttccttctgttgaggtggacgaggtgggaagcagcaggaaggaccttgcctctggcctgtggcatacccacactttgctcactctcattgtcgcttgacaatgacaaccacccctatcagtttctggcctcctatgccggacactatgccagccactatgcttggttccctgcatacatttcggttaggaagagagcctaggagtcttttcatgtagtttccaggccaggacagatagtgggttccccactttaccatagcccccccacccctctgctccccaaagctttacttttatttatttttattttttttgagatggagtcttgctctgtcacccaggctgcagtgcagtggcatgatctcagctgactgcaacctctgcctcccgagttcaagcgattcttctgcctcagcctcctgagtagctgggactacaggtgcgtgccaccacgtctgcctaatttttgtatttttagtagggacagggtttcaccatatgggccaggctggagctttactctttacagagcagccaga

SEQ ID NO: 51451 - DNA, 2423 bp, Homo sapiens
tgcccaggctggagtgcagtggtgcgatcttggttcactgcaagctctgcctcccagtttcacgccattctcctgcctcagcctccagagtagctgggactacaggcgcctgccaccacgcccagctaatttttttgtatttttagtagagatggggtttcaccacgttagccaggatcgtctcgatctcctgacctcgtgatctgcccatcccagcctcccaaagtgctgggattacaggcgtgagccacagcgcccagccggtgctggtttttttaagccctaacttgagctctcagagactgacatcctttcctggctcaccttaaaggatatgggtttgatttattaagaggggctgggatatccttctactggtgaggtaactgaagaccacaagtctaaagttgatttgaggggtgagggggtcaccatggtacatatatatatgttacaccaattcagaggtgttgcacccatcagtggatctgaattcatgggtgctcaagggcctggttgaagtctctggtagctttctttgaatatagacactttactttgtgaaaccttgtcttgcaaaatattcacaataataccaccaccaccagcagcagcagcagcaacaataattataaaacaatcagggactcaggcttttgcaatgagaatttaaaaggtcatatttcccttttccatcccctttcggtgttggatgccccactcagaagaaaacatgctcttagaagtggagttaagaatcaggagcccaaggacagcctcgcagccatagcttgggtgtgtctctgtcttcctgggctccagaactggggccagagattgactaagtgtaaacacagctttaaacagtgagctcagaggtggagtgagcaattctagagtacaaatagaccgactcataacacaacccgatatccttcaaaaacattgtgagtccacaaaacagtgggaaaataaatctctaagtcagagatacagtaacaagtaattgtcttaaactaactgtttagtgaaatttgggaccactggttgagtccatgttggtttagggcattttggagggccactggtttcccttcttggccaaatgatgaaccaaaaaagaagagatgtttatcctttttagatccatggaaacatccgctactaggtggagcctgtggtctctggcaatgccctggaatgccctggaatggttttttccttcctgtgggatcccagatgagatgaaaggtcatggccactgttcttaaaccaggtatgtcaagtctatagccccatttcctgaagatgggttctgcatttgcacagaggtcaacaaacaccagacagggcatccttgctgaaggcacttctctttaggaagcccacctgcttgccctttttgccatgaatgtttccatcagtagtagaatcaaggaaaagtgttccgttgttttccaagtgagacaaaataaaattgcgattgaattttccatgggcccacgatgtttactgcagaatagtgttatctgtttcctctgtctccttaaccccaccatgcatctttgctaagcatgcccaataattcttgtacgtcttactatgtaggttgtcagctaaccatactcccatccctggggtgacccaagaaccagggaatctctggggcttaggaaccaggtactgaagacattgaagatttctttctttagcaagaggtctgaaatcagtgtgggatacattatgcattctagagggagacaaagggtatgtgaaatttctgactggtgtctttctcttagtgttctaatattttcatctcactgagatgaggcatccccaagtgtgagagccttatgaagctcctaaaacaggtggataaagaaagcagcctgaatggtgtgcgcacaggcagagcagtagctgcaatgtggatcacagagagagggcttgcgggcatgccctgcacctcacgtctttagcatgtcagcatactgtagctgtcagatctgagttcttatttcaattctgccacttctcagttttgtaactttgggcaaattattgctcttagcctcagttttcctacctgtaaaatgggcatgatatgttgagaacattacctgtagtcacgtatatgaagcatctggcatataccctgcacatggcttaagccccctttctattaaccccagctctgaggatttgttatatcttgttcagtgaaaatggatagcgtctaagtttgaagaaagttaaggaaagttaaggaagtctaacttcctcctttataaatgaggaatctgaggccagagaagttaagccatttatccaaagtcatggccctgaggtcttgactttttatccagtgattgtttcatggtttgatgcttctgtggagactgaagttgctaatacataca

SEQ ID NO: 51452 - DNA, 2456 bp, Homo sapiens
gcactctggggcatattgaagggtgggagttgggagaagatcaggaaaaataactaatgggtactgggcttaatacctgggtgatgaaataatctgtacaacaaacccccatgacacaagtttacctgtgtaacaaacctgtgcttgtacccctgaacttaaaagttggaaaaaaaacaacaacaaaaacagacctttcattctttgtaaggtcgaggaagtcctatttgtttccccctggtggccaacaaaagcaaacacagctcagtttttgggaaaggagtcagcgcttaagcaacaggaaccgtcacagggctcacctgaccatcctgggccacgcttcggctgtgattcagccctgcagaacgattcatgacccgtctcaactgcagtgacttgctcctggtgacatttcccaaggaataaacagtgtcgtaagaaccagcctagaaactaaagaaagagctagttatttcatctcttttctctttatccagccgaatactttgaaactctgccctttgacctcctccttcagggacagtatcaagaattctcctctttcctgtgtcattttggacaattaatcatataacagtaatgacaatattttgggtgtttattctctggcagacactgttctaagctctttacaaacttaactcattcaatctcccagacaaccatacaggtatgtactattttgacaccaatttttcagaggaagaaactgaggcccagtgagaatacgtgacttgccccaggtgacgtagctagtatgtggcagagccaggtttcaaacccaagcaacccggctccagataccatgttcttaactctgtgaatcagcctcccaggccacgtgctctagtgacaaatcttgggccattgcctagtattgctggaattttgtgtggcataaatcactcgtcttacactttcataaaaatgtggcataaatcactcttcttacgcaaatcatggagagaaatgactttttatttttttatttttatttttttagagacagggtcttatcctgttgcccaggctggagtgccgtggtgcaataatagctcactgactcactggacctcaaactcctggccacaagtgatcctcctgcctcagcctcccaaagtgctgggataacaggcatgagccactgggatcagccagaaatggctttttaagagcacattggtgggttccaccctcagagattctgatccagctggtctggggtggagcccaggaatctgcattgttcacaatggtgctctctatggtagtggaaagagcataggttttgggatgccatcttctgtcactggttcttggatctttgataaatcacttttagctcccccaatgtctgtacaattggtgtcatgattctgaccttatcgtagtcatggtaaggctgaaatgaaatgatttatgttagtgtctggtagatgatttattttagatgctcctgtccttgagctggggggctgacagtgatcatctttagtcatatatgacttgtgaaatgtgaaatgggactttttgggtcaggaacagataccgtctcctcctagcagccacaacacagtgacaagagcatcactgacttggcctgagctttggcatgattacttcaaacctctgtttctcatctaagcagtgtggaaacctgtgcttccatgaagggttgtggggaaagccctcatgtcaggttacacatgaggaagtgaggtttcattctgtcaggcattgtttttcttgaaccgtccacataggggctcagctgagttccagccgggccagcggctgagtgtgtgcaggtccgagaagacgtgaattgtgtcctggatttctggtaggcatgctcccaggacggcagggcatggtggggaatggctctcagaagccccaaagccttgtccaaatactctgtggcaggggatgctacagttctgtgtaaaagacaaggccaagtcacccggggaggctctgtgatgatcccatttgaccctttggggacacgtagctgggggttgagattctctcttcactgagcagaacaggcaaggaggtagcgggcctgccttttgtgttgtctccgaaaatggaatcaatgctgctctcctctcttttccttgccccacatctctctcttcctgctttgagcactttgatatagtctcactttctatctataaagcctgtctgtgtccttactcactgcaatgacctgaaatgcagaagctgcttctgtgaaaaaaaccactggggagcccacagcagttccacgtcatcctctgagtcaccctgcaagtgaaacctgggaaggctcatggggttcacctgggctggccactccctccggggctactctgtggtctgtggcactgtggcatctgctctgggtttccaaccaacattttcttgcctctgcgctctgtgctctg

SEQ ID NO: 51453 - DNA, 1305 bp, Homo sapiens
atccttttgagtagaattccatttcctgcctggacactaatgcagtgattattacaaagtcctcacgttactgttggcaaagcttgagctctcaacttagagcagacagggctcttgtgttgtttaataagtgttgataaaccaaaatgtggtgaggatacgtggttcaccttctactcttggaaatattagagttacaatgagtgttactctgaaggaggatggactttaatgcatctaataagcagcttcttaccatctatctaatcactctgcttctgaaacaagaaaataaaaatacagcaggatatctcaatttcagacttttgtgaacctgaagttacttttattacttttcagctcttgacagtggtttttaatcttaattcttcagataggaaagcggaaagtcactaggatctcacaggctgaagataaaagataaagggttgctaaaatcagagtatcaggacaatgccataaaatgtttaattggccttatttataaaacaagaaataaagcaaactgcttttttatatctctgtttttaccccccgtgttgtcatgtccacattcagatcccttccgtagaggtggaggtggcttctatcttctttaacctggtttggtcattcagcttcggatgtggtagctgtgacctgttggctcctttagaagtagagaatgtcatgtctacttccactccaggattcccattactgtttccttctcatcccttcactttggttctgatctgattcatcccagaatgcatgaagccagcactgagtcattttggctgtttgtgtctgagagttgtttaccaaagtgagtgaccaaatgttccccttcttctggctcctggggagtgactgtgggctctcttccaagattgtggctggggaaagccagcttagtcctctgagagggcacacaagttgattcctctaaactttgtatagtgttttggtagaggatgagatgtgtggatgaagttcttttatagggtggtgttggtgtctctttataaaggctcatctctagcttattttctgtattttctaaatattttaacctctagcaggtaggaaagctgtgactatggaatgttacatttcaagcttattgtgatggtctgctacattaatggcccctgttgatccatgccttcttgtatttatgttcttggctggtctcttctccttcaaagaggcctagcttggtgacccttttaaaccaatggaatacagtgaagtggtgccatgcaagttctgggtttaagtcctaagaaagccgtaaatctc

SEQ ID NO: 51454 - DNA, 823 bp, Homo sapiens
cagagtaagactgcatctcaaaaaaaaaaaaaaaaaatgggtacaacatgccttgtcactcatgatgttaactttgatcacctggttgagacagtgtttgccaggtttctccagtggtaaggtagttctttttcccttcctatgctcaattctttggaagtgagtcactaagtaactaaataaagcctgcactcaagcgatggggtatgcatatgtgtgtatacatgtgtatatacatacatatatatatatacacacacacacctgcatgcatgtatatatttgtatatatatgtgtgtatgtgtatatacatacatgcatgcatgtatatatttgtgtatatatatacacatttgtgcgtacacacgtgtgtgtgtacacacaaatatatacatgcatgcatgtatatatatatacacatacacaaacacacaatccctgagtatgaactgtgcttagtgactcacttccaaagaattgagtatgattatatatgagtcagtgacctgaaactgaacttaagagaactggactaagtcagaattgacacattttttaaccatgtcacttcatttgccaatactcatcacactatacttttcaggagtacaaaggacatgcagattgcaaaatataacacatttttcttccctttattttttttcatgctgccgtgacttgcctcatctccactcatccgtcaatccatcaaaattgtttttctttctttaataaagatggcatcttgctatgttgcccagagctggttttgaactcctgggcttaagcactcctcccaccttagcctcccaaagtgctggg

SEQ ID NO: 51455 - DNA, 1473 bp, Homo sapiens
ttctttgcctactgtgtgactttaggcaaatgatttaatcattttgggcctcaatttcctcatatgaaaaatgtaaataaaggcaatacctatttcaaagggtcgtcataaggattaaacaatatatagtccacacaagatgcttaaaatattcctaggcacatagcagacacatgataaacgctagcaattattacattatgattccatttgtatgaaaggaaagaaagctaattagctaatttctggaaagagatataagaatccgctcactaattgtttctctggggagtggagatgagaggcaggagggataagggcttttcctttcactttacccatcctgtgccattggaaacaaaccaacccccaagttattagctgtctcttgttggtgctctttctcacataatgaagagtagctgagcactttcttctactgccgggcagggttgcttctcagatatgtgggtacagctgctaaaagatttccataaaggttggtaaataagcgaatccttgtcctccatgattctgcaaggtaagggttaactccttgcatgctagaagcctctgagatgctgactcgtagtgaccctgtttggtttgttccctgtttctgtagtccaggtcagtaaatattttgactttcaatcctggtgccaggcactgacctcagagctgtacacccattgtatctcactgtaaaccattcttcaaggcactcattcttattttccaaatggtgaagcagaggttacttattacttcttatgcccaataacacagagctcatgcaagaattctgtctggcccttaaggctatgtttccttctctgtgtatctttgctttcattaactcacattccctctctaaaaatgtttatatgctctgcttcaaaaaattattctcgaaaaggttgttttttgttttttgttttttttaccaggtttgtatttctaacttgtctcaactggtttaacagtttcaagagaagagcagagttatcaactgtgtgaataattaacaagttgagtttgatctctgggcaaaaattgaccattgaactagattatttgcccttaacaaaaaggcaaggaaaatttctctatataggcattgttcaatgcctgtataggcaaagaagccaagaagacttattctaaacttgctctgttcctcctaccacagagcaagtcccccctgcccaagggtacaaggcctgaaccagtcctggaaacaaggactctgactccagggagactagaagtggttttggaaactgtacagcctcaggtttaagtcattattagctgtatgaccttgggcaaggttacctaattccctccttcatttcctttgtcatttgtaaatgggggtgacggtgtttataggcattaagctaatatccagcagggatattaacattttccagcactcatcaaccaatcaaaaagctgtacatggaactg

SEQ ID NO: 51456 - DNA, 3285 bp, Homo sapiens
acagtttgctccaccgcggagaggaagacagacagggggccagagggagacgccccccacccccaactaaagtgtttcctacctgctccctctgtccccttcctcctcccccgtccacagccggctgcgcatttcaccaactcttttccaaagggcccaggaatcccagatggggcccagacagtggcaaaagagggaggaagagagggagaaagggagcagcggctgctactgcaaacagttccccttcgcagctctgcgctcagctcgcccatcagtgtgccactgcctctccgtcctcctcctcggagctgggcgcaggggggcgcccgggaggcggcgtagtccgcgccacgttgctgtcgccctcctccggctccgccgggtgcaggtgcgtggcgagctcctgcagcacggccgcgcgcccgatctggtcgttgcgtcgcttctccatgatcaggtcctctagactctggaactcgagcgtgtggctgcgctgcgccgacagctgaatctgcagccggtagggctgcttgccgatgcgcagctcgccgccgatcttgaactcgcgcttgccgtagcggcaccaggcggcgaaactctccgagttgcgccagctcagctcgcgctccttggcacccacgtgcgccagcgcgttgcgcaccacggcgctggagcttagcggcttgtagcggtacagatcgttgaccacgcggccgcgacggccctggctggcgtcagtcaggaagctgttaatcacctccagccggtgcaggtgcaccacctggaagttacccacatatacggcccagtgcgggtactgagcctgcgacacgaactccaccagatcgcccggcttgcacttgttgagcaggttctcgggcgtgtaggtactcagcgccgccgagcccggcgcgaagctcttctggtagatgcattcgtcccggtagaacacggagcattccacctcgtgcagccgcggatcgtagggctgcggctggggcggcggcggcccgtccccaccgtcgggcaagccgccgccatctggcccctgaggcggcggctgcggctccacgtcctcatcgtcattggagaaaatgtaggagaccccaatgcggggcccgtcgtcccggtccacgccagtcgggtcggccgtgggaacttccttgtaacttaggtgggtcaatttctccacctggttgcccatcacgctgcggacacacgttcacaccgccgcaaggggagaaagcgaaaccaactccagggtcatttgcacaggtccccggacaggggctgaggctacctgttgggagaggaaggcaagaaagccatgcaggagcccctccgtgaaaagggcgttttgttccgaaaaagaatcggtgggggctcagcacctggagccattttagggggaagtctcgggtgtagcgagctttccctcgtttctccacctgtaaggtcacggtcacaggagactgggcaactcctgttctccctgtccccagcccttcgcctggccctggcaaaagcccattgcatcagcagcttctactgcttccgcctgcgccctacctgccaagcttgggcaggaagagggaaggaaagagaaactttacgccaatcccccccctcctctgctaacttcccctcccaccctcgggccctaactagccccggggacgcctcctccccaccaacgcatccatccccagaggaacaagcgaggatctcagagcgcgacctggacaggtgagtcaccctacctggctcacctgcagcgctacctcctcccggctcgcccgcccttcccccgcgcccgccctcaggctcgggttacctgcacaaactcacccgcggagaggtgaaggccgtggggcctggggaagggctccctgccgcgccccgagacttctagggcgagtttgaaggtgtaggctcggcagtccctcctctcccggcgcgggcggcagcgaggctgggcagagggcagcgcagcgggcagactaggggcatgtctttcccccgcggctgcgtagcgccccgatacttgaaggcggggggcaatccctgttcacaccgcgcttcctcccgccagctggggctgctgcccctcctcagccagctctcgggggaggtggggcgcgaggaggagaggacggcagcctcgcagcctggcggcaacagctcccgcttgggccgggcgagcaacaagcaccggagctggagggacgggattgtagatccggctccgggctcccgggcgggagcgcagcccgtggcatttaaagagacaggcgctcactccccgagctcgggtctttttcacattgcgccgagcggccgggagccccgcccccgccccgcccactcgggcctcgggactccgcccggccacgcccccgcgccggagcgggtttaaatccccctgtaaataatccacccgccgcctggggctggtgctgtgagctctgcttgccttccgagacaagttagaaggcaaacacaacttgccagtgtggaaatgagaaagggaaggagagtttggtgtttgcgccttttccctttgacctgttttttcccagagtacctggagaaggaggaacagtcgtttcttttctttcctggaacatatttcttgccctaaaggtcacaagaaaggattcttcaccaggacagctcgaagagtgcgtcatcctagaggtgttttcagagttagtagtgggaaactttggggtagaaaagaaaatcgcagaaaagaaacagtataaaacagaacgaagacttattcactgactgggtcccaagaccaccgctctgtttattagatacccctggaagttagtacaaagttcataacctccgttatttccagagaggtaccagttcgttggatagtgagagaagcgtgcagctctgactgcttttttttgggggggtggggggttaggggatgtaggaattgcctaattcctacatcctaattctaattgtccttaaattagaaacaaattagcagaggccctagtggatatatttccttcctgttgacttagggaagtgacaggagaccagtaatgcctactaacctccaccacaaaaggacacttccacctctccactggtttcgtttcttttacctaaatgtaggctaccaaagtgttttttttgttgttgttgttgtttatttttttaaaataatgggtccggtgagggtggaggattaacagctctgtttacaataaacaagtttaggcactactgcaagcacccagacttattcgtagg

SEQ ID NO: 51457 - DNA, 1388 bp, Homo sapiens
agggcatggacccaggcaggtctgacctcaagcccactgcatatggcgccttcactgtctggccacggttgtcccagggatatcacaaaccacaacaggaaggagcttcttggtgaggcaaatgcacccactgatcaagtgtttatttttcctcttcctcctcatctcactggagtatgcttcaccctgagcagctagccccagggtttcagatggattgtttagatttcagcatatccagacagatttcaggaacagattgatagaagatggctccactggggaaaggaactagaattttctttatagggatagtccagtgcgagggtggagagagaataatctgggaaccctgactaatttgacaaatggatttatttccgtgggaggatctgagccattaaagcattgggggcataccaacaaagataaataaatcaaatttcagtgttctcttccgtatccctacacccctgcaggcacgtaaacacaacgccaacctgggcgtgaagaggtctgtgagtttggcaaggtaaaaaatattcccattcctaccaggcaaatttctttcccctagtgattaagaaatttctgcccaaatcctcagggactaaatcaacatttcccaaagccatcctctgcccttttccttccattatccccaagccccagggctgccagccccctgagtcattatgtaaatgactcaccagcaaaccctaacagccattcactaggaatactccacctgtaaggtctctagttaactgaatttctgttaaaccgaaggttaaataaaacctgcctttttgtatccctggatattgaaaatctttctaaactgtgttagttcactcacctttctaagtttctggagcagaatgaaaataattacatttttgcttggtgatcgggcatcttgcattgccatggggcattgctctgcctatcaggattaaaatttaactcgagttttagactttggtgagaagttaggctgtaaccattctgagttgaagaggaaatttgtctaattttgttgagagaaacacaaccctttgccttcctagtgcctagcagagagtcgggagctccttttcgaaaatgctgatggagttgatgaatgactaatattatatattttttttgagacagagtctcactctgtcacccaggctggaatgcagtggcacgatcttggctcactgcaacctccgccccctgggttcaagagattctcttgcctcagcctcctgcgtagctggggttacaggcatgcgccactatgcctggctaattcttgtatttttggtagagatggagtttcaccgtgttgggcaggctggtcttgaactcctgacctcaggtgatccgcccacctcagcctc

SEQ ID NO: 51458 - DNA, 917 bp, Homo sapiens
agaaacatgtttccagctgggtttcagacaaatcctaagattcaccaggaatttggccaatttggtcaaatgtccaccccttgggaattactatgatggaacgatagactacctttcttcccttaggcttggtttcatgctgtgctctacagctcatgaactgagagtgaggggcatttttcaaataggaaagtggattctatttctagacaaaaacaaaaaaacaaaaaacaaaaaaaacagtattatttgcagaatggctacaaaaaatcaataactatccatcaaagggtttgattttttatctgggccttggagtataggtgagatcagaaatgttgagagcaaagtagtgtgaaagtgaataaataaattattggcacacagatcctgttgcagaattcttgttgggtgaagtcatagtcataaccctcctccaaaggcacatttctcatgcccttagttccttccactaatgttctcccatttatgtcatgagaggtagcataaaactctgaagctgcgccactcaaaatgacaatgaatttagtaaaatttacaagtgagctctttaggcttaagtgtctttgtatggtctatcatatcaaggggcgatctgtgagacaaaaagataccaggaagttccatatttcaggaagaaaagggtagattttgtatcatatatctccctatatccaatataatgctcaagaatgatgaaaatgatgatgataatgacagcaattaagagtttttgaatgcatcaagtaccgtgctaagtgctttgcatggattatttcatgaagtctttataacactacaaggtgagggccatttttacctctatgttataggtgaggaaaccaaaacataaaatattaaatatattgactaaggaaacagtcaaagataagatc

SEQ ID NO: 51459 - DNA, 1791 bp, Homo sapiens
tcttgagatatgcagatgctgcattcaactaagttactatctgagtgcttcacagtgtatccatcattcattaagggtctgtggttgcatgcaacagaaactgttccagactgacttaagtaaaacaaaacaaaacaaatctacaggaagtttatctgtgagtaatttccagaatcaaataaagagggaaacaactagacctcaggaagagcaatcaaagaaacagaatttcataaggggtgtttcaaaactgacattctttcaactgccttctgtgcaagtgtgatttactgggagtcagaattctagaacacagtcacctagtggcagagagaggaggcgctggcactgtgactgatagtcccagaaggcccatatttagtggcagttttagggacatgggcagcagggcaggcaaaacactccatttcaactttaaggaggcagtgtgacagagtagaaggtatgtggagtttggcattagaaatgtctggatttcagtctctcaactctgctgcttattaccattggactttggagaaattacttaatcagcctgcacatcagttgcaaaattagctgatttgacatgaggattagagaaaacatagacaaaggagctggcacatagtaggtagtgactttcgttgggcactatcaccaatctttgaatcatcaactattggttatttcacttcccacaggcttagggagggctccttggataccatctagatactagctgttacccaatggtaccctaggggtcagaataggctaatactcttcctaacatgtctcatacttccagagattaaattcagttgtagaagatttgtctgaaggtgggggaaagtaacctttgaaataaagtcattaagagctggcctttctgctgtatttcagcaaggggaatgagtcaccatttccctacctacatgtatgtgtaaatacaaagcaaggttaggcaactacctgctgttgctttattctctgtggccctaacctgcttccatggcagcagcttgtgaaatggcaaaaaatgcaatgattgcatgacctaattcaggcctggtgcttcaagtgggaaacatgtatgggcctctctgtgtcatacatacactcagagccctagggcaattgaaacagatccttgtggaaatgaattcagagccctacacctactcattacataacttgaggttaaagaaacaaagccctgtggatgggtgtgcctgggtgtgcgagccagggagaaatacacaagatacctagagccctgccctactcttactaagcagaaaaggaaagccagaaaggacctctttgtcatgggtagctagaatgttctctgctccagagcgtcctgtgagagaagagaagagaaaattaacatctactgtatgttagaaaacaggcttggtgatgttgctaaggttatctcaaactttacaacagttgtcattttttgaactgagcatgatgaaataacaatccttagaccatgaatgaagaaactgaagcctaggaaaatgaagtcaaattgctaatgagtggtggtggccagcttgtaactgagatctgtgtggccacagatcccattctagctcagcaccttgctgtcagtgagagagagacatggtcaggcttccagtcctgttttgctctatcccagtgaggtagtgtgagatgagagtcagattgccatcactcttactcaatagatattcacagcacaccagaaatgaattttctttccactgcatctttctggagtagaaaaagatgtgc

SEQ ID NO: 51460 - DNA, 893 bp, Homo sapiens
ctcacttttactccaaagttagtactcttgactactccactatatggcttccctttaaaaacattatgtttggttttcataacaaccgtgtgaggctaaataacttatctaaggtcactcagctagttagtggcagagcttggatgacaactcaggcctgcctgacccttgatcctgtgggcttctcattttatgatccaatgacctgccattgctaaggtcttctaagttagatcactcttccaactcctttctctattagtaggctggaatactactctgtttagtaggctggaatatgaggagggtacctttcctttccaaacagcaaaatgtggggcatacggagtcttgtggagaggcctgatgtgtgtatcagttcaaatatcatcgtggacagtgctgtggggattaaattcatctggacccacagggccaaggaaggctatgtgggcaatctgtcctctcaaggtggatttctgccaaggtctcatgctggaataatgacagagctactacattctttctctaaggctgacatgatgcaataggtctgctgacaggaggtttttctttctctagttgcccttggacacttcacggctatgtctactggggttatgtaaaactccttgtgtgccttggcaggtggccctgggaactcaactgcgttatccttgtagtaagcactcaagcagggtgaaatgaagagtcaattctgctgaataacttctgaagcttttaggtcaatctacttggagtctagtcttgtgaactaagcttattgtgcctcaattaaactaaagatgtaaaaagtgtatgtatatgtttgtaagacactagatttcaccattttgcatttggacaaccagtttggatgagcacatttcctg

SEQ ID NO: 51461 - DNA, 1124 bp, Homo sapiens
tatctgttgtttaagccacccagactgtgatattttgccatgatgcctgaactgactaatatacagtttacctgtacattgtttgttcctctagattataagctctccaaggcagggaccatatagttctttaaaagataatgtcatggctataagtttactgctatttccccatcacatgggaaaaagaattgtcagagttgtcagccattagagtttatttaccttaagggtgtctgacgaaatgatctgattatctccttaacttcctaaatagctcaaacttcataatgtttgaatttggaaatatctgttgattcaagagagacagattacatggtctctcttgaactttggacatctcttccacaaacttccaaatattaggccatctattaccagaccttctgaacttaaacaaatcttactttcaaccccactttagccaccttcaccatggcctaacttttgcccttgttatttgttatccatagttttctaaacttagaatccttaatcactggcattatagttgtttacttcaacctccaacacttacaggtccctcaaatcctcatttattcaacccttgttttttgtcatcttataaactgcaaattcttgaaaatcacatgtcctctctataaatcagatcccttcatatcatgttttcaatctgagtttggctccatgattaatcttccaaatcaaaggtttacaaactgtggcctgtggaataaatctggtctgcacctgttttagtaaataaagttttactggaacacagtcatactcatccatttacatattttttatatccattttcatgttacaatggcacaggtgactagtggcaacagaatctgtgtggctcacaaagcctagaacattttctatctgtcctttatagaaagaagttaccaacccctaatcaaaatcaataatctatgaagtagaaagtaaaagatgatcttttggtgctgacatgaacatattatgattaaaaaaacactttattgaggtttgattagcatacagaagctgtacataacacatacaacttgaagggtttggtgatcagtatgcaatcatgaaaccatcactatgatgaatgtcataaacat

SEQ ID NO: 51462 - DNA, 2437 bp, Homo sapiens
aggagaacagatttccaattgcaatagtcttgactcatcaagttcactagaatctggaaattaaggcttccgttctgctaattgttagcagagtgggctccaggatgatagcatagccctctgggtatctgaaccctcattgaaacatgaaggggttgaactgcatgttgttctaatgaaaatgcagccttcgttcatgcaactaatatttcctgagtgcctgccacaaaccaggtgtgttacataagggactggaactcaggagttcatttttactttattcaatattaattataattttactttgtgtcaaagaaaaaaaaacacaatatcacttatttaatccagggatgacctgtaaaccctagcagtggcgggcgggggccgggggggcggtgcagggggatggtaagcaggggcacaatggcaatggcgacagtaaccagaaacgccctgcttccctcaaaagagaaaaaaacccagacctatttccatgacggggttcttacgtgtccatttgggaatctgaatgttttgggtcttttcatttccctcctcccacaaagagaaaaagctaattccatatgtgtgtgcgcacacgcgcatgtacatttgtatgtgtgtaagggtgtttacatgtatagtgaaagtgccatagctatgtatttaattttgtgtacatgtatgtttgtgtatgcgtgtgtttcttagtgtttgcgcataaggatgtggacatgtgtggtctgtgtttgtattatgtatgtatatgtgtgtgggagggagggtgtatataaagtctgttctagattttaccttactctaagagctgattaataacatgaaaaatgtgagtcagaaagctgaagggttaactgtttaatgaacataaagttcattcagaaaaccgtggtttgtaactggtgagaggaagtattgagcaatttcttgtaaagttacaatagccagatctgcaaaggaaacccctcccagcctggaattccagagtatttcctagagcttgaaaggtagccaaaaaatgagcaggcatttaaaagggaagggaatggggggaaacctggagtgaagaacatgaatccatctgtctttcccatccactaccccatccgcctctttcataaatagttttaagaggaactaatagacctctacttaatatcttctctcgtaccttctcacttttgtcttcctcatgccttctcttctagtgtggctcagtgcttagtgcaggagaaaccagtaaccctgaattgcagctcttcctttctcactacatgaattcaatttcctcatctgtcaaatgagtataccaattcatatctcgaaagctgttgctgtgagaatcagataagcataacctcacagcttatgtctattagaacagcacttggcacatggtaaacactccaaagtatttgttaaatgaatgaatagattaaaaggtggcatgttttgtactaaactgttcaatgatagtgtaaaaccatttggtcataatgcggaaagggaagtaaggcggaattcctttaatctgtgttttacgcaggttccaaaggagcgtggtggagagaaggatgcagatagtctgggtgagagctagaggctggagtcagcaggaaggactgaggccgttggtgcttggggagtgagggctcctttctgctctgtcctaggctaagttccccacccattccttcttgagatctacctcaaacacaaatccctcaattgaccacagggggcgccccttctatgaatttggcgctgatagctgtgatctgcccagcacagtggggaaaacacaaaatttacagatcaggcatgtccgggctcagattcctactccagcacctggtggccaagggaccccaactgttaaataggcatggtgatgcctgctttccaagcctgttgggaaagagagaggggagcggggaggaatgggagagagagagagactgagcaagcatgccaagacttaatatacttatatttatattaaaagaaataaatatcagatgattacaatttggttgaactaagatacacagtagaatatggaactaatatccaatatcacaaagtattctagcgagccttcctacagaaagaattgtgggtggctggggagtaggcattagctactatgtgagtgcagagaatactcagccttcttccagatggtgagctaaagttcaaagatcaagtcacgtacacaccttctttctcatcccaggtcctagtctgcttgaattcaaatggccatccacaccttgcctgaaatacttgcaataattaagatacggctttctgcctgcttggggtttggtccacaattcccttaagaggcctcatttcaattaggactcacacatcccttcaacagtaattttgtgtcaggcttggttagcaactcaag

SEQ ID NO: 51463 - DNA, 12038 bp, Homo sapiens
ttcaagggattctcctgcctccagactcccaagtagcttggattacaggcgcccgccaccacacctggataatttttatacttttagtaggggtggagtttcaccgtgttggccaggctggtctgtgtgtgctttggatttgagacactctgatgatttagagttgaaaatgggagtagattgggtgattctctagttatcatgtttagtcaaatcagatccgtgcattcaaaatcataaggcaagttttcctgtgtggctcagtaacatccttaaagaaatagttctgatgtccatccggtgttttttcagaaagagcgtcagggttgacagtagctgtgatgctccagatggagctgcggataacagcatataagtttcagggcagtggttgaggggctgtgggagggtggggagggaagatggatgacttttctcaaccatctgtatttgattggaatattgtgtgacttgtgaaatagaattaaagatatgatcttcttatggtcttctcacagttttcaagggattttaggagaaaacgcttagccatacagagctgtggacaagaaaatcacctatcagaacatatttatctagaaaaggaaaatttaaacagtcaaatagaagagttattagctttctttttccttctctctaagaaggttagttagaatcagctttcttactcactacatcctgtacttagaaaggaataacctgcacatgacacgttcaaaaaatcacctttgcattctgaacctagctgggaaattatgacaacaatgaagagatatgtgggcgtcctcacattttgtgtcttaaaatgtccagctctcaaggtgaaatattttcccccatgaaatccccattgaaaacagaaaccagaactatgatctaaaagaaaaatatctatttgaatatttctacttgtgaactgacatttttagctattttagtacctttttttggtgactgaagcatagcaaatagagttttgtttccttcccacagatatcagatttcttcaaacagtacatagaatggtgcacattacaaggcatttaccacacaaaaaaacaaaggcactggaggaaataagggttgggggagagggaggaaatggtaggtaccatctcacatggggatatagttctcacagatcaccaggtagggtcatgtgatctgcgtgagtttcctaagggagagaggggctctccttttgttcgtgttggctgcatcactgcatttcattaattctgaatggcaagtgagcaagaccctcgctgctgaaatctgatcagatgttattgatgaatcatggaattccagagttaggagctggaaagaaggtcaagaggacatctgagtcagtgtctgactagtagcaggtgatgggttatgatgtcagttttggaaccggacaactaaggcccaaaggtgttcaggcatcctcttctggtccaaaggtcagctccagggaccaggctgcaggtctctgacagcagaggataattctctttctgtatcacacatgccgcctcaactaaccagcatgaacataaaatctgcattgtagccaagtctatagctgtggaaaacacagagttccttcccacacccacttttgaagagtttactataaatgtgtggcagatcatcacccctggggcttagctttgggatttcctaaatctcagagcaacgtaagcacaacggccccactttgcatacctgaactcaaaactgaacaaaatcatactgggcgttttgttttcgtttgcagccagatatttttaaatagccttttcttatgcaatataaaaataatacatacccattaagaaaataaaagataaatataacaacgctttttcaaaaatatcattctgcatttacaaaattggcacagagcacagtcagcaaactttttctctaaagagctagatggcagatattttggactttgaggacctagggtatccattgcacatattcaattctgctgctgtaatgcaaaaacaaccataaacaatacataaagaatgagtgtggccatgttccaattatttacaaaaacaggtggcaggacagatttggcctgtgggccatagtttgccagcacctggcatatagaattgagaatttttttcctatgtttatcacatcagatatccaactgtgtatactgttcttttcacttcatattgtattataaatactttcttggattattgaataatctttatgtagtattttgcacaaaatggttgtttattatctcattttatgaatgaagcaatatttgcatgaccattgacatttagatgctttccagttttcttactattttgcgtattgtgataaacatcagtataccttagatttttgtcttcatttcgggtaatttccatagggtatattttgggatgttgaattaaaaaaaaaaaaatactcttaggaaaaaactgctaattctttatctcaaaaggcttcacccatttactcccagagctgtggatgaaattgctcatttctccctaaccagaccaacacagaatattagactttgtaaagcattgcttatttgataagaacaaggatgtctcaggcaagtgaggaattgagcaaatatgatgctcaggtcactaagcctcctcatcctttactcagtaggccagatgaccctcctcactcaactcccccaaaccccacccatggccccagacagagggcagagaatgaaacctattatctttctgaacgttccttccctcttcctgtccacctcacatctggatggaatacaaatcccctgacttcctgtttctctccctacaataggtcccaaatgtcaatttcaaattaaccctttttttgctttttgcttctcccacttcaaccccaaactctctttttttgagacagggtttcactctgttgtccaagctggagtgcagtggtgtcattacagctcactgcaaccttgatctctcaggctcaagcaatcctcttgcctcagcctcccaagtatccgggactaaaggcttgtaccaccaagtcctgctaattgtttatatttttgtagagatggggtctcaccaagttacccaggcttgtctggaactcctgggctcaagcaatcctccctcttcagcctcccaaagtgctgagattacaggtgtgagccaccacacccagcacaaactctttattgttgtattttctcaaaatgagtttcatagagctttgcctatttaagagtctccatttggccattctttgttaatttctttcactaaggcaggcagttcacaggagtatgtgaaaagaccctatgagcaatagggaatagtgaggtgtgtggtacagagagtcaaatgcaaacactttcaacaatgttccaggaaaaaaagataagtctattgattagattaggcctataaggtctttcatttgtgatcctggttctagataattcacttctaccttttatcgttcactagccaggcacacaaaccttcacaacctgccctgcccaaagttacactgcttccttcctccacaccccacagcccaccccccgactgcatgggtaacccataaccagctaaactgaactattccaacacacagttcaccctgtctagtcttttgttcatgatgatcccttcttcctcaaatactcattccttttctatagtttttatcagtaaaggctcaaaatcactactctgatactacctgtctttcaaatgtccacccactggggcatatcagtcttctaacaaatatttattgggcaactagtatatgccactacctgtgctaggcactgggaatataactggagcaagacagaccctgccattctcatgcaacttacaatgtagcttctgcatattgatctttctattacttggaagccaggggctccccactcccagactgggagccccctgaggacaagggtgatgtttcatttatcactaagctctatgccaggcacagagtaggtgctaagaggatgtttatggaatgactaaatgctgtgttgctaacaggaagcagggacatccttgaggacaagatagtgtctgattcacttctgtatcccccacaagccgctagcacagaacctggcaccataaatcctaagtcaataagcatgggaggaaatgagtgactggctttagtttacctctttactcctttccctataatatcgccaaagaaaaaaaatcctgcaaaaaagcaaccagcagatggtgggaaaactggtttctaaacctgaatatcactatatatgagaaatactcttttatttttgggaaaatatgagttttgcatcttattaagattgatgtgttttagttataattaataatcatcgtcactgctgatggctggttcacatattcaccacttgttggctgagggagcttgggtgagggagtgatctcctctgagcctcagttttcttttgtataagatggagatatgaaagcatatctatctagagtgttgaaggacaagttaatcaatgagataagtatgttttagtgcccagtactaacacgtacccctgctatgttttactaggggtacgttttactcctagtacagagtaggtatttaagaagttgtagatttttttccttctcattattattccaataatctagtgtgacagcaaaaattaagctttcattttaataaaagtgtctcctattttttctccaatcaaaaccacagattcttattttaggggaatcatgtctattggttgaccccagagaattctgaattatctcagtgtgcagtgtgatgtcatattaaggaactatagggcagtggttgagagggttaaggttaacaagtcagtgttgagtgtgcctggattgaattcattcatttattcaacacatatttatggaggaccgatcatgtgctagacaatatattaggtgtgggatacagtgaaatcaaatccttgccctcatgaagttgacattctactgacagaagacattcaagcaatacatgtatacaatttatactgaatttgtattatatgaactgagaatgagggtgatggaggaaaattgaaaagggaaagaggcaagggtacgctgtgggggagattgaatctctgtttttaaactcataagatgcatggccataggcaggatgacctccacaatttgtaaaacgcagtgcaaaatgaaaatgtagcacccaccgttcaaaattttgagtccatgactgcagaaaattgaaccaagcacaggtccttttaagtacacgcaggacctgtgcaaacccacagagcagacacccgtgaagctgatcctgaacttgagcaagttgtttgatttttctcagcctcagtttttaattgggaaaggacttggaaatattgaaacatgtgataagagaaagtgaatctaaagctttttcctctaggtacagtgttagacagtacaaagggcatttttacctccaacacatctttcatgaagagttttttatctaggtttcatggagccctacggtaaataaatttgcccaagttctaacaagattctggaatctcatatgtgggtatgttcatgttggggtgtgtgtgtgtgtgtgtatgtggggtgtatgggtgtctgtgtttttcctctgaaaagcaccatagtctctgccacatttttaaaaaggtgcataaccctttaaacaggaaccatttactttaaatggaatcagaaatctcactataaaaaagcaataatattaatttctactgtgtgtgtctcttgccttttattccatgttcacaattcatcttattttcatttaagacaaccaactgggctagttagagccgagatttgagcccagtttttctcactgactctaaaacctatccatgctcctaaacctcctcaccattggagggcattgctgtttaccctttcagtttcagctgtactatcaaaagcagcaaatcaagggcagggaccacagcttgaccttaaactattcaactgcacttaattacccattgtagtggaagcacataaatacaggatgtcccctcactctgccattctgctttgcatcattatcaaaaagacaaaggtaattcatgtctaattactcactcaccgcaaggtcagaatatttatttttatcatacttgtgatttttaggattagtgatatcagtatttattcatggctaacctaaatcaaacatcctgttgatatctgtaaagagccatatagttattgtcgcaggtatgctgagtcacaaagcaaatacaaagtttatgagttgacagggaaaaggctgcagagaggtagagataagtgtgcctgggtaatcacaagtgtcttgtgaaatatacacattgtttatttatattgtccatttatcaagctcaatgggggcttgggaaactgaaaataatcaaaataggaaaaattattggtattattttctaaatttgctgctggtgctgactttttggttcaatttattaaatacttactttagaaattattctctgtttttagtggaatagagctttgaccagcttgagaaagacaaaaggagaagtagaagagaaggggaaataaatgaggctcatgtgactgggattaatttactcagagatctggagtagcaataacttgtgtctttccaaaacccccgcagtcaattaatgagatcaatttaaagtggcagtattgaaagggaaaacccaaacacttagatatagcagtatgcaactgacctattcctttttccattcagattcagtcagtcaaatatatcttattgactttgactactgtcatcataactgtgttagctaattgtctgaagttttcattcattctctgtctttgcagatgtcactgctattcaatctgtatttccttgctctgtctcgctgtctatctgcactaacaggatatacacgtgtgtgtacacatttttttttcttagtctatcccattgtttctcttgatgtccttggacagatcagcagtctgaaaatcaggcttctaatagagagtcttactagaagtaactagctgtgaaacttgggcaagtatttgacctctcccttcccccatctatgaaaggaagatgtgaaaacaaatggttctgtgggtcctctcccacttattcactcgatatttctataattttctatctagtttccatggagcacaaggtcattagtaatgtgccccatgactctcagattaatcagacaagccaacactgggggagatgtgaacaaagtcttagagtctagttgatagtaagaatatgaaatgaatatgactcactgatgtgatatagtcttcaaaaaactaaatttggtgtttgaatgcgtagaaatatattaggttttacaacataaaatttccattttggtagatggaaaatgttgaataaaggcaatttcataaggttcatagtctgtagagtgaaatggaagtggaaaaacctcactttgctctgttctgctctacttagctcatacttgaagtaatcattcagttcttgatgccatacagacaaagaaggtagtggacaaaaagagacacacatattcagtagatagcaaccaagctgggaggggaactttaaggcatgtctggttaatggggaaaaaaatagaggctctttaacttggaggtgttagcagtcttttagtctttaaaagacaggtgcaaaagactaaatttttctgtgtgtatatatatatatatgtacatatatttaatgcaatatatgactgagtagttcatataagtgacagtagtaatagtgactaagaagttcagaaaagattcagatccgtgtaaggaggaactttttgaatggagctgtccaaaatttaaatgtgccatgtcagctggttgcagtgtgccattgccagggttgtttaagttcaactcaagcagtgcgaggtggtaggtctaggacactggctatctacctggggtgagtttgtctcccagggggcatttgataatgcttgaaaatatgtttgactgtcacaattttgggggttggtgggagggtgctattggcatctaatgaatagaagtctgagatgtttctaaacgtccaacaatgcacagaacagtgccctcgctataaagaattacccaagccaaaatgtgccaaggttgagaaatcctagtctaaacagtttgatacagatgtttaattcctaacatccctgtagctggggagaaaaaagtgaaattgatctatcggaccaacggttatgtaggcaattgtttataatgacattttaaaaagaatgttaatgacatgcagacatgcaaattttaaaacatataacattaaacataaaacattaaaaaaactctattttataaatatatcaaaatattgagtggttaattttgatcagtgaggttattcatgctttggtttttcttttttctctgttttccaagtagctataatataccagtcctgcttttaaattcagaagaagaaaaaaagaatctaagttgaatttttaaaacctgatatgtccctgaggactgaatggcacatggtaataagaataaccctaatagtaacttcaatttagctagcagcatacgaggagacaggcccactcattcactcccagtcagaatgtaaattgttataacccctttggaagacaatttggcaatatgactgcagaacctcaaaaatattcatatgctatgacccagtcattccaattttgggaagctagcctaaggaaataatcgaaaataggcacaaagatgttcatttaagcatgatttataataatgaaaaattggatttataatggctacaaattgaaaacagtcttaattactagaaataggtgaatgtttaactaaattataataaatccatatgatgtaacacatagccattgaaaacaatatttacagttactgatgatgggggaagaaatttaagatgcacaaataactgtaaagagtaagggtccaaaataaataaaaaggataacccccaaaatgtaagtatacaaagaaaccatgatgtttgaaagtatatgtgttaaagtgttaacagaaagtaaagatctttaggacatgagatatgagtgttttaaaaaaatttttttctttacaattagaaaaggtcataaaaatatacacaatgaaaaacataaattttataaccagacaaaaactttaataatatttgtcaaatgccaaatcggagtccaaagccattgtccattttaagaaaatcatctgacttaacatcactactgcttttcaagagagcatcatgcccatttcacagaagagaaaatttggcctcatactcctcagtctccatgttttagcttagatattgtttcctccaggcggccctccttgaccttccaattctggttaaattgctctttttctgagttctcattactttactgattttatatatgtgtgtgtgtatatatatatatacacacacacacacacacacatatatatacacacacatatatatatatgttgtgcctagcaagtgtatgacacaaaatacccataaattgaatgaatgaatgaattaataaagaaatgaataacttacccaacctggtaagtggcagggctggccaggtcagtgcaacttcaaagtcgatgttgtcagtgaatgctccagatggattgcagagaagaccaaagttcatgtctcggcacctttcccaatgtacagggcttattgttgggacagagtagtgcctggcctagaagttaaacattcatccagctagctattaaggcttgaatgccttcaaagaacagcatggatttttctgtgaatcgtgagcgttttcgcaatgcttaacacggcagctggtaatgatgattgctcctgtttccctttgaatttcgtgttcgtttacttaacagggcattgctaatctagaagaagggagtgggtgaagaatcccatttgtaaagaggatagcaggttaatgaaaagaagcagaggtatgcgtaggtgatagtgtttctacaaggctcggttcaattggtatgatttaaaggcaagccttggctggctggtcataataagggccacataatggaggggatttacgtggcaattaccatggtccttgctagtgggatacaatgttttagggctccctggatacttaagattaatgtctgaatcagtagtgttattgttgcaagatcttagtgtgatgggagccatgtgaggcacgaatttttatcccttatcagaatgtaaaatatctcatagtctgcaagaacaccagtgactatggcctgaagttgccctaagacagtttaaacatcctgttgattgttttgttttttttttccttttccttggcaaccagaatgcatgaatgagtctagcgttacttttgttcatccaggtaatatgattgaaatgggaattatacatgttcaatcatttagagaagaaggactaaaaatcatagacctatagcaaattaaatgattatagagaatctaccatgtaaatgactgcaattaaggacttcttcatgtaccccgggccagattcacagcatctgggacaaactctccatggtttttccctcggtgtatttattaagaatgatgatcctgaacttcaaggagacttggggaatttttggattcctgccaggtatgtacctggccaagattaatttggtgaatcagaagttcccaggaaccatatcatgagtactaagagaacaaattgatttatctagtagtatgtttctccaacttagatatctgtgcaaaaaaagtgcagcggacatggtgcacattccaagaagttctcctccaaggaagtggtcaaaatatgtaatgcttatttattatccattttgagacccaaattatccagtcagtgggatcaataccttactcctcttccccagaagcctcacaaataaagtcttaacaccatctcaacaaaaataagatagggacctagacatggagaatatggctgtctcatggattctaagcaatcaggtagagtattgagaaatgttattgaaacaggaagttcctgctaaaggtgttggtgggattgggatgccagtgcagagtgacacagtatttggacaagaacacataacacgaaagtgtctgaatcctgttcttgtctataatggcatcttgccattaaatccttgagaacaaagaaaaataatatatattagctgaattgtttgctaaaacccaaatgtagacctcagtagaacagacaggactacatggaagattcctttttcctggacagggtattgccaactagcctcaaattaaagcagggcagagccataaaactattataatccaggggaacctggatttggggccttttcattttgaaagcaatatccaaatctacccagaaagtctaattaaatccttacggatctacttctaattggctgctatccaattagcattctgaaacctgaatgctcagatcagccctccttcccatcttggtggaggggcagggggagtacattagaggaacaaaagaacaaaaaagaggctttaagcttctgctagaagccagtatcacaaatctagaatgacaagccaaagccaagatatagttggccaggggcagccagtatccttcattttcttattcattcattaattcactcatttatcaggtggacatttgcagggcaccagtgatgctgtcaggcaccatgtttggtgatgagttaccagatggtcctagcagatgaaaagactgggaacccactgggaaggatacaaaaattattacacagctatcagagcaagagggaggttagtaaaagctggtggaccttaaagtttctctacttttgcaagtgtaaaaactggggtaaagatagagtttgggataacggacacagccatagccaaagaatgagtctagtgtctatagagaagttgtgatatttggaattttcc

SEQ ID NO: 51464 - DNA, 4588 bp, Homo sapiens
aaaaaaaaaaaaaaaaaaaaaaaaaagttagccgggtatggtggcacgtgcctgtaatcccagcttctggggaggctgaagcaggagaattgcttgaaaccgggaggtggaggttgcagtgagccgggatcacaccactgcactccagcctgggtgacagagtgagactccctctcaaaaaaaaaaaaaaaaaaaaaaaaaaaaaaaagaaaaaggaaaaagaaaaaaaagcaaccatgagacgagcaagaagctaagtttacaaataaatgtgatccacacttctcaacatcaggacaggtccttcatgcttagattccaggtctcttcttgcgaatgggaacagtcatcacttatccaatgatgcatttaagagcaccaagttttaaaaagagacaaatgtcgaaaagaaatgccatttatcatcaaacaccattattaaacactagcttgttggcatatctgtaagtctggttgtcattttgctaggtggagagggcagaattttggaaagtatctaggccacacccatgtttcagaatagtaagtacaaaagccacaatgtattgatcacttagactcatcatatgtttgtccttttattttaaataccccaaggatggaggtctttctagcctaattttccagctaagaaaatcaaggataaaaaattttcttgtgttgttactttatccttagtacccccctgggaagtaggtataattagcctcatcttagagatgagaaaactgaggctcagagaggactgtcctgtaaccagaaagaggatgtgttaggatctgaacccatctgacgaaaggctatgctcttaattagtaacatttccctgccttgcaaggacacatgtaggtcacaggatacccagggaaggtaaatgctctgtccttttctcaccagtactacaacttagtaacagcctctggcccaaaatgagactggacattgactttaatggatggaagtacacattcctaacatggattcattcagaagcacccagatttcacaagaggaaatgatgaggcatttttctgaggtgttgaaattgtgccctttgtcagtcacaaaccaaccaaaaaaaaaaaaaaaggctttgaaaattcctcaaaggtaaaaggtagcctttcttctctcatagttctgatatagtcccaaaaggaaacaaaagcttgcataattctagccccagtgattcttctttccttcttattaactacaaatcttcaccacattttttcttactaattagtcacatgcttaagctcctgagtcacggagttgtctactggttatagcttgttctagctcttccaccctcaaatggaacttgcaaggaattaggccctctgaagatcgcacattcaagtcatgaaaacaagccaacaatgaaatcaatcactgccgagaagggtggacaagcacaagcattaagacccactactgttgagtcagggccttcagatatgctgccaatgggaagaagagagaaaaattatgtttattcatttataaatatgtgcattcttgcctccaaaggtcccaatttcacactggtccagttgggttctctttcctttgctgcattcaggagcacagttgtatttcatctactgcttgagaatgcagtggagcttgtcgccagcagtgatggagccaaacataaagccaattacctttccctaggtggctaatggaggctccaagaagccagagtttgcccacagccatatggtccgagagaatagaccatgcatttctggaggctttacctgactttcgccaaaagcatgcacagaacgtggaacttggcctcctgaaaaggcgtgtcttcagcttaggttattcctttctcgatgctcaccatgatgtcaggctcctagtaggagagccattaataactgtcatgtaaaccacaggaaaaaaagctatgagtgggattctttagctatacttattgaaacaaaccctttagtatgaatgtatgaccttctactgattggccctaaacacttttccaaagcttccctccactttactcatcagcaatgcagctgccagaattctcaccattcccaagcagccatattatcccaggcttctctagtttacattctccacccttcctttgtcaccaagtatcatctaaaagtcatacctgattatgtcaccttcgtgcacatgcacatacaaggacacacacatacccctcattagtccggatctccctgtttgcatatagaatgaagtctaggcctgttaacatagcatgtaagaccctcctcagttggcctccaaaaccgcccatccagcctcatttctactctccctccttcatctttttccttactgatgttaccacaaaattctcttatactcctcctccatttccaaaggagaccaggcctggactcagtacctttgtgtactgctgctttgctacctgctgttatcctctcctttatctctatgaagcaaactctttctcatccttcaagagctagttcaaatatcctcctctgggaagccctttctgaagcccacagatggagttagttataccctttactgtgagcacaccaaagaaaaacagctttactcgtgtgcatatctcactgtgttgtaatagcttacctgcctatctcaccattagactgtgtacttctagaaggcagaaatctttttctaatgatttcttatttcccagaacctagaacaacacatattagaaagggttgcttagtggatatttttagaataaatgagtaccttcggtgacttggcatttgatgggcaatcttggccatcctaaagcattccatgccatcagatataccctgcattgccatgagctttatcattggcttttagaacatcatcctcccactttgaataaatggtctagcagacaatacagtcctaaggaacagaaaacctaagtgttagctccaggattcaccagcatcttatacttgctcaggacaatagaggatgcaattaggagctgaaatgattatctaatttcccatgcatggtagatcctaagtaatgtgctcagcaaatcatatttatcctttgaagttgagaactaactgtacagcagaaacaggaccaggtactctctagatcttgtttctgtttggagaatcctggtcaaagaatgccaaggctaaaaagactgccaatatcaatcactctattttagagatgacaacattgaggcttgaagaggaaaagaagcaggaacatgaataaaggcaaccaattaacaaatatgccacagataatggtagaaaaccctccacggcatagaagaaagagggtgtttgttgaaggttctggattttctctatttgcccaataaacaagtgcaactctgagccactccactgtgcagtagatcctagacccttctgtgaggcagagcagatctaaaaagctgccttgggccttggcacctctcactgtgcttatagaacattgacatttttgttaggggtgactaagagagaagatttgcattggttagaaattagtcagatggcatttccttaggctttgctttcatttctcagtgaaaggttgtgtaggaagcatttgattttcctgttatattactttattaataatctacagttattggctagtttccagaagcctaaagcaagagaacttgataatgaaggataccctaaaaaccagagacctttgggcagacactgacttggggcattaggagaactcattacaagtcctggatcttgattttcccctttgtaaaatgaaggactttaaccaggtactctctgggtcctgtttctgcttggagaatttttaagacctcagagtctatctgtgaactgttttttactgagcacagttctctcatgcatcctgtttgtgctcatttctcaggacacagtgataacaagatgggcttcattcctgccatcatggagttttagcctagtggagaaaacagataataccattggaaaacccacactgaagaaagattgttaccaatccttatgaatgcagtgaaaaaaacaatgaggctctgagggttacaactacacagtataatgaattacgcagagggggtgttcaacttagactgagggccggggtgtcttaggaggaggtttgtaatctgaaacttaaaggacaacaatatctagtcatggcctagatcatggctcatggcctgtaatcccagcactttgggaggccaaggtgagaagatcactttagcacagaaattctagacaaacctgggcaagatggtgacaccctgtctctaaaaaaaaataattaaaattagctgggcatggtggtgcatgcctgtggtcccaccaacgtgagaggctgaggaaggaggattggttgaacccaggaggtcaaggctgcagtgaactttgatcatgccattgcactccagcctgggagacagagcaagaccctgtcaaaaaaaaaaaaaaaagttaagacttaagcatttcatggagaaggaaaagagtgtgcaggagactgaggttgagaaaagtttgggctgtctgagaaaccaaaa

SEQ ID NO: 51465 - DNA, 695 bp, Homo sapiens
caatttcaagaaggcaggttgacctttgggagaatttctagcagcaatcacttcatgattgattggaaatatctgcaaatacacgtgtcctgagaggtgaatgagaaatgtgtgcagttactgttttcccaatgagtctatttgtccttgtggaacagtttaggggagagtagcattgaggaaacaaaaatggcccagggatcttggaagctctatgtgtgagtatattcctcagttttcagatttaggggattggggagggatgtggaaagcatagacagaaggcactgcagaagaggagagtaaatgactttaggtcattgaactggtttttgatagaaatcaagttaagaaaaatagaagtcaatagtactaagtttgaactttatctttctaaaaactgcttctgtgggcagagttcatatgctggaggaatgaatcataatgacaccctttggtatgaccctggggagaataaatgtgacttagttgaggtttctgaggatgacattcagaaagaaaacaagagagggaaataccctttctctctgtcacactctcaggttagaaactcactttaggggccacagcctatgacaaatacactcatgcaaattctgtgcttgcttccatgctccatttctttgccaactatgtagctaagcaaaatggaacaagaaatagtgtcttgggag

SEQ ID NO: 51466 - DNA, 6315 bp, Homo sapiens
taagacgtgggggctaaagcttgtttggccgttttagggtttgttggaatttttttttcgtctatgtacttgtgaattatttcacgtttgccattaccggttctccatagggtgatgttcattagcagtggtgataggttaattttcaccatctcttatgcggttgaatagtcacctctgaaccactttttcctccagtaactcctctttcttcggaccttctgcagccaacctgaaagaataacaaggaggtggctggaaacttgttttaaggaaccgcctgtccttcccccgctggaaaccttgcacctcggacgctcctgctcctgcccccacctgacccccgccctcgttgacatccaggcgcgatgatctctgctgccagtagagggcacacttactttactttcgcaaacctgaacgcgggtgctgcccagagagggggcggagggaaagacgctttgcagcaaaatccagcatagcgattggttgctccccgcgtttgcggcaaaggcctggaggcaggagtaatttgcaatccttaaagctgaattgtgcagtgcatcggatttggaagctactatattcacttaacacttgaacgctgagctgcaaactcaacgggtaataacccatcttgaacagcgtacatgctatacacgcacccctttcccccgaattgttttctcttttggaggtggtggagggagagaaaagtttacttaaaatgcctttgggtgagggaccaaggatgagaagaatgttttttgtttttcatgccgtggaataacacaaaataaaaaatcccgagggaatatacattatatattaaatatagatcatttcagggagcaaacaaatcatgtgtggggctgggcaactagctaagtcgaagcgtaaataaaatgtgaatacacgtttgcgggttacatacagtgcactttcactagtattcagaaaaaattgtgagtcagtgaactaggaaattaatgcctggaaggcagccaaattttaattagctcaagactcccccccccccaaaaaaaggcacggaagtaatactcctctcctcttctttgatcagaatcgatgcattttttgtgcatgaccgcatttccaataataaaaggggaaagaggacctggaaaggaattaaacgtccggtttgtccggggaggaaagagttaacggtttttttcacaagggtctctgctgactcccccggctcggtccacaagctctccacttgccccttttaggaagtccggtcccgcggttcgggtaccccctgcccctcccatattctcccgtctagcacctttgatttctcccaaacccggcagcccgagactgttgcaaaccggcgccacagggcgcaaaggggatttgtctcttctgaaacctggctgagaaattgggaactccgtgtgggaggcgtgggggtgggacggtggggtacagactggcagagagcaggcaacctccctctcgccctagcccagctctggaacaggcagacacatctcagggctaaacagacgcctcccgcacggggccccacggaagcctgagcaggcggggcaggaggggcggtatctgctgctttggcagcaaattgggggactcagtctgggtggaaggtatccaatccagatagctgtgcatacataatgcataatacatgactccccccaacaaatgcaatgggagtttattcataacgcgctctccaagtatacgtggcaatgcgttgctgggttattttaatcattctaggcatcgttttcctccttatgcctctatcattcctccctatctacactaacatcccacgctctgaacgcgcgcccattaatacccttctttcctccactctccctgggactcttgatcaaagcgcggccctttccccagccttagcgaggcgccctgcagcctggtacgcgcgtggcgtggcggtgggcgcgcagtgcgttctcggtgtggagggcagctgttccgcctgcgatgatttatactcacaggacaaggatgcggtttgtcaaacagtactgctacggaggagcagcagagaaagggagagggtttgagagggagcaaaagaaaatggtaggcgcgcgtagttaattcatgcggctctcttactctgtttacatcctagagctagagtgctcggctgcccggctgagtctcctccccaccttccccaccctccccaccctccccataagcgcccctcccgggttcccaaagcagagggcgtgggggaaaagaaaaaagatcctctctcgctaatctccgcccaccggccctttataatgcgagggtctggacggctgaggacccccgagctgtgctgctcgcggccgccaccgccgggccccggccgtccctggctcccctcctgcctcgagaagggcagggcttctcagaggcttggcgggaaaaagaacggagggagggatcgcgctgagtataaaagccggttttcggggctttatctaactcgctgtagtaattccagcgagaggcagagggagcgagcgggcggccggctagggtggaagagccgggcgagcagagctgcgctgcgggcgtcctgggaagggagatccggagcgaatagggggcttcgcctctggcccagccctcccgctgatcccccagccagcggtccgcaacccttgccgcatccacgaaactttgcccatagcagcgggcgggcactttgcactggaacttacaacacccgagcaaggacgcgactctcccgacgcggggaggctattctgcccatttggggacacttccccgccgctgccaggacccgcttctctgaaaggctctccttgcagctgcttagacgctggatttttttcgggtagtggaaaaccaggtaagcaccgaagtccacttgccttttaatttatttttttatcactttaatgctgagatgagtcgaatgcctaaatagggtgtcttttctcccattcctgcgctattgacacttttctcagagtagttatggtaactggggctggggtggggggtaatccagaactggatcggggtaaagtgacttgtcaagatgggagaggagaaggcagagggaaaacgggaatggtttttaagactaccctttcgagatttctgccttatgaatatattcacgctgactcccggccggtcggacattcctgctttattgtgttaattgctctctgggttttggggggctgggggttgctttgcggtgggcagaaagccccttgcatcctgagctccttggagtagggaccgcatatcgcctgtgtgagccagatcgctccgcagccgctgacttgtccccgtctccgggagggcatttaaatttcggctcaccgcatttctgacagccggagacggacactgcggcgcgtcccgcccgcctgtccccgcggcgattccaacccgccctgatccttttaagaagttggcatttggctttttaaaaagcaataatacaatttaaaacctgggtctctagaggtgttaggacgtggtgttgggtaggcgcaggcaggggaaaagggaggcgaggatgtgtccgattctcctggaatcgttgacttggaaaaaccagggcgaatctccgcacccagccctgactcccctgccgcggccgccctcgggtgtcctcgcgcccgagatgcggaggaactgcgaggagcggggctctgggcggttccagaacagctgctacccttggtggggtggctccgggggaggtatcgcagcggggtctctggcgcagttgcatctccgtattgagtgcgaagggaggtgcccctattattatttgacaccccccttgtatttatggaggggtgttaaagcccgcggctgagctcgccactccagccggcgagagaaagaagaaaagctggcaaaaggagtgttggacgggggcggtactgggggtggggacgggggcggtggagagggaaggttgggaggggctgcggtgccggcgggggtaggagagcggctagggcgcgagtgggaacagccgcagcggaggggccccggcgcggagcggggttcacgcagccgctagcgcccaggcgcctctcgccttctccttcaggtggcgcaaaactttgtgccttggattttggcaaattgttttcctcaccgccacctcccgcggcttcttaagggcgccagggccgatttcgattcctctgccgctgcggggccgactcccgggctttgcgctccgggctcccgggggagcgggggctcggcgggcaccaagccgctggttcactaagtgcgtctccgagatagcaggggactgtccaaagggggtgaaagggtgctccctttattcccccaccaagaccacccagccgctttaggggatagctctgcaaggggagaggttcgggactgtggcgcgcactgcgcgctgcgccaggtttccgcaccaagacccctttaactcaagactgcctcccgctttgtgtgccccgctccagcagcctcccgcgacgatgcccctcaacgttagcttcaccaacaggaactatgacctcgactacgactcggtgcagccgtatttctactgcgacgaggaggagaacttctaccagcagcagcagcagagcgagctgcagcccccggcgcccagcgaggatatctggaagaaattcgagctgctgcccaccccgcccctgtcccctagccgccgctccgggctctgctcgccctcctacgttgcggtcacacccttctcccttcggggagacaacgacggcggtggcgggagcttctccacggccgaccagctggagatggtgaccgagctgctgggaggagacatggtgaaccagagtttcatctgcgacccggacgacgagaccttcatcaaaaacatcatcatccaggactgtatgtggagcggcttctcggccgccgccaagctcgtctcagagaagctggcctcctaccaggctgcgcgcaaagacagcggcagcccgaaccccgcccgcggccacagcgtctgctccacctccagcttgtacctgcaggatctgagcgccgccgcctcagagtgcatcgacccctcggtggtcttcccctaccctctcaacgacagcagctcgcccaagtcctgcgcctcgcaagactccagcgccttctctccgtcctcggattctctgctctcctcgacggagtcctccccgcagggcagccccgagcccctggtgctccatgaggagacaccgcccaccaccagcagcgactctggtaagcgaagcccgcccaggcctgtcaaaagtgggcggctggatacctttcccattttcattggcagcttatttaacgggccactcttattaggaaggagagatagcagatctggagagatttgggagctcatcacctctgaaaccttgggctttagcgtttcctcccatcccttccccttagactgcccatgtttgcagcccccctccccgtttgtctcccacccctcaggaatttcatttaggtttttaaaccttctggcttatcttacaactcaatccacttcttcttacctcccgttaacattttaattgccctggggcggggtggcagggagtgtatgaatgaggataagagaggattgatctctgagagtgaatgaattgcttccctcttaacttccgagaagtggtgggatttaatgaactatctacaaaaatgaggggctgtgtttagaggctaggcagggcctgcctgagtgcgggagccagtgaactgcctcaagagtgggtgggctgaggagctgggatcttctcagcctattttgaacactgaaaagcaaatccttgccaaagttggacttttttttttcttttattccttcccccgccctcttggacttttggcaaaactgcaatttttttttttttatttttcatttccagtaaaatagggagttgctaaagtcataccaagcaatttgcagctatcatttgcaacacctgaagtgttcttggtaaagtccctcaaaaataggaggtgcttgggaatgtgctttgctttgggtgtgtccaaagcctcattaagtcttaggtaagaattggcatcaatgtcctatcctgggaagttgcacttttcttgtccatgccataacccagctgtctttccctttatgagactcttaccttcatggtgagaggagtaagggtggctggctagattggttctttttttttttttttccttttttaagacggagtctcactctgtcactaggctggagtgcagtggcgcaatcaacct

SEQ ID NO: 51467 - DNA, 4568 bp, Homo sapiens
tatttgtacagcattaatctggtaattgattattttaatgtaaccttgctaaaggagtgatttctatttcctttcttaaagaggaggaacaagaagatgaggaagaaatcgatgttgtttctgtggaaaagaggcaggctcctggcaaaaggtcagagtctggatcaccttctgctggaggccacagcaaacctcctcacagcccactggtcctcaagaggtgccacgtctccacacatcagcacaactacgcagcgcctccctccactcggaaggactatcctgctgccaagagggtcaagttggacagtgtcagagtcctgagacagatcagcaacaaccgaaaatgcaccagccccaggtcctcggacaccgaggagaatgtcaagaggcgaacacacaacgtcttggagcgccagaggaggaacgagctaaaacggagcttttttgccctgcgtgaccagatcccggagttggaaaacaatgaaaaggcccccaaggtagttatccttaaaaaagccacagcatacatcctgtccgtccaagcagaggagcaaaagctcatttctgaagaggacttgttgcggaaacgacgagaacagttgaaacacaaacttgaacagctacggaactcttgtgcgtaaggaaaagtaaggaaaacgattccttctaacagaaatgtcctgagcaatcacctatgaacttgtttcaaatgcatgatcaaatgcaacctcacaaccttggctgagtcttgagactgaaagatttagccataatgtaaactgcctcaaattggactttgggcataaaagaacttttttatgcttaccatcttttttttttctttaacagatttgtatttaagaattgtttttaaaaaattttaagatttacacaatgtttctctgtaaatattgccattaaatgtaaataactttaataaaacgtttatagcagttacacagaatttcaatcctagtatatagtacctagtattataggtactataaaccctaattttttttatttaagtacattttgctttttaaagttgatttttttctattgtttttagaaaaaataaaataactggcaaatatatcattgagccaaatcttaagttgtgaatgttttgtttcgtttcttccccctcccaaccaccaccatccctgtttgttttcatcaattgccccttcagagggtggtcttaagaaaggcaagagttttcctctgttgaaatgggtctgggggccttaaggtctttaagttcttggaggttctaagatgcttcctggagactatgataacagccagagttgacagttagaaggaatggcagaaggcaggtgagaaggtgagaggtaggcaaaggagatacaagaggtcaaaggtagcagttaagtacacaaagaggcataaggactggggagttgggaggaaggtgaggaagaaactcctgttactttagttaaccagtgccagtcccctgctcactccaaacccaggaattctgcccagttgatggggacacggtgggaaccagcttctgctgccttcacaaccaggcgccagtcctgtccatgggttatctcgcaaaccccagaggatctctgggaggaatgctactattaaccctatttcacaaacaaggaaatagaagagctcaaagaggttatgtaacttatctgtagccacgcagataatacaaagcagcaatctggacccattctgttcaaaacacttaacccttcgctatcatgccttggttcatctgggtctaatgtgctgagatcaagaaggtttaggacctaatggacagactcaagtcataacaatgctaagctctatttgtgtcccaagcactcctaagcattttatccctaactctacatcaaccccatgaaggagatactgttgatttccccatattagaagtagagagggaagctgaggcacacaaagactcatccacatgcccaagattcactgatagggaaaagtggaagcgagatttgaacccaggctgtttactcctaacctgtccaagccacctctcagacgacggtaggaatcagctggctgcttgtgagtacaggagttacagtccagtgggttatgttttttaagtctcaacatctaagcctggtcaggcatcagttcccctttttttgtgatttattttgtttttattttgttgttcattgtttaatttttccttttacaatgagaaggtcaccatcttgactcctaccttagccatttgttgaatcagactcatgacggctcctgggaagaagccagttcagatcataaaataaaacatatttattctttgtcatgggagtcattattttagaaactacaaactctccttgcttccatccttttttacatactcatgacacatgctcatcctgagtccttgaaaaggtatttttgaacatgtgtattaattataagcctctgaaaacctatggcccaaaccagaaatgatgttgattatataggtaaatgaaggatgctattgctgttctaattacctcattgtctcagtctcaaagtaggtcttcagctccctgtactttgggattttaatctaccaccacccataaatcaataaataattactttctttgactctgactcctagaataatctattcaaaaccttaatgtctttttcttgatccttcttttgagtcctaagtaccgccattacagcttcaaattggcacgtcatataggcgaatttcaaagggagatgcaatccacagaagtatagtagttcaaagggttacaaaagcaaggcgctcttaaacagctcagtctttgcccctttgtggcctagggctggagtgcagctctggggtgactcacttgggaatcgggaaggtgttagtctgaatcactaagtccaggcaagccctcagaataggagagagtgttcctagcaaggaaaacaactctccattccaaataatcaggaaagaactttagggatgtggagcttggctatgggaatagaaaggaaccattccaagtgcctattaggccgctcttacctttactgagccagagaatggctctgaaaacaggacagatgccaacttccttcccgaaagtcaggctgatcttgaccacaatacaaattggcccttagagcctatacagggagtcccaggggtctctgccattgtgcaacctattttgtagataataatcaagaatcggacgtgaaggggaggagtttgcaacttggtcaggaatgtataagaaggaataagctaattctgactatgccctttatccatgacactatccaggaattaatgactctcccagaggattcctggaatgattttgttgagggatggaatgtataaagaggaaggaagtgttattttatgctgccatttggaagcaacaaaggagatcaacagtatgaaaacaatcaatcaaatttgaaaatgaacaaagttttcacaatcccagcctaatacttagagagctcacagcttggatgcataagtaaagagttctctgctggtctttaagacaaactctcacacaaaacttgggaaaaaggacaaaaatgttgcattagggggttttctgtggtttgtttgcaataactataattggctcaatcaataattattttttagtatacacactaagggcccctgtagcattttttcccatcgataaataatccttagtctagaaaatgccgagggatgttctccacccttgtctataaatgcacttctagatgactttataaaaggctcctccttcaagtttatagaatattataagactacattaaaggagaagagaggccggtcgaggtagctcacacctgtaatcccagcactttgggaggccgaagtgggcggatcatgaggtcaggagatggagaccatcctggctaaaacagtgaaaccccgtctctactaaaaatacaaaaaattagccgggcgtggtggcacagcctgcagtcccagctactcaggaggctgaggcaggagaatcgcttgaacctgggaggcagaggttacagtgagctgagattgtgccactgcattccagcctggatgacacagcgagactccgtctcaaaaataaataaataataaataaataaataaataaaggagaaaaagtaaaaacaaagccagtaggatgggagcaaggacttatttttaaaaataaaactaaaaagactctgctacctacctccaaagccttagcaaaaagtcttttttctagctccttcaggagagaacttacaccaactctccatttagaggaaaacacccagaaatgctggctttgccaaactggttggagacgactgtaaatgactgtaagttgatttcatttttaattttattttattcactattagcttatactaagctttttcggaagacagagttgagggaaacaagtgttcatgggacgtagatcttctgaggttgaaaggaatgctctttgttttcaaagaatgcctgggacctcagccacagtccccaacactttctttccattgtcatccccgtcagc

SEQ ID NO: 51468 - DNA, 2929 bp, Homo sapiens
aaataaataaataaataaataaataaataaataaaataaactttgaactgaacaggggcagctcttacatctgtccagtctcgggtttatgcagatagaacaagataaccacatcccacatgggaggccagtgtccacttgctcctttggaggaactactgggcatttaagggactcgttgaacacactctgtaggtcaactctgcccggagtggagggagctgcgcagaccgctggccctctgcacgggtttgcaactcggcttctggaaacagcgggagacgtcgaaggaggcgagaaggtgcgcgcgcccttctcaccaggccggcggatgctgggtggtacccaaagaggcgctcagatcactggagctggagctcagtcggcggtcttctgcgggaactgcacctatcccggagcatctctggccctcctatttcactgaactcgccttcctcagcaggaaagtgggaagaccgcttgcttccaggacggtgtggggaagggtaagagggctcagggaaagaccgtggaaagctcggcgcacaagcgagctggcatcaccggggattccctccggcccggtgggactccggcgcgcttgtagcgaggacccccagcccagggcagagcctaccctccgctcccccagtctgggcccttggcggccgcagtcgcccaagcccgccccgcctccgcgcgcggccctctccggctcagtgccctgcgctgccgggaagcaggctgaggggcgcaccgggcggcgggcggggacctggggaaggccgggagcgccgggaccgaggacgcacgcggcgggccgggccgcgcgcgcctcccccctcccccgaggcccgagcgcgagccgccgtgacgtcacgggcaacccgccagccccgcgctcctccgggcagagcgcgtgtggcggccgagcacatgggcccgcgggccgggcgggctcggggcggccgggacgaggaggggcgacgacgagctgcgagcaaagatgtgccccgggacccccggcaccttccagtggatttccttgcggaaaggatgttggcggtccctgtgacctgtggagacacggccagatctgccctccagtaagttccaattttgtcccctgcgtttctggaaactctcgagacttggccctgagtagggatgcgctgtgagtagtcggacggaggaaaggggctttcggaatccaatatgtgtgtgctaggcgtgcactgtcctcatcaccagcctcaagactggtggcgagtttgggcgtttggggagggtgaggggagggggatgacaccgaatggccggtgcatagaggcaattctggatttatgaacttgatcaaaggcatattaactaatttctaaaaatagacccctctgcagtcagaacagatttggagccatgatgtggtttggaggcccctctggcgaaactagaggtctgtgaatgtgtgatcctccctccatcctttgaccatcactccccgcttcctctcacaccccctcagggctgggcgaaggtgatttccaaaaactcagtaactccgtgttttgagactttctcagtttttgcatcgcatgtgagggtttgttgggtgctcctaaaccctcatcatggtcattcttcttggctgggctgttgatttaattaggtttgccttctcttgctaacgtgctcttatttatgccagtgtttgtggttctgggtgtagactttcaggaagcacagccatgaagctgcatgcgtctgtgtgtggatgcctcatgccttttcctggtggtttgcaggcatggaagattcttctgttcatctaagctcctgactttaggcccttctagaacattagagaggagaagaaatcacgtgcaaggatttagggacaagaggatgaggttttggtgtttcctttctggtattaggttttccagagagaggctgttagcctgtctctcgcccactccaccactgtgaatcctggctactggggctagttccttgctaggaaaaaaaaactctagagaaatgtgtttgtgtgtggtgggtgggcgggggccctgaggatgcagggactgtgtctgctgtgttgtctgttataagatgtttcagacctattttgcatactggcagcgacaagttgagacttgttcaacttgacacagtcctgtggtcatagcgaatctttctaaagctctgatcagtcaagaagggggttgtatcaatcctcagaaccctgagtggaactttctacaggatttattaggagaaaaaccttcccggaagctgcagaaggacaaatacagaatccgtgtctgggagaaacctcgtggcctggtctccattatttgagatgagttacatcttggaggtgaggacgtgcctcgtggtctaaagcttcggcacaagggcccaactggaattccacttacgggtatgactgtggggtatatgctgtacccattgaattcccagagggatttgttaagtggttgtgttgctgttttgcctggttaagagtggcttattcttgttgcctcatctatcttgagtgcagaatttttgcataaacggcttctcttgaaaaatagaagtccgtttttgttttgttttgttttttttctgattaactttccttttcctctgtcttaaacaccttcccccgcccctcgccacctccatgctgtgtttctgtggctggagcttttctgcactggaaaggaggagttctcccctctgttctgacatatctgatccccactagtttatatgattgctggtctgaaaacctggtgaattctcactgcccacatcaaatcaattccctgttctttagttgttttttttttccgcctcctgagcggtaggcaggcactctggctggattctggagcctgtgtttgccatgcctgggccttct

SEQ ID NO: 51469 - DNA, 594 bp, Homo sapiens
attggataaggtaaatagaattcaggtattgggtaaaaggttatccaactctgagattatctgatattcatggagttatttaatgaacagtagtatctcttaccattctggaacaaaacaagaaacctttgagaggaatctccccccacctccccagatatataggaggggacagtgggcaacactattatggctcctttcttgttgtcttggccacttggggctctggtctcagcctttctggattgccataatctgttgggccctatggagccaaagggagtaaacagaatagtactgttctgggttgttgagggattcggtgagattccctaggtaggttttggtcaacaagcaggcatttcataatcctctctacctcctgccctgccctggggattgtgaggattgtctgcattcctctgtggaactggaatgtggctgcagtgatggtgtctgcagagatgttgaagctgctcctctctcctgccctctatcttggcctcgcccggtcctagccggggtaagtgaacatcaatcccatggacagagtcttctctgaaaactgctttatggatttttttttttttccca

SEQ ID NO: 51470 - DNA, 4981 bp, Homo sapiens
catggcaaaaccccgcctctactaaaaatacaaaaagtaggtgggcgcctgtaattccagctactggggaggctgaggcaggagaatcacttgaacccaggagctggagattgcaatgagccaagatcgtgccatagcactccactttgggtgatagagggagactctgtctcaaaaaaaaaaattaaaaaaaaataaaaaaagataaaatgtagttatgaaaagatttctaagcatttttaagcattttatattaaaacaggaattcagaacaaatcaaaacgaaacaataaaactggggatgaaggaaactcaattttaaatataaactttggcaggtgggtggtgaatccgggtgttgtgagtcatttgctggcttgtttgtcacatggcctgctctataagtgtcaccctaattgatgtattcgtttggagtgggtgctcttctgaggtttttgtttccccctttctttggggtgcactgtgtgtgcatggtaagaacaagggccatggaattagagaatcttgagtttctaatgcaaattcagttccaagcagtgtgacctggttgtttaactcctttgagccacccccgcccatggccctcatctgtaccctgaggataatagtgtgggctttgcaggcttttggtgagcaagtgagatgatgtagcaaaacacccagcccagagcctagcaccaattggtctgtaatccatgctgcacggacacagccattctctggatgtggcctcttctgcctccactgtgaggtcagagactgagtcactgcaggagtaacctctccttggcaagcagcgggagtcatttcatcccagcctttcaggagggtgaatctgcacctggggtccagagtctcagagatgagacgtgagccaggcgctgattcatcatgatgcaggctgtggagactctagccatggtttctccatgcaggagtgaggttgggataaggggtctttctgggggctctgtgctctgtggcccctgctgctccggactggttcattggagaaacctgtcacattctctagaccggttgccacgccatgctcacagtctctgttcttgccttcctaggtgggaagtgagtgatgaccctgaagtgaggactcatctctagatctccaagggctgcagctcagccagcactttacaagggtgatctggagccaaactggcctgttggctgaccataggtgactctgggtagcccatacccaggctcagcagcagttggggagctgcctcgatttctggttacagaattcctggaactgagtcactgcagtaattgctgtgatgaattgtgtttactttgtgtgggattccaaactgtagcagcagtgactacagctggaagacagcatgatcagcagcttccaaggcagagcctggcgtcagaaagctgcattgcgctaatgctgaagcctgtgggagcctgttggagagacacttggatgtttagcgagctggtgactctccttgtcatgagtaagcttaggaccttgggcaagtcatccaaactcttctgggcaagtcattctcctgcttggatgccttgaggcagagaggcagtgaggtgaagtggtcagtgcgtcgactctgcctctagcctgctggggtttgaatccacctgtgtgatgttgtatgatattgacctttctggctctcagcatcctcttgtgtgaaataggagattttaacagtatctatttcgtagggttggtgtttgaatgagttaacatatgtaaagtgaatggtacagtgcctggcttcctggcaagattgctatcaggattaaggcaggttaagcccttggcacacactaagagctcaataaatgtgagctgatgttattggtcctttattactattcaagaagcctgcccagccctcctccctctccatccacacagcagcctggtacccgctgttctctaggttctggacacacgttatgacatgttctgatgatctggcttagacagtggggccctcgaggtaggcccagaggacttggtcctcactgcctctgtggcgccttgcactgggtccagctgacgtggagagagactcaggaaacagtggctgagtgtgactttggctggcatagtggttgctgagagaacagacaaggttctctctcacgacatacagatttcagatcagggaaagtcccagctggcataagtttatcgagcatctcccatggacaagatcagctgtgggtggagccttgaagtacatggtagaaggacagcgagtcttcccaggccagggcttcaagtgaggagacaagatatagcctcccagagaattcctataatgcaatcgtgaaagaaccatacccagcaggaggccggggaaagtgactcctgcaactctaggaaggcttcctggaagaggtggaacgtgagcagcataggattttgagagaagaaatggaatgggctgagggagattctgctggtggaggttcaggttgacctaagggctggcagcagtggaggccccccacgagtgagtttgaggggcctctttagctcagtccagttgaggcagcagagcctttccataggggtgtggtgtgacctgaatgttgggcacgtggtcgtaactgagctttaaaagtgaatgagaggagccatgcgtgatggctcgagcctgtaatcccagcactttgggagatcaaagctgggggatcacctgaggtcaggagttcgagaccaacctgggcaacatggtgaaaccctgtctgtactaaaaatacaaaaatcagttgggtgtggtggtgggtgcctgtaatcccagctactcaggaggctgaggcaggagaatcgctccaacctgggaggcagagactgtaatgagccaagattgtgctgctctactctagcctgtctcaaaacaaaaaacaagaaacaaaaacaaaacaaaacaaaaaaacactgtctcaaaaaaaaaaagtgaataaagagagaagaaaggcggggcacgatgctttttaagtctacgagcatcttatagcattgtttacatcccagcttttcactgacccttcctttacccccgcccccatcccgtggcccttgctctgtcctgccctttctgtacggcgttttctcttcccggctcctctgcccccagccccacgtgccaacttgtttcagcctggcaaggaggcctgctggtatcccagccatttcctgccccaaggccgcccaccctcctccgatctagcatggccttgccctccgtaggcaggcctcacccctgcggcagccgggaagcagggctcctgttttgcctgtttaccctggcgcagggacaggtagatcatgtagcactgctgggatgccagctgcgtaagtctccggcagtgggcacaggcggagggcagggggcattcctctgggctgactcgagcccggcctgcctggcacaagaccccctgctcctggaggcagctcaggggcttgctcatggctgccctggctctgcgctgggccgctgagtcatcgctcagcagtgaggcctctgagtcacagtgcagccctggactggacagtgagtgccttgtgggaccctcctgggctttcctgtccctcagagcatttaaaggggtcccaaattgtcatgtgaccctctctgatgccagagagacactctaggtctttcgcgccctggtcattttacagaactgtggctggatgccaggcattcagagatacattcctcaatctcggtccgccttacaggatccagcatcgaagagttcagttcaagtcagcagccgagttacaggaaagcagccagggcaatgattcagcaagtccaggcaggagtgaaccaggcaagatttcgggaggagagggctgggtcgcgtgtcctggcagggccacaggaagagcatacacatctcctgcgtcttcgtattttgtgagtgtcttgaaatgaccttgagaatctacgcaataccatgaagaagcaggagcaggaataccatttatccattggcacagggtagcatgctcagtgtgcactgaggttgtgaattcttgtcctgacccaaagatgctgatgctgtccttatacccatttcacggttgaagaaactgaaggtgtagtaggagaagatactgactcagaggcacagagttagaaagcagcatgtctgggatttgaccccagacctgtctgactcagtttactattttaaactacccgattcaagttaagtttctctcctctctctctgtctctctttctcccacgtggctgctggaatcttccctaaggaccatagctgtctgcagtgcaggaagccaactattaaggggaaacaaaagtgttcttaggagtcctgctgtcactgtggattgagccggtgaagccctgagggatttcatcgctgaggtggatggagaagcagctgggggccttggctgtaaggacccctaagggttagtgtctggagcttgggggatgggaatgggtcccggtgtgcggaaattggatggctcgctgaccccaaggggaaacccttgttgacgctgtaaagtgtcttctggccttagagaaaccctctagggttcaggttccagcttcaccctcctttagtcaggtggctttgggggggacatttctgctggccctggcagacactggactagagcagtgtttctaaagtgtagccccttctctctcccgggaagggagacaagtgggtgaggggattggaatctgcattcataacacactccccaggagagactggagagcacctttcccggtgaactcccgtcatgtcaggcctcagcagactgagcgggaacccccaccagcgaggttgctcaggacagcgtttctcttgggcctgtgtttggaacaagtatcctttgaactaatcactaacctgtgaaaatggatagacctcgtgtgaaaatgaaaatgtctgg

SEQ ID NO: 51471 - DNA, 2992 bp, Homo sapiens
tcttactagtctgaagtagaatggttgtttgttcctccactgcttcatctggaaaacaggggcaggcatcccagggtgtttgagagatcatatcagatggagaggccagagtttttagccgatacatcatagacattccccaaaggacagttattgttatcattgggtggatggggaatattgagcctccagccctaggcattgtggatcaatttgttcttcagttatctttggaataatttaaatacactggattgggaagacaaagctatcaccctcctgatgggagagtgctgggtacctagcaggtgctcagtagttagtgaatgaatgagtaagaacagaacaggtcctaggccctgccctgaagaggctcacagtgcaggacaaggcctggagtcaggccagggttttgtggttgtctttaaaaagaaacaaaacaaagaactacttcctaccagctgaccctaaacccctcagctccctgcagggacctctcagccctgcaggggagcccaggctatgtgccaggcctggccttgctgtcagctttctaagccagtcacaaacattctcctctcaactttataatggatgccccccagcctcctctcccctctcagggtgctcctgaggctatgagcagctggcagttccctgtctgagaggtccttcgtaccgcaggagaggcagctctcacctgaaggcctccctggacaccggtctcaactttgtgtgttaccagttatggagaattatttttagtgagttacactctgttagggccaaacacaaggaggaaagagtgactgaatactgctctgagtcagtgactgtgacaagactgtttttttcttcttccctgttgcaggcctgatcttttggccagaaggagattaaaaagatgcccctcaagatggctgtgcctgtcagctgcatggagcttcgttcaagtattttctgagcctgatggatttacagtgatcttcagtggtctggggaataacgctggtggaaccatgcactggaatgacacacgcccggcacatttcaggatactaaaagtggttttaagggaggctgtggctgaatgcctcatggattcttacagcttggatgtccatgggggacgaaggactgcagctggctgagagggttgagatctctgtttacttagatctctgccaacttcctttgggtctccctatggaatgtaagaccccgactcttcctggtgaagcatctgatgcacgttccatccggcgctcagctgggcttgaggtgaggctgtcctggctggtcacggagggttcactgggatgtggctggtgttctcaacgaggtggcatttaatgagcaccctctgtgtggttggcgtgatgctgggtgcctgggggagacagatggaactaaagaggtccttcctggaagccgttactgttccctgccctgacgtgtgttattgtacctgtcaccattttctgatgttcccagtttacgtatctgtcaccatctacctccctataaagtgcctctgctgttggttctgtgtccttaagacattgtgtggcatttggcacagtctctcatgctgcagaaagggtaaattaagacaggattgttaatgaatgaagacatgggagattcaatggaaagatatgcatggggggataatttcttggctctgtgctcagagctaggaacaacataaggccatatggctggtgctgtgagggttgtatgtgggcagatgcatgtggaggcagacaggcctgggtatgactctttaacacatacacactgcatgcctccaggcagactgatggattcctttccctgcagtgaagggttaagtattatcacacgtcacaggactggaattgaagatcgccaagtagacattgaaatgctgaccacatgacagacactcagcatgtggtgggtgatgttggctgggggtagcttttggggatggtggacatttcttggccctgatctttctgagcagagccagggaggcagtgctggactctgacctgggcacagctggttggcgtggacagttgattaaaggtcacagtttccctgcagcccatgggaaggcagagtgacaagtcagtggcagatgaggaaatggagtctcatgccagctggagggagggagcagctgggttggccacaaaggcctgttgcagttctgcagctgacaagtggaaggactggcctctcaggtccaggcctggtggcctgggaggctgctagctctgagcgatgagtggtgccaaggtgcctgaaggagagttgcagctcaaacagcaagtggtccagctctcagaccacttgaggccacctggcatgtggcggccaagaccacagttggggcggggccttgagtctgattttgattggattcctagttcggctcatgcctgacagcactttctcagacaggcttccctgacctcctaaggtaaataatgtccctctgggtgttacatgctgttctcacccatagctcttagatgtgttctaattgtatattcatatgtgcaatttactgggtttcctgtctttctctcacactagaaagtaatctttctgagttgaggaaatgcatttgccttgcacacaggctagacacatacatagtaggcattttatttgttgcatcacagttgccttgatcaaatatggtgactctccgtggttttctcttggtttctttgaaaaggtcagacagaagggaaacactcttttcttgagtatatatatgacttagcccagcaatcccactaggagagcaatggtttatccattatacagttgagcgcctggaggctctgaggggccatgtaccttccccaaggttatttatccaggagaagacagagccagaagctgagaactgcctcgtgttttataccaaacaaggccccttcagctgaagacttttccttgcggtcttgggaagggtgtgtgtgacggtgagctg

SEQ ID NO: 51472 - DNA, 1855 bp, Homo sapiens
acaacattgcctggagctgagagatgcacattctcccttcttggccactggtgactgtgaccttgggcaaactacctctgctttttgggccttagtacattcattcatagagaagctggctaatttctcttctcagcctggagacttgagagtgaaaggggcactgtatcacttactctgggatgacaggtgtatacgaggatgtagctgggcaagccaggcctagtggctcgcacactcatcagttagatggtgggtgctggtgctgctggtgcatcatgcatacaaggctggctctcccagttttccctggacttttgcctgaacagtttgcatttctactcgtggtgcaggagcttgctgttctgatttcatgtcacaagcctgctttcagccacttagaagagccctgttatccctgactgccgctacagcagtcccaacctgtgttgttttcacttgatgggctcctggaattattgacagcacactctctagtcgtacgggctgccctgccacctacactgacatcctggccaggttcctggagatggcctggcatcttggacctgttccccacggggtgcctggagcctctgatggtctacccagggtggcaatgagggaaaggctgtgacttgatcatctccaggggttcttcggtgaacagcccaaggttgcttaacagctggtgtgtatgaatacctggaatgtgccagttcaccttctaatctggcaaggagaatgtgtctcctccttatgcatatgaacaaactgaggttcagtgagatccagaaagctgccacggttactgatggagagagcagagaagctggtgtttgcagtcccatctgtcagccttgacacccctactcctgtccagccagtgttttccaaagcgtgctgatgagcaatgcaagatgatttcatgttatagataagaataaaaaaattgttttgtgtttaactcaaattagaaaaaggcaacaattggtatgtgcgacctgtggttttgcagatgatactgcttaggatgttggtacttaagaaaaggtcaacttttcaaaaatactattagtgacatgtggacctagtcctcctgaagaggactacattggggcaccggtaattgtttctatttgcggtactctggctgtgtggctctggccacgccactggaggcagtgtctgagcctgtgacttgagtagtagctctgtgtcatgtctgctgattctccccaaatcctgaagattcatgatgaagtgactggccggcttggtctgaagctagattgaaaacaataaggatcccagaacgatagcactttacaatcctataatttggctcaaattgcctgcagttactatctcagccctgcctgttatgttcattgagcacccaaagtttttcagtcaattcctgagttaattattctctgggattgaattatgaaatagtaaatatttccactatgcaatcaattggtgacttattcatgtattcatttcattcatttagtctcaataaattgaagataagggctgagcacagtggctcacacatgtaatcccagcactttgggaggccgaggtgggcagatcacctgaggtcaggagttcaagaccagcctaaccaacatagcgaaaccccatcactactaaaaatagaaaaattagctgggtgtggtggcatgcgcctgtaatcccagctactcaggaggctgaggcaggagaatcatttgaatctgggaggcggaggttgcagtgagccgagattgcaccactgcactccagcctgcgtgacaaactgagactccatctcccaaataaataaataaataaataaaagataata

SEQ ID NO: 51473 - DNA, 1881 bp, Homo sapiens
aatatactctgtcctttgtacctgcgtgaagaaagaagagaaaagaaagaaaagaaagaaagaaagaaagaaacgaaggaaggaagaaagaaagagtgtaaagaaataaaaggctgtaaagaaataaaataatgtaaagaaagaaaataatgtaaagaaagaaaagaaaggaaagaaagattcattactatcctttggacctgagtggtgttttcagttaaaatgagtggagtagaacccagagatcaggcttttgaggacggtaaagcctcaagatacattctgtttctggctcagggaaccttcagggaaaaggctttggagaccaagctaggcagggaagcgcctttgcttatcatgctggagaccagactgaggcagtgaagtcaccataattgatgggccacactagactggagccaaccatggcccattgctgagactctgggcctcagggtggccttggctggaacctgtattccagtggccctggtggctctcttccctctcaccttcccaggaggcagattatttccctgtggtgggggtgaggcggtggcgtgggggcttcttccctctctctctgtcttgtagccttgttaaaatagtggccacacgctgatagctggatttccagtgcagttgctggggatgggggtctttccctctcatctgtctgtcaccctttatcactccacaaggggtgggggtactggacagaaagagtgtgtcccacctgattactgggaagtgcaatggacacccccaccccccgttgacttatctggctccaaccgaagaacagctgttggtggtcaggtctctgagtcactcagtagcttgggactgggttcagtgggagatgatggcataaacaaataaacactggctggcccccagctctcagctttctgctcactggggggccccagaagcttcctgttgcgtctgcagggaaaataaggatacccataatgaaaatagttttcctgatggagaaatgctctggggaggttgttgaggcatgttagaaaatccctgaggctttctggctctgtgagctaagggaggacacttggcctctctgggctttcgcttgctcctttgggaagcctgttattgtgaaagtgagatgatctgggaggtaaaactggccagttgtccatctcccctctctgaacatgatgcatagtaagccctgaatctcatttaaatttggaagtcagactgactttgtgactgtcctagtttccggctgttgagtcagctcaggcagttcttgggacttctgtgagtctctggctccccgtctctcaatggggtgacagtcctcgtcttgtgcccctcacgcgcttgttgagatgacagatgagtcacctctgggaaactgcctgagagctggatgacaccactctgtgggattgcatttcatccacagagacatctggaaaaggaggcagagcagagcctgacttttgattatttggggagggagcctggagctggtggaagtgagggcatagagcacattcctttcaggccaggcagtgcttggctgctgaggcaccggtggagacctcatgatctggtggtccgcctccctcttgtgctgtgtgtgcctggagctctctggcttccttggctttccactgtctttcccaaagcctccatgtattctagaatctgctatggagtttcagggggatctctgtatagtgtgaatatctagctctgaaacacaaaagagaaagctacaaagggcaacgtaacaaaagccgtattcccacccaaggattagcacatgctcatgaggtggcatgctttgctttggatcattgtctttattttattttattttgtttatttatttatttattattt

SEQ ID NO: 51474 - DNA, 1141 bp, Homo sapiens
ctgtgtcctcatttgtcagtgggaataatagaataacattactaccaacgacgatggctttcacaactggaaccactaggccctcaggaatgtttactggcttctagtctcattgataaactgaagccattgtgccatagctctagagaactggcactaggggcttgcatgattcatctgagttccccagacaatgctggcacatagtaggccctccataaagtaagaagggacactttgctcctgacatccatacagctcctctagctttgcagagaaagccctagagagaaagaatgtgaaggaacaaagggtcaggttaggttgtgcaacctttctgatatgcatttgtaatgcagtgagcaaatgcacaagccttgagtcgctgcattcttttctaaccacccaagagataagttgaacccccactcgtagcaacctggccacttgtctgtttagtcagccctggaatacctccactgacggggcactcactaccactgaaagatggtgtgcagaattctaatgttcttcctctcgcggggtcgtgggggctttcttccagttctctgggttctgatcgttggggctgtcctgacacccttcttcagatgaccgctgtcaggttggtgaaggcagtgcgcgttgggccttccctccctagagatgtgattgcacgtcgggtaccaggagcctggccagccctcagcttctgctaaccagggagcagtgaagcccggtttacttttgttggcttgtttattttctaatgtcacctgcctctgcactttaagtagtatttgggctgttatggagtgtgcacattctaacacagcaccttgtcagctggctgagaagctgaaaattctcggcattcctccttgatgtcaattacttcaaggagcaggaaggtgacttcttttaacaagtggaaaggattcaggtaacaaagccatttcctcttcttaaccctctactgtggaaagttattgacttagcgacacagtctgtttatctgggcttcaggagcagggctttggagactgaaggcttctccccacttttgtgcaatgttatatattttttctcactcttcatccagtctgagtggggtctgccccctcccctgagcagtcaccat

SEQ ID NO: 51475 - DNA, 1647 bp, Homo sapiens
ctctcctctctcccctaccttccttttcttccctcctgtttttgggagggagctcagcctcccttcactgccactgcccatcagcatcctctccctattcagccacccccaccccccatccctggtattaattgactttggctcctgtcctggagctcagcctggcacccagacctgccgtgctatactaacacctctcacatggttaaaccaatgggggtggcatttagcagatgacgctgaaacccgtgaatctgccctttctcactgggccctcactgctctagagtccccgcctcttttacgaagcggctgtcatggttgatgggtgagtgtcaggccccacccagggacagggaggcccagtgccggctgtggagttacccagaccttacggtaaaaacgcatcaccctgaatgggggccaggccaggcatcggcccaagccggccctgcccagcggctggattctgactcgctgtgccttagtcacaggccagagactcttctgcttccagctgaggctgtcccctgccttccctggcggcccgggttcctggaaaagctgtgtgccagaggacgggagtttccctccaacttaagccattagaaagctcatttattgagcacttactaagtgtcagagactgtgctaggcactttacatgaatcttctcatttaatccttttaataaacttccggggcacatgctcttctaatctcccttttactgatgatgcaggcttgacagtgggaatgctaaccgcagaaagcagctcacctcacttgggtgctactgtgtgccaagtcctggggttagcacccaatagccccgtggcggcatgctgttattactctccctgcataggagtgggaggctgagacctgggtgtttctgggtgtcccagctcctgtatgccatctgcctgtccagcccttagccacaaagctgttgtgccatgtggggagatgcggccagtttcccaggtgaggctggtcctgcttcaagcgtgggagctccaaccactgctccacgctgcctccactcctgaacctgaaggtggaggagtttcccactgtctcaaataagcaccggggcccaggggtcaccaggctcagatggaatttgcttaaaggactcttgggagaaaagctgattgggggatgggaagagacagctggcagtcacttaggagacagatgtgtcaccagaactaaagactgacctgggaggactgactttcacccaaaagggcctgggctgggaattctcctttatgtctccttccctcacactcaagattcaggtgctcacaaggagcaccttcgagtgaggaggtgtaggagggaggatggctaacagctcagtctgctcagcacttttacagtttataagccatttcacagacattatctcactccattgggcaatcatatgggaatgcaagccactgtcttttcttttcttttttccaaatggagtcctgctgtgtggcccaggctggagtgcagtggtatgatcttggctcactgcaacctccgcctcccggattcaagcaattatcctgcctcagcctcccaagtagctgagattacaggcatgtgccaccatgcctgggtaatttttgtattcttagtagagatggg

SEQ ID NO: 51476 - DNA, 4725 bp, Homo sapiens
tggtgagaatggatgcatacccacccgctgatgacaaagggacaggtcagaaggacagggcctttctttgaatggaaaacctgacccgggatctctcctggaagatgaagaatgaactgggcagtgaagtggggagaaggagaggttaacttctggggggcttagagaagaggggggaaggaggagaggagcctgggattagtcccacgaaggctgcgctcttgtttgcccaagtctcctcctgtgtgggacacaaagtgggcttgtaatacaatactggctcaaaggaagaaaaacggcagaggctagcactggggccaccctgagcaagtggtgtgttcatctgtgcatgttctggacagtaccacgaggtcagtaaatgcttctgcctggcatctaccacaaagctcattccagagggtgctctgtggccctgccaagaataaggcctcgtcaggaaaggctcaccctgtattttcccagcctactttgagccatctcctgaataaaggacagcttgcctgggcagtaccgctcctgccacaaagacggaaaggaaaagtatggcaagtgctttaagactccttttaatgtcagctttctacatccagataaggagaagagctcacgatggtcctgtaacttgccagacatctcacaggagattcattgctgagtctctgagcacacacaggctccctttacagactggaaaagtctttctggtcagtttgcctccactgacatttattgagcgcctgtagtatgtgcttggatgctgccttgagagggcgctttgggtttgaaggctccggaaacgtatgactttggagcactcattcctattcggtgctgacctttgttcacatttgtgctcagccaacaatcctgtgtaggagagtggagcctgacaaatgtttatggaaggtctgcctggctgactccatacacagattgcatagggttttccaaatggcagctggggagaagttctggatctgtcagaactgattgggagaacctgcaaaacaggcaggggtgtatacgtcccttttccaaagtgaccctcctgcctggcttttgggaacaggatctgtcctcgatggtccctcactaactgcctggcttcctaactgttgcaggtctggggatgtctgttgttaagacaccatgcatctggatgcctgttgagtgtagagtgctggctcagctgtagggtggggtgggatggggggtggtttgaaacctctttcaaaaataccattagggagacaccaagacagcactgacgtggatgcagaacgtaagtgctcttggagatgaggtcagcacatgaagcttctctgattttacagttgccaccagggacgcaggattatgttcctgttaactgaagacacaatgagaggcctggcttaggcaaaagctggccagtagggtgtatcagggaggccctaaaagggttagtacagtgggtgaattgtatcccctaaatagatatgttcaggtcctaacccctgtgcccttgaacgtgaccttagttggaaggatctttgagggcgtaataaagttatggtgaggtcatcttggggtatggtgagctcttaatccaatgaaggatgtttttctaagagaaaggacacgtggatacagacacactctgggaggaaggccatgtgatgatggaggtggagattagagggatacagcaccaagtcaagggaggccatggattcctggcagccaccagaagccaggagaggcaaggaagggtttcccctcagaggcttcacagacagcacggccctgctgtccccttgattttggacttgcagcctccagaacagtgagagaaaacatttctgttgtttcaagccacctattttgcgaccatttgtaccctgagaatctaatacagaagggaatctcatcctatcttgaggtgatggctttcctagactccatttagagcaaggaattgcatgtttataagcgaactttgacacttgcctctgctgatatggctgggaatcctctctttcattcttcattattaatgggtatttattatgtcataggacttgtcattaaatctgctgaaatctggtaatccaagcctccaacccatagtttgcatcaaccaggtggcgacccccaggctctgctggtttccattcctttatcttgattccattcctttatcttgattctccctggccgagagcttttctgacccacctaaaatctgttcatttcagaccccggcctttccaggatgccttttggagcccctgctggccaccacatatcatgttctgaagttctacagccctctgagttggacactgaccatctgggggctcgagtcatcctcagattggtatgcagccattcaaacattcctgtttgtttcctgtgagtcagcattgtgctgggcttccaaggaatctgcagtcctcttcactgcctcttcctgagtactcactgtgttccaggcttctctcagcccttcctgggtacagtgctaggaagtaaagagtcatatccactccagtaaatgattgctgagtggatgaatatagctattttcaccaccaagataaagatgggaaagtgagactcagaaataagaaacttgcctaaggtctacacagtttaccagtgcaagtgctgggattgaaccctggcctgtctgacatagaggccactattggcccaggacaaaagcttgtctgcagaggacagagcaggagcagcgctgtccatccagtctgggcgatattctttgcagtgggcccaggggtgataggaacttgttgcatggatgaagtggaacttttcttcccagaaaagaagacaagaagacagggctctgacacccatggtctccagcagccctttttgcctggagcaagtatgcccaacccccctttggctcttgaataagaaggaaaggccttaccatatgagcaggaattgtgcatccaggcatgtggcttactcacctttcctgctatgcctaaccttctcttctcctttctctgtctcctcagaccctcagggggcacacatttcagcataagctacagagttttgtccgcattcacattcctctccatctgccatgatttgttttttttttttttttttttttttttgagatagagtcttactctgtcacccaggctggagtgcagtggcgcaatctcagctcactgcaagctctgcctcccaggctcacgccattcacctgcctcagcctcccgagtagctgggactacaggcgcccgccaccatgcctggctaattttttttgtatttttaatagagatagggtttcaccgtgttagccaggatggtcttgatcttctggcctcgtgatccgcccgcctcggcctcccaaaatgctgggattacaggcatgagcaaccacgcccagccgacttgtttttttactagccgtcaatctccaaccctctgtcacagcctaacaggtgccagggggaagacttaggactggggtctcatcgttggttatgggcactttagggttaaataaagctatgtaagacacctccccaaaaaataaaaacaaaaactaaagaccaccaaagaaagtaggaaacctcaaaaaactgagaatcactattaccttaaagcccaagtgctctaggaggaggcaaaagaaaatgaaaacagagcaggttatgactcagctaactgatgtcatggctgttacatgtcccatctcatgtcatctaaatcaggggccagcaaactgacaggctatcagtttttgtaaataaaattgtattggcacatagccatgtcaattcttctatgtgctatcagtgctgcttaggtaccattataacagcagagtctggtcctgacagagaccctgtggcctgcaaaaagcctaaaatagtttctgtctaacccttaaagaaaaagattgccagccccggttctaaactgcacttctgatttctaactagtcggagctatttttttatggagggcagacagtttctcatttgctctgcatagcaggccttggcagccgagggccagggaggagcttgcccagatcatgcagccagtccctacacagctggcattcacctccaggtctgcctgaccctgaagcctgcaccctgatcccctgctcctctgcctccatcccctgctgggcctctgcaggagacggtccaggcccacactgcttagagaggtttccaagagtacatgatctgttagggattgtttgtgacagttagctttcaggtgagagctcttgagaagaccgcctatatctcttcccatgcaatagctccagccccctgccctgcactggcatagagcaggggcccaataatattttttgattaaaggaaggaatcaatgaagagggcagccctcaagccagggcactgcagtgtagcatagagcagcccagcctctggaacccatgccaggccacgagttccagtctgctatgaccttggacaaggtagactacctctctgggcctcgcttttctcatccgtaaaatggggataaggacagcatcaaccccaaatgcccactgtgaggttacaggagctactgcaggttgtgtgcatggaacattcttagcatatctgtcaccaccgggacagaaacgggctgttattatcgaggcttcaggctgtttactgaggattctttagaaatggagaaagg

SEQ ID NO: 51477 - DNA, 391 bp, Homo sapiens
ggcctgttccaggacagatcacaaggctgagggttaagtaacacctggagtggttaggaggctgggcacctccttgtgaatctcccgggctgcgtggcgggtggcgggtggctggcaggggagggacccttggcactgctgtggctttgtatttgctgccagcggggcctttgatgccccaggggctgctcgcccagccaagggcattgtagaacacaaaagctgcagaaagcagcacaaataaagtgaaagcgacccaggaaactgccagggagcttatcagcctgtttcctgatcataggtatggggtgtagggaggcacggggagcatttctgggcccggtgattgcctgcacgttgccagggcccctggtattgcgtacaaagcatt

SEQ ID NO: 51478 - DNA, 1943 bp, Homo sapiens
ttagtctgtgccaaacataaatccagggatgtatttatttttcccagtgaactaaaggtttataaggaggatgcccttttctctgcaaggactggtattctcttcccttggaaaactcctgttcatccttctggatctgggggaagaaacccatttccctcaagactgttctcaccacctgggtggagttgctgactttccattttggaacattacacttccagggcttcgctctggtccagaatacacttactgtgctgttctagctcatctcttggtgtgcgtgtcaactgaaccatttgaaggggatgactgtggctcctttacttatctctgtgtcctctgtgcccactacagggtcaaacacagcatggaagctaaacatacatgtgcaaaatggacaaatgtaggtacaagcaggggcacccttagttcagaagggagcttgggctccagatcacttagctctaacttggaagctggaacacctggctctgttacacagacaagacctgtgtctccatatatacaatttattcctcacacttggcaaatgtgtgccgaagctgaaagagctcaaccttagagtttgacaggttcaggtttgaatccctgctctgccttttcccaagcaggggactttgagtaaatgacttcactgctgcctttgccacagtttccccatctgtaaaataaacatagaaacacttgctttgcctgatttgttgaaaagaatagagatgatgtttgcaaagtcctggcatgagcagtagctattatggctattttatttaccctgaaaagcaactgttcatagtatcacaaggcaggcaggggtagggggcaataaaagcatttgtggcaaggatccagttatttgcaggcttctcttctgtctggctttgtttactgtcatgcaggaaaagtgccttcaccagggcacagcagtaaacctgttggctactctagtcctgcctgggttcccaggaaattggcatgagaggagctgcctgctgcttgtgggcctgctatttaggctgcaatagctgtgggaacacacagggttaggaaaacaaacacatgactcattggggacttccgacctcaagccaatgaggtgctgactccttgcaatttctaagggttcccagtacatatgtatatgtctgctcagccttccttggacctgagcccatctgtctctgctctcacactttgtggggggccaagggatggaatgcttgtgttcctacccttcatccctccttctgcgtttattgagccttgctaggtgctgggaatgtgatgacgagtaagacagtgcagggtacagacaagtcaacacatgtggtctgctggacagcagccccccaagatgaccataatccctgggaccttcgactgttatctcacatggcaaaaaggactttgcagatgtgattaaattaaggatcttgagatgggaagagtgctgaattactcaggtggacccaaagcaatcacaaatagttacttattagtggttccttattagagggaggcagagggagactgaataccctagaggaggagatatgaccatggaagcagagattgtagtgatgcagccaggagccaagaaatgctggcagcctctagaagtggaagacaagaaactgattttcctttggagctccagaaggacccagccctgctgatgccttgcttttagttccttatgacttagttcagcctctgacctccagaagggtaagaggataaatttgtgttgttattagctgccaagtttgcgatgatttgttacagcagcgagaggaactaatacaatgtgtccttgcagtattctaagtgttaacaccacttccctagtgatgaaggagactgaatggctcagtggttccgaggtagatccctggagtcccagtgctttggttcaagttcac

SEQ ID NO: 51479 - DNA, 1522 bp, Homo sapiens
aggccccctacccccagccacttgcctcctctgttgcaagaggagatgaggagacaaatgtggaatttttattcccattcccttccctcctccataggcagccactccagtgtgcttgctgcaggccctgcatgagggcctgcatgaggatcctccctgtcttgttctgattgggtatctgtttttaatttagacaaatgggattctgctatagatctcaatttggttcttttgcttactcaacactctttttcagagccagtcttggtgctctgtgttcacctggttcatctgaggagctgcatctaccctgcccatgccatagatcctgccctgtttgcttctcctgttgctgctagtggacatgaggtaaccacagcctagttctgtgataagctcttcacacctgtacccatatggactgtgggagagtttctctgatatggactgtgatgcgggtgagtcatagtgcacactcacacttaatttcacaagtactgccagattgtgttccagaatgactgtaccagtttacacttccacaggcagtgctcaagatttctgtttccctctgtcctcgccagcacctggtattggcagatgcatcaaaaaggatgcatttgacagctcaaccacctcagagcacttgattagcatccctgtgatggccctttctgctgcagacatcactttgtcataacagcattttgagcaggaagaagcatcaggcaggaaaaaaggggcccttttactgtgactccctatcttctgttagggaagaaaattttccccagaaatccccagtagacttcccctatgtctcagtggccaaactgggccaggtaagctcccagccagtccctgacagagataacaagattgtcatggctgtttcaagccagggccaattcttccccctgccatggactttttttgagcacattgctatctcccttgtccctgaatagaactgggaatattttaataaagaagaagagaccagtggctgatcagtaacttggcagccaacagagtcttctacatcagagttctgcatttgccaactttttgcatgcatgctgcctcttctatataagggatcttcccccacatctgtttgatttgcagagaatgtcagaagcggcgagtcactcatacatgtccattgctttggggattagatccatccagctcattttggaaacggcaattctttttgccaggcagacatgagacccatttccacaccagctgctccagctgaggttcccatgcaggttctgcgtgacagaaatcaatagaaagattcgaagggcagagcaccaaagttcctgccctgcaccatgatgtcaaagcagaatgcctgctgaggacaggtgcagatgaatacctgtcagagagtatcacttctgcaagcagcaacttccccttcttgtcagccacgtggatgccatagtaaccttgtgtttctggctagctcaagaaattaatttataggatgtgtgcagcaggtcatgcctgt

SEQ ID NO: 51480 - DNA, 634 bp, Homo sapiens
tttttaaactcccttccctcgatggaatcccagtgagagcctccatgaactgattgccaaggatgttttgtcatgtatcagtctctttagatgtcttttaattcagatcttaattttccactcatttgtgcctaggtgacattatcctagtttgccggaaaatgatgctgcaaccagctttgtctctgtaaactgtggttgtttacacatttcaggcatctggcaataatgtgtccctcccccaggctgttatgcgtggcagattattaacaccacaactgccgttttagttaatgaatcaaaaacatggatcactcccattattggccttgaaaagctcaagcaaactcttaagcataactaagggcccacatcgttttccaacccaaagaatgccagggctatgcctcctatttactttgaatgattggctcaccaaagtttttgctggttttctgtgttgttgcaatcatggaaaccctctaactctgctgacattcctgatgtgctactttttttttttttttttttttttgagatggagtctcgttctgtctcccaggctggagtgcagtggagcaatctcggctcactgcaacctccaccttccacctcccaggttcaagcattctcc

SEQ ID NO: 51481 - DNA, 840 bp, Homo sapiens
atccaagatcatccagtgagcagcagtggagctaagatctgattccacataatctaggctcctaaatatttttttttctattgccacatgcccagcgaccttcctgcggcatggaggtcgtgggtgcagcttgtggagtcaggttgccaggtttcgagtctagctcctctatttaaatagcttgatgatcccaggtcagttcctgatcctcctctgtaaaatgggaataattttttcacctttcccacagactttcctgggggattaaagggagaatgtatctaaagctctgagcacacgtgcctagcatgtgagtgctccgtgaatgttagttactgtgattatttttagcccagcaggacagggaggagtgttaggtccctgggggcgatcactcctctgtttactcctcggactgtcccggcctggcaggcgttcatgagtttgtttctcctgtcccaaggttgccctggtgctctgcagtggcagggctgagatgattatacaacctgcactccaggccaagtccggtactcgtcccagctgtcggctaagcctgcactgctatgggtgagggaatcactcctctccagctggctttctcacgctggagaagcctgacctttattcagaatcatcctccagcgcccacatcacacagcaccctggctcacccgctcctcccccaacatgtcctttacattctcatctggggagataatggggctccagtgtccccaagacagctgcttttcctttcttcttcattcgtgataactctctgttctccagaagtgctgcttagactctagagggatacatgaaagagcggtaaggtga

SEQ ID NO: 51482 - DNA, 799 bp, Homo sapiens
tggagggctgtctcgccatggttgttatttacattttcctaattactaatggcattgggcactgtttcacacacttattgcatatatcttctttgtgaagtgtctaggtcttttctttatttgggaagatgggttgtttgtctttttattatcgagtcgcaagggttatttatatatcattgatacaaatccctggtcagatacatgtgctgcaaatattttcttccagtctctactcacactgtctcttttaatcctcccagcaacttgatgaagtagatgttactatcctcttctttatttcctagaagccaaaactgaagcacagaaagtttaagtgaaatgttcagaatcacacagctactcagtatggcagtgagagtgtgggcctactgcagtgtgactcagagcattgatgtccagaaaatcccaggaagcttctttccacacacgaagccttgtatctccctggcagtctggaggcatgtggccctcgagccagtgctgggctgggttatttcggttcacactctcgccctctgccttgcacataccagaccatcctgggaagtaggcggctcccacaacccggttgggagcgtggtcttctggggaggatgccacacagctttgagttgctctgatgaaagacaaactgcggggattcttatgggcctccgaggacgctgacagtattacctcatgccaggaataacaatgaggggcctaggcgagctcgccgccagcccttctctgggaggcaccgctggaggaaaccagccaggagatgggaggacgg

SEQ ID NO: 51483 - DNA, 660 bp, Homo sapiens
ataaagcacacacttcttacagggcagaatggtccttctgcatctacccagcctaccgccagctgccttcatcctttgtccctttttcctttcgccacatgttccagtggtgagtgcaggcttcatcagcacagaaaaaaaaaaaaaaaaaaaaaaaagggctatttttttcccagaattattctcgctgtgcagagggaatcacagttaaggtatcaggcttcctatgtggatttccaagagttcaagaaaggattgtttgaccatcccctgggaacactgttgaaaggattcttacattgggtgggtggctcattccaaccagatattgctacagttcttcaaaacacataattgcataatgtaaggggaacctggttttccagctttgttcagctctcacattctatttgttctattaaagactatattgactttggaaagtaatttggcagtattacactacagcagctttactccttttttttttttattgatcattcttgggtgtttctcgcagagggggatttggcagggtcacaggacaatagtggagggaaggtcagcagataaacaagtgaacaaaggtctctggttttcctaggcagaggaccctgtggccttccgcagtgtttgtgtccctgattacttgagatcagg

SEQ ID NO: 51484 - DNA, 2352 bp, Homo sapiens
ttttggttggtctcgaatatttcagctctgtgtttcattacttaaagtggcccgttctacaagggtagctccaatcaagcaaggtagattgaagtattgttcacagatattcactgggcttcatagaaggagaattatattatcctgccccatgggtatacagcatggttatgtagcttgctctggccaatgaaaggtgagtggaagtgagacctgtcattaccaggcagaaggcagcatgtggtttatcatagttgtctttctcttctaccctgatgataggcgaagttgcagacagagtctgcttcccagagggtccagcagtttcaaaggcaactggtgaagaacaagtcatgcgaataagaaataaacatttgttgtaattgtaagccttcatgatttgttacaggagcacgaactagcatattctgactaaaacattcattgtctattgaatattatgagattagctcttacaggatggcctttctcctaaattgcagaggcacattattcgagcgccctgtgaactggctgtagttgtttctgtggatggccggacaattctcccaatgatattgccattactcaaaatattttctacttccattcaaaaaactgctttacattataaaagtactaaactcctgataacactagtactcctgctaacagccaatactttctaagattttcttatttaatcttcacaaaagctatgtgagataggtgttcttaattttcattttccaaacaagaaaaacagaagctcagaaatcttcggtaatgcattcaagatcacacagctaagcagagagtcaagattgaaatcagcattcgtctcaggcacaaaccctaatctcattactactcatattttccccctccaaaatggatattaactagctgagtcacacacctcatttgccagagatggctgcaaagattttgtctgctatgaaaagcaaagtaattataatgaaaataacgttagacttgatattaggagatgtggagttggttcacagctgtttctagtaagtccagtgaccttgagttagatgattttcctctctggaccctggtattttcctctgtaaaatgaagaactttgcctcagaaaacatagtgtatggatctggccaacagagtccttcagtctcctaaaagtgtatgcaaaacattgtgtatgaatgtatttttctgagtcaaggatctatactattcatcaggtcttggaaggagcctgttacttgcagaagatgaggaactctaattctctgacttgttgaaatgatttatcactttcctcagaattgggtgtgcaggcaaaaagaattcagtctgaaaaaaatggcagttaaattttgtagggtgagtgtcagattcatcaaagaataactggaaggcaagctgtatcatttcatttaaaaatcattaacaaatgtttctgcctcacattcctgtggttccttattgcttactctgcatagaagctgttcattcatctcctcagccagggactgtgtcattagttgtggctattggtcatttcctgtctcattcagcaagtaatcatattattttgactgggaagagaatgagtcctgagctgtgaactcagtctcacaataacttgaggatgtatttctttgaatgtgggagaaaacgaaaacagagcaggaaaataacattcattgagcccctatgatatcccaagctcttcaatggcattttcttctttttttagtcacataggtctattttcaaccaaaattttggggtaactatcatccattggccactgttttaggtgctgcggatatagaaatgaacaatcagaccaaaaaaaatcacattctgtgagcttatgttctggtgggggagaaaaaaatgtgctagtaaaatttagtaaaaaatatattagtaaaatatatatgcttacatatgctactgcggtatatgcgatatcctcgtattacaggatcagagacattcaataccattgattattgttatttctatatctatgtctctgtctatatctatatctatctatatctaatcagttattgacctctttattatcatagtgtctctcaatgtctctagtaatcctgcagtttattttgtctgacattaatatagccactctagctttcttatgcttattgattgcatggtatcttttttattctcttacctttaacctgcttgggtcttaattttaaaatatgtcccttgttgaaagcatatagttggttcttaattttttattcagtttgaaactctctctttttttttgagacaagagtctcactctgttgcccaggctggagtgcagtgacatga

SEQ ID NO: 51485 - DNA, 1741 bp, Homo sapiens
tcaccccacaccccaccaggacttgaaggcagcctcctgctgatccttcagtcctcaatctcattgtccctgctggaagaaacttttcctattctcctatctggaggttgctgtattactctctcttctctcctctggcaccctgttctctttccttcataatgccaccacaacttttaatcttataccaacttcttcatttattagttaatgtctatgaccctctataaactctacaaagacagggacagtggtgtttttataacttgaccaccattacctgtccctttatcatatcacagaattgtgagtgcacaattaacttttttaatatttatttttggtggggatcaggattgaacaaattaaggagaagttgtaagtatagcgagaggaaggaggacaacctggggaatgcaaaaaacttactctccccaagggagtttggtgatggaggcaagagggcaaggtacctgggcacacctgtgaagctgttgtgtgctctgtggcttggctattctgcagtcacaggttcctaagtgtgctgctgtggcgaccagggggtgtctctcgtgtgggtggtcctccctgaagtatgcagctgctgtgcaggccgaggcccagcaagagcttgtccgaggcctgatagatggaacagcccacagcatttttcttgcctggttgctggcagctctctgacttcaaagctgggacacgctgacccagaacactgtgacctttggcacgatttcctctatcctctcccctgctcgcccagcaaggaggaaggagcccagctcccttgaactggtttttgctgcctggagggcaaatttttctttgattcagagactggagaaagggagacataggggaggacccgaggcagttgccttctgaacatccggggagccagactgggttccactgtgcttggaatttggcactttggtaaactgggtggcagcctgggagattttctctttctcagcttgaaatgggtcctgttgttagaagtacctgcctagactctggaaaaaacagggcagggccacttcttgtctaccagcccttgccatccagcctcccaagtgccatctgattagatgagtcaaattgcattctgatttagctgagagttactaagggctccctgagtaactcttctgtcatctttgaaatgtagatagtaataggaactttctagaaccagcatgaggattggagctgtgtgcataaagtgcctaagcacagtgcctggcacaaggcagaagggaatcaataagtagtagctgccatcaccatcaacagcgatgccgtagttttttctaggctgccctatcacacattttatccttttggattgacacaaccccttctttgaagaggaaactgaggttgggaagtgatcaaatcactctcccacagtaacattgctaatatttgttaaaataaaggccacaaatccaagtctgtcccactgcattttgggtcttccttccttcctttctttccttttttccttccttccttcctttgtttctttccttttttccttccttccttccttcctttgtttctttccttttttccttccttctttccttccttccttccctccttccttttctccttctctctctttctttctttctctctcttttttaccatttatgtatgtatgtatgtatgtatttatttatttattgccttggcttacctccgtgagccatggaagtag

SEQ ID NO: 51486 - DNA, 2989 bp, Homo sapiens
tgaaggtatttaaaacatgttttcaaaagggctactgagtgcctagcataatataaccttttacatatttgaacaatttccaagctggggctagcaccacccctgctgggagtcagaatctggacactctctggaccgtaattgctcaccttgttgggacacctaagagccactctttcgggggaatgttttctgtctgtttgttttctggcttcttccccaatattagcggttctaccatggggtggctgggtgggtggaagggacccacgacattcaggaaagtgaggagcagtttctgtgattatagcagacccattcactggaatttttcctgacatctctccatgacctttatgcctccaagggcctggacacaatgcagcagctctccagctgggacagggcacatgagggggtatcatacatgagtgttcccccaagtggggctgtggccactgcagagcagcccaggggaccttgctgtgcacagccctatgtcctggggtttcccgcaaagctttgccctgtctggtgagacggctgccagacagtatgagatgaaagacaccgttcacacttaatggtgactggaatgtgcgccatgtaaaccagatgatgtggagaccaatttataaccacttcacagttcaatgatgaatggtgggtcccttgtactgactctttaactagctcccttcaaggaacaggcggcttccgagattgtcttaaagcagtgtgggatgtccaggccctgcccaggtcctatcttttcttccagcaccatccacctccctgaaatcttctcatagcacctggtcctcacctcgttcttctcgttgaattctgtttcctccttggtgtctaccttgctacattcattccacaggcatctctgttctattaggcagtcctttctgtaagcatttcccatggatattataacctaaccttcaagctttgtcaacacttatcagcagaattctgcttgtatcttgggccagaatgagtcacagcacatccctggatgcagagaagggtaggaactctgatacttggcttctcagtttccatacaagaggtagcaatggagaagagtgttgggagaagattttagtagggaatcaacagtgttaactccacacctaccattgtcattctattttacagattaaaaaacgaagtcacatggaagataaataacatgctcaacatcacccagccagaagtggtggagacatggccaacatcacaggggacaactcctgagcctgtgctaggaacagccagtcttcctgaattcatgataaagtaagaggtagaaccgtggccaattgtctttgggagaaagtgggatcaaggacaactccaggattctgcctgagatgggacacactagagcattacttgggaatgtaaataataatatcaaattattgaatgatttccatgggctactctcttcatataccagttctaattctgataagcttgtatcattatcttctttttaaaaggcatgaaaacagaggctcacagagatcatattattttccccaagttgcaatgatggtaaacacagatgacagctggacatcaactaggtctgggtggcttccaactccagtgactcaatgctgctccacacggccttcttacaaggaaaaatgagaacaggccgcgggccggcttctgtaaatcgcgtgttgttggaattcctgtccttccttgacccagatttgtaaacagaggctgtggaagccaaggtacacatgggcagatgcaaacgagccgtctgctgaggagaaagtcgaatgtgctcggggtgggtgcgcgtctgcctgaagcacgtgtccctgaggcctcctgctgtctccccagccggctgacgggcccggtggtctgcagatggccacgaagtgtctccgggctgtccagctgcagcctgggcgggctggcggttttttttttttgtggggggagtgattctgagggtgctgggtggccgctgacagagcttccttctgctacttttaggcttgttgctgagcctttttaaagggaaggggtggaaataagcaaagatatttgctgtgacctggaactgaaatgcctcactttaaaaacagctatcatttactcactcatccaagaaatacaggttgagccccttcagaacaacaggtcctgtcctcagtgcagcggatgcagcagggatgcatacagagtacctgtcctcagggaacttgcagtttattggatggagacagacaacccataatgatttgtataaatgtctaatatatgctatagaaagagaagcagcaaagtaaaggggtgaaggatgaaaaggccaggggatatttttctgatgaagtgacatttgagcagatacccaaacaaagcaaagcagtgggcccagcagatatctgaggccaggatggtctctggcaaagggaacagcgaattcataagccctgagcaaggcgagccttcaagggtgtaggccttcttcagatgtttaaagagcaccgtgcttggggagggtctggaagccgcagcctgggaacaagtgagagaactgaggtgtttagggcagaaaagggaagtcttgtgagtagcaggcagctttcctcatgtaaagggttcaaatgtggaagaaggataagactttttattacataatgccagaagttgtaaccaaagaccagaccagctgatggaagttgctggaggctgtttgcaaaggtatgttgaataatgccctaagcattggctctaaagagaaggaacccgatattagtgtagtagggctgccataataaaatattatagactggaggcctcacacaacagaaatattttcccacagttctggaagctggaagtctgagataaaggtgttggcagtgttggtttcttctgaggcctctttccttggcttgtgggttaccatcttctctgtatgccttcacatggtcctttgtag

SEQ ID NO: 51487 - DNA, 3439 bp, Homo sapiens
caggctggagtggagtggcacgatcttggctcactgtaacctccgcctcccggattcaagcgattctcctgcctcagcctcctgagtagctggaactacgggcgcataccaccacccctggctaattttttgtatttttagtagagacggggtttcaccgtgttggtcaagatgtctcgatctcctgacctcgtgatccgcctgtcttggccttccaaagtgctgggattacaggcgtgagccaccgtgcccggccagctcttcagcaattactgatatcccagggcgcaacactagagctctccaggtgattctaatatatagccagagttgagaaccactgtggtagggcagtggttcttaaagtgtggtccttagaccagtgcattggcatctacctgggaatttgttagaagtgcaactcttgagtcccactccagacctacccaatcagaattctgggtctcgggctcagctacatctgtttaataagtcctccagctgattctgatgcaggctaatgtttgagaaaccttgttctagggcaggaaccagcaattatttttctgtaaagcgccagatagtaaatatttatgctttgtaaatcactcggtctttgtgacaactactgaagtccgctgttacagcaggaaagcagccatagatgatatgtaaatatatggattttttttttttgttccaataaaactttctttacaagaacagagcctaggccgggtgcggtgctcacgcctgtaatcccagctctcagggaggctaagaggcgggaggatagcttgagcccaggagttcgagacctgcctgggcaatatagcgagaccccgttctccagaaaaaggaaaaaaaaaaaccaaaaaaaaaataaacaaaagacaaaaaacagagcctaggcccagaccttggtttgccgatcactgttctaggagatggaattggtcggtcgttgttatgtaacaagtcaccatgtaagtggcttcctatccactaatttgaaccatttattcttactgaaacatctgtggttagctgatgtagcctaggtttgcctgaggggaagaagtggggaaatacgccccacctttagggataactataagtcacatggcaaagaatgtaaaaaagggaaaaatgaaagatgaagaactgaaatcaataattcattctataccagggagtaagtgaaataacacactaaaagtgcccagaagtatctgagcatatgatccatgccttgtgaatgctggctattgttattattataattattaattattattctttattttgtataattcaaggctagaaattggatgcaactgtccattcttttgggaaggctgtttcagacatcctcagtgatgagtgtcacttatcattagcacttgtgacaacaggtgtacagagttgtccgtgctagcagcctgctgttgacagaacaatttgttctcagtgctgtgtgctgtttattcagaggaggccccaggacaggcttgtcatgtcatgatcagttgctgctgagaaacaggcaaatcatttctgatagctgatgttcagtagggatggggaacttagatcctggtttgaaagaagaaatgacttgtttggagctcaagtaactggatattcttaattaaggagagtatatttttggtatgccttagggaaaagaggcacatgaagaggatgcaaattggccttagagatttattagtaatgattaacttggcaatgtatgtcctgggctcagtacaacttccatcatcccggctccttcactgtggttcccatgtgctctgtgtagaccccttgtgtccgaatcacctgggggattagcaacacatactcatttctggggtctaactctagagtttctgacttgggagtgtgaggcgagatgctggttgtaaaatttttctgtgccgggcgtggtggctcacgcttgtaatcccagcgctttgggaggccgaagaggacagatcacgaggtcaggagttcgagactaccctggccaaaaaagtgaaaccctgtctctactaaaaatacaaaaattagctggacgtggtggtgggtgcctataatcccagctacttgggaggctgaggcaggagaatcacttgaactcaggaggcggaggttgcagtgtgccgagattgaaccactgggtgacagagctagactccatctcaaaataaaataaaataaaaataaataaaagcttttggtacttgtgatgaaccatccttaaggatggcactgatctccccatttgtacacttacatatatttacacaattttacagaaactgaaattcaaactcacagcggatcagaactagagagctctgacttccaaactctcaaagggtgagggccatgtcttattcatccttgtatccctggcaaggtatcctgaaggagtaccatattgaacccagtgtttacagggccttcgtttcatgggattggagttggaacccagaatggcaaagtgattcacccacaggtgtgcccctgatgcaacttaggattctctgagtcctctactgtctcctgccccttggagtctggcccttccaagcttctcctcgggaaggaaactcctgtgtataaaaccctctgacatgttagaccttgtggtaggtgatttaaacctgcgatttcattttattcttcaaaaaataaaatctgtcaaattgggattatgaattccactttatgaaagagaaaatgtgctgaaagtcagatggccaatgagtggtggaggctgaattcaaattgaggtttgtttgatgtatgtagtgactgaaacggagcatgaggcggtgctcctgggggcctggtaatgtcctgattcttgatctggatgtgggcacctcaggagagaatttcagtgtgtaaaaatttatcaccatacactttggcttcctgcactcgtctatgggtgtttctcttcagtgacaaggtacaaaaacaaatccatgtgtgtctggtttgcaaaatcatgctctccattatctcctcttgctttttaaaaataagagcttagttccttcccaaccaagttttgggacagctccatgtgaagttacacaatgtgtaaaggaacagtctgagctagaacccaggtctttttcttcctcaaccaatatcaactgatactctttttttccccactagtcacctctggggaagccccagcagatgcctcgatgtgagtgtttctgggatagtacagaagaccattttacacaagactaagaggctttcattataggccaggagcagtggctcacgtctgtaatcccagcactttgggaggctgaggcgggtggatcacttgaggtctggagttcgagaccagcctggccaacatggtgaaaccctgtctctagtaaaaatacaaaaaattacctggggg

SEQ ID NO: 51488 - DNA, 5464 bp, Homo sapiens
tttaaaatcaatgagctaaaagtcttcttgaaataataggagttattaataaaagtaagttgtgtgcaaaaagtaataataaaaataatgacaatgatacaatgatagctcacactgtagtgtttatgtatgctaggaactgttttatatactttaatttacccaatcctcatagtaatcctaaaagatagaagcatggagaggtgaagtcacttggtcaaactcacactgtgagtgattgacagagtaggaatagcagcaactaacgtgtatcaggcacttaccacgtgcaggcactctgccacacacttttcatggattgtcttacttaattctcaaaagaatcccataatgtaggtatattatttctactaccttatgggtgagaaaactgaggcccagtgagtttaaatcatacagttaggaagaatttaattctcaacactgccttcccccaaagccttgtgctcagcatgtatgcaacgtaagaacccacaaaggagagcaagtgaagggcctgggagcaatgctgctggggctgctggtggagcagggtttagacagaggagttcagtgctttgatggaaatgaaggaggagagtattctgagatgagatgataataactctatgtctctgactgtgtgttgtgtgtgtgaaaaagaaatctcaactcaatctagcacatgttgatgatgctcatctggtgtgtccatccttgttccagtctccatgacgaaggcagaggagcatcgtccaggggatacctgacctgcacctactcatcccttcacagggctcagcatgtttgtatttctgtacattctcctgttgaatcttctagagtctcaaggtttggctattagcatcttcattttacagacaaggaaatggaagcctggagatgcaagatgagcaatatgaagttaatatgaagttactcaatatgaagatcagagctcaggcaagacagaccttcgtcgttgtgccactccaaccccctcatgagatccaaagagatgagatgatttgctccaagtcagcacagacagaggcagactatgcaccagaacccaggtttcttgattccagctgttcattcatctcactcatcatttcaaacacatctagattgcaacctgcttttggaggccttcccacccctcgatagaccagagaagttaaacatttctataacagggaagcatcttccaagctcttgttgttactcttattaccctctattgccatgtatttcttattcctatgtggcaatgaggacaggagttgagtaggtgcaggtcaggtctcctctggacgatgctcctctgccttcttcatggggactaaaaccaggatggacacaccaggtgagcatcttaaacacttactggattgagttgaattttcttttaaacactgcatcctaatatctccacagaacccaagaatagaaggtgcttagcaaatattggctaaatgaatgataggatgaatccataagtaaacagactagggtaaacaaatctggtcgaacaaaagggaactgagggggttatctttgaaatatgactcagagtcagagaggcagagagaagagcaagaacattcctgatggggaccacttcaggagcaaaggccaaaggccacatggggctcctgatatgggcatcctagaacaaaactgcagccatttgcatcttagtttgaaacgaggctggagatggaagcagggagccacaacgggtctcagaaatgtcagatagcatgggcactgttctacttgtatctggggctgctgctggtttagcttcctctttgatctggaagtcaccatgctgaatcatgcctcagtcactggcagcctggattccccttcataagcactggtattctagaaccgcccccccccaccctttaaaagcagacacctcagctgcaattccctgcttaattaaggagtgagtcagggtggtggcttaagacacaatttccactgtgctccatgctcccttcctcttctctccctccaatgttatttcaagcacataaactcacaaggctttgtgaggagtggaaagaatgtgggctctgagctaccagacctcctggaaaatcccagctctgtagttcactagctatgggaccctgagcagagaccacatctactctgggtctcagtttcctcaacataatgtagggttgttgtgagaatggaatggtgttaaacataaaggactttgcagaaaatttggggtacagtgatgtgcagtaaggactaagagtgcctttggtttgggtctgtgtgccctcattcttacccttcaagatgtagatggcagggtcattttgatagaggtctccagcagattctgggaacggttttctctttccttcttcctggttggctattgtggatcattcctgcaaaattactttctgtggttctccagggctggagggcatagctcaattgctcttgaaactaaaccctttcacaacttcctgggcagctgccagaccctggtgctagcaggactacatgggccaggtttctgctttgaggattttactgaattgtacagacacacagtctcaggtcttttttcttatcaactctttggtgacatgaacaggcaccagagtaaggtctctttactgaatgctcctgctcagagttggtgaatctgtggaatttgtttttgcttcctgagttttgggtgggccttcagactcggctgtaggactcgccgaccagaggcccccagattcttgtgtggagtgcctactcttccttcctcactccattcctcacctaatgtaatttccttggattcagacaagtgctagtggtttcctgcctctagtacacccagcctgccccagactgggcatgcactgagtgtgtgcactctttttatgagtatcctctgctcactccattcaaaactgtcctgttttgtacctcatctgcttggagatcctcttctagccttggccttgctgttcttaggtgttaatgagtaaatatatgctatctttctcagtaggcataatgaaccactctccctccaccaaaatagctataacacagggcgctgaggcactgaactgagagtcataaaactctcattcccagccccactactcagcagttttataatcttgggcaaatcacttattgtctctgagccacaagtgttcatatttggaagggtggggctaatgctaattgccctatttctccccacctacctccccacagttccatttactgtgagaatcaaataagataatgcctgtgaaagtactctgtaagccagaagctgttattatacagaggctacctattattattaagaactggttttcctgattcttccagctccccgatcctctccatcccctgagctggctcgaggctggagatctgtagaagcacacctttggggccagagcctagaaatcattctgctttgcctaccaaggaatcttcttaattcctcttatttaaacatgtggattcaaagaagaagagttgaaaaagtctgacaccaaaatatttctttgtttggctttttaaaatcctagtgcaagctaccatgttaagacccacaccaaacccagacagaaaaccctgttcatgcagatgctctaggtttacatccagaatgaatgtgcttggctgacactgctcctaatggtttccccaatctgaccactttctgggtcccattgccactctctttttgaagtcactactattttccagaagcctctccctccaggcttctctcttcatccattcttatacccatatgagctctctaaatgcttgtctcttcatattacttctttgcttaagcctccacaccatgagtccacattctcctcacagtaaagtgcacttgctgtaaaaggggctcctgatgagctttatggacttgctccatgacttctcacccctctgtgcttgatccttaagtaattctgttcaccagacaccttgttctctgttctacctcttcttcctgtagggcccggcttagatatcactcacttatgaagcctacttgaactccccttgacaaagtgaggagccctgcaaattgtttccatagcatccctcttttcgcctatagtacccttctcatccttgatcattgtcatgtgttaagatctgtcttctccaggaagctgaagctccatgagggcagacactataattgtcttgcccattcatttcatagtcatggcacctagcccagtgcccagccatgaacaaatgaatggcacgggtaagtcaatgtttaagatttttgctctggaagccaggccacttaaacacttcatggaaaaacacagatgaactcattttagagacggatgaacacattatggaaccaagtatgcaacccttaattttcttctcctaaacctctcagcacatgccaactagctaatgttgcctaacatttattgagtgcttcacttgtactaggcatagtaatgagcattttacataagtcaactccgtcaaccttcacagccatactcagaagtgagtgttattatcctgcagccactgatgagacactgtggttcagagagtctgaatcacttgcttaagtttgcccagacagcaagtgaaggtttactattgacctgtgtctgttctcctctaaaatccatgcttttaatcactggaccaaactgcatgggcttgggcaccagaaatgtacaggtttaagttcccaagacttactagctgtgttcattgaaaaaagttaggtttccttcttgtgcctcattctttattaagtgtctgtgaacgaagcgaaataatgttgtagagcactcggtatttagtaagttcccaactttcattgcaagtcagtaagttagagatagagcttagatgcttaaagttcaggcagtcctaagaattaagaccgattgctttcttctttaacatccctgcacagtggggaggttagcatataattgagcttcttgcatcctgtggcatttatcactccttgaggcacattaatctgtcctttgacaattgagtctgtgagaaaatgtttttcatcagaagtctgctgccttcttgtcctacttgctcagagcctttggagaaagtctagtcactgtgtcaccaacaccttcctggccatctgagggcagctgtcatgccaccacttcagcctatggactctcacttttccagagaggaggatgccagtttttccacgttttttttttttctcatggaatgagtcttaaactcccatcatccacccaattactagtttagaacaaactccaatgtatctacattgtcttaacctataatggctaagacaaagacttagcaacaaggattttcactgcagtattgattacattgtgaacaaatgtccagcaacagagaactggctgaacagattactgcttatccg

SEQ ID NO: 51489 - DNA, 9054 bp, Homo sapiens
gacttcaaaatcggacagacttggttttagtctattttctgccacttagcttcatcacctgagtttcataatttgtaaagtaaggcatataatagagtttgctttagtattgttgagagagcgataaaactagctttgtttttggagtgcttgctatgggctaggcactttgtgaagcaatttacatgcatgctttttatcattattcccattcactatatgagaatgaggctcagggaggctaaggaacttgtcccagtgctacattcaaggggatggtgactttccctcttcttagtacttgagttatttcaatgttgttaaagtggaaatctgttttcctgtcatccacatctccctgctgactcattctggaaccactttgactaaaacccccagatattttcatactggccatgtctcctctattctccggttgtgctttgtcttatttttttggacttaagtgaacttattattgagcagacaggtggatgactatgaggaagtccgagaataagcttgtaatttgtcagtaaaaagttgctgattaaattctactataatttggcagtgaaaagttgccaatcacactgtagagccacaggggtagtaaaatgcatgagctttgcattttccttttttttttgctcatctggaaagagtgagtgcttctgatggaagaatgaataggggaaggtgccaggatggatccagcaaggatgtcattggccagggctcccaggagaagctggaggatggagtccttggaacataatgcggggcacatttgtaagagtgggagccagacccctggcagaccaggagtctaattcctgctcttactcacctgctatgtggccctgagcacctcactaaattctctgaacttcattttcttatcctcaaaatgtgatagggacttggctgagttgatttcagcacatccatatgaacaaatgctaagcagccatcaagaatgactacaggaatgaaattcatttacttaaaaagatggttatgatgtactggtaaatgcaaaaagcaggctgtaaaatagaaggacatgtaaagcactcatttatagatgaaagaaaatctgaaaatcagtgatatgacttggatgttcagctttctgtagccagtagcacttattttgtgggaattttaggaggatgaaaatgagattgtgtaaggaaatggctcagacagtgctgggatcagttttagtctcatctcttccctgtgagcccttcactccctactgagtgacctgataaatgttaaagaacaagagaacaaattcatgtaccaaggggctccatgacaaaggtgggaaaattacagagttagaaacataagggagctggcccaaactcatcctatgttctcattttaataaatttattactatttttaaatttccaacctgtccatgatacaaaaaaatcaaattatacagcaacacttagagaaaatagtaaaaattcctctttattactcttctaatctcttttgtctctccaaagacaaccaagggtgaagggctctctgtgtatctttctagacattttattagggatttgaaacatgcatgttcaaatgtacagacttcctcaccaacactatgaatggtccatgacttgaatgttcgtgacacttttgtgatgaaaataaaatgctggctagagagaagagtcgaatgggtgccacaatcttaattgtttttccatgactttttggcctgggttggatattaacaaattcagatgcctactgaatttagaaatggcaggaatcctcttgacattctaacatttccatatggctaaagcttttagctctagttattatacttctgctttggaagacagttcctcaaaccagatctctctcctgaaggacttgtctcctttagccagaatgatccttccccattcaaggagaaaagggcacaggcccaggaggaaatatgtgcctgaatgacaaattgcatgagtcaaagacatttatgaaaatgacaaacactatttcagaggaggaaggcagttgcttctgctttcttttttcttttgagaatgggtggaaggccttcagagatggtgctgaacacagcactttgcaatgagtaacatttcagggataatattagcattaatgctcctttgattcctcagttttggagaatattagtaattggggccaatccaaagcactgagtggattattgaggcacagcaaaagctacaaggattttcattgcatagattctttacctccctgccttaagacatttattgtgatatgcgattctaacaaaagtcagagacacaatgccttacaccaaataggcacctaattgctattgattgatttacctcaattgtcagcattcttgcagaccattcatttattcatctgcccattaatcaaaatgtattgaggtaatactatctgccaggcactgcgttctttgtatcagtgtgggcacaaaagaggaagtgaacagttatcctcaaggctgtggcaaggacaggctttcagaggagaagacatctgagaaaggtttcaaaataggaataggaatttgttaggcaaatgtggggggatggcatttcataaaccataaacgggggaacagagttaacaaatgtaggaaatataggaggaggggcaagattgtgaggttgaaagtcatggccctgactgattgacttgaccaaatattcattagagaaatatcacctttaactcaactcaaaactgagtttcattgagctgtcaatttactcaacaaacatttattcaacaacttttcactgtgctggatgctagcaatataatgctgacaagtttctagtggcaattttcctaaaggctcggtagacactattagagcttaacctgacagtgattaccattatactggacacatgtcaaagcacacccctatttaagggaaatccactgtggggacaacattcttctgtgtgtcctgcacaatgcaaaggagtttttttgtttttttttttttgagagcgagtcttgctgtgtcttcagtggcacgatctcagctcactgcaatctccgccacctgggttcaagcgattctcctgcctcagcctccgaagtagctgggattacaagcacccaccaccatgcctggcaaatttttgtatttttagtagagacagggttttgccatttggccaggctggtcttgaactcctgacctcaggtgatccacctgccttggcctcccaaagtgctgggattataggcaagagccactgcgcctggccacgaaggagaatttgacacactcttttactaccttctcaaaatacaaatctagatttcaatgtgactcattgttttatctattgccatatactctgattaaactctgtcttctgagagataacttataaatgcctttgtaggaatcatagccatagctttaagtataatcttgggttcagctcttttgtcccatgacgaagaagtgacttgtctgatgttacataatgagagttatcagattgtaaaggagaactaaggctgctgatatctatgacactacattatattgcctccatgaataaaatgttaatgtcacccaatcagttcataaccaaaaccatagtgggatcggctctgagctcacagttactgtgattctatcttctgttccacctacctctatctcctccctaattctagagtttaaagggcagtaaactcaattttgaacatcctgcctttggtctccctcagttggctgtctgatcttttgtgcacctgtcagttttccaaaaagacacactcaacctcaccctagaatcttcattggaaagccctttcacttgctactctatatgtctgttttggtagacaaaaccacaaacccagataggcaattagggattaagggcaacagtggtttgggattatttcagctaattgctatcctatgtgaaagagtgcatcatctctgacagctggcatgagtaatcgtcactgttttagcagtaagtttataccttctgtgtgatagggactgccaatgctgttttgactggtttatcatcagagtggtgaatgtgaaaagctattgtatgtatcccattggttgttgtgacaattaaatacaacaaagccatcacattcttactatctgcctgtttataatatgcatttgatttagcttgactgtttttactttttagactctgtgtatctccgacccttgcgaacatcgcaccctgtgccattattttctgctgttaatggcagattggctacgatgccttcctttcttctgtattggggtggaggagtgatgtgatttgcatatagttacccagaatgctctgccaatggtcagttctctgctggctgggagactgagctcaggaacaagctgcaaggtgtaaatgggcttttgggtatgctgatttatgttctaatttatactcatgtgacaaggattgaaccctgactatcttagctggggtggaaaaggtccctggacaggggcagggcggggaatttgatgtccacatatatccacttttagagttttagagttctttggaaatagggattttttttctttttttggtctgtctcagactgccaagtagaagcccagagaaggaggaagttaattcacattcttaattttttctaagggcaaaaaaaaaaaaaaaatgcaccagctcattttccatctctgcttgggtcatcagtgtgcattgtgagcctgtacaaaggccttagacggggaatgctgccgagagcatcaccttttatgtcttcttttatatgaaatgtgccacttccccactaaccctggctctgggctctgcctctgctctcctgatggtgtgtttatggtggattcagcattctgggccacacaaggaagctgcagggggtgtccaagttcacatgtccccgcattccaggcgaatgtttctgacattgagcaatgatatggctctgccaggtttaggtctgtctgattggaatgcaacccgaaaggaaagtcccggaatgattcaaacactcacctccccacaaccccttcttggttttttttttttttttaattcctttttaattctccagtgacaaactcagcccagcactctcgctgaccgcatggcacttgttggtgctgataagtgcaacttcccaagagataggaatgcaaatcgtaatattttgttgagtcatgtgtactctgcggctgtttcccaaacattgcatcagacctgtaattggcagctcccagtactctgctggatgacaccaaatgtccaggaaaagctcagtccatttctcgaaaaatgtagtctcactctctccatctgcctagttgtaacatcctgttcctaaggaagtagaatcccttggggtagcaagggcaaaaccggttttgcggataagtttgaaaaatatggctgttggcctttcccacccactctggtctcttagcaacaagacagctgatggtatccactagggggaaaaaaaaaacaaaaacacaaaacaaaacaaaacaaaacaaaaatcatagaacatgtgggggagcctgtctgaattgttgcctacagcctgatttatttaaacctccactacattcttggatgtgaagacctaggagtcaagtcatgggagctttctcttgcccttctcttgacctctatgaggcagatagaggaaaatctcagaatgagaggaactttcttcctcttcaagagtctgcgttatccgagatggccatttcctttgacctcaggagtaaccacttgaaaacttggacacatttatagaaaatttgggctcctgggatgcagtgctgggaaaagcacagggctgaggggctggagcttggggtaccaatggtgacagtctctccctccctgtgggagtactggcaggaaatccactgtgcccttgtccccaccgagggttgattttctccactgcaaagtaaggagattgaattagatctcagtcttctcttaaggtacctttcacactgagcctatgggagtggtggtatgtgcatgtatgtgtgtgtgtgtgtgtgtgtgtatatatggtgtgtatgtatttatgtaaactttatatcatgtttcaatccaattctctctctctctctctccacagagctaagtggtaccacaagaattcaaacctagatctagccaagtttgaaatccttgttctcagctcctaccctatgctgttatgatctacacagagaggcaccacatagctagtattttatgttatacctggtgaactttctatctatgcttatcaattcataggagtagaattgggaatgttggcgtttagaacatgataccccaaagtatggcaccatggcctgctaagtactttgagctgaaggacatagggagttcatagaagtgagatccttttgaacttctgctcccactcctcttttttgcctagaaccagcgacagaaactagaaatgctacactaactttctcccaccttactgtggaggaggagctggccaaaaaggaattctctgccctaccttattggatagtaggtcatcagactctcatttcggaggaatcctaccccaaacctgggaggaagaaatgccacccagagaagccgagaagaataggaacagacagatcatgctgagatcccctctgttaccattagatcatatcctcttgcctgatcacatttctacatggcagtccattcttcattgaatctaagcataaaaatggatagttttctgtagctcattgggtcttcattttgaaggttcttatgtcacaccaaactttcatttaaaaaaattatcatgcttttctcttgtcatcctttcttttgttataagggtgccatccttacgacgaggaaggacgaggaaagatatcacacgtttgtgctcctataggaagttatagaggacctaggcgttaataaagaaacctgatttcacatccttgctctgccccgaacagttacgtggcctcaggattctttactatgaagtgtgaataacagatcctctctgatcaggttgctatgagaattaggtgaaatgatgtaaaatacctgacacagtgcctataacctagtaagtgctaaataaaaagaggagagagcttcagagagacagagagggagatgagatattgataaagtataggtttcttgatgacaggaacttgccctgtttatcctgtaacctcagcacactgtgtggcacactgaagatgattgtgttttctgagtcaaacagatgtctctctctctcacacacacacacgcacgcacacacacacacacgtgatagagtgatgaattccacaattttatgttgctggaacttcttagtagggctctgcattttacagcaatgcatcacagttaaaataatcaatgtgatctggctgtgattatttctttcattatttaaaaatatcaacaattgcttttcaaagcactttgattttttttttttttttttttttttggccagattttgttagggtgtttctctctttctaccgccactctttttcttgagcacttactatatatcaagtcctgggtcaggtgtcttatattcattgttttatcattattcctaatatcctcctagcaactctatcagataggttttgttatttccatttcacaactgaggatcttgaagctcagaaagtgtgagtcatctaagaccacacacctggtcagtggcagagaaagaatttgaacctacatctccctgcttattaaagcagagtgtgagggcagggagtaatttatacatctttggtcttgataattgagctcactccttccaaaaaaaaaaataactgtttacttcctatcaatactagagaacttggagcacttcatgttttcttggcactgagctacattcattatacactatcttatttaatcctattaatgaccctgcatgataggtaacaattattaggcataaatttcagagaaggtagttattgacaagcaggttaagtaataagcctgagtaactgggatttaaacttaggtagtctgactccagagtgagctttcctcttaagagtgatccattgattttattcacgctcacgagattatgtggtcttcatgcacttggggagcgtgattgtggcttatctagaacttaacttccgctctttttggaagtgaccatcacctccttctctgccctgggaataaacaatagaaattgaggatacagaagctgtagaaccataggccaatagagtttaaaacttgaaagacttcttcaagagatcatctagtctaatagtttccaactatggggcattgcttgtttagtggcttataaaatcaatttagtagttcatggctgaccttcaaaaaatgaagtgagtagaatagaaaacatgagattttgttgtacttagggtgaagtagtcttgagagcagtagtttcagttatctatatgtcagtgtctcctgggtcactatgtaaaatgcatttcttactgagggttaagtttgaaaagtttgaaaaatgttgatttcatccagtgtttttcaaattttattccatggcatctgaggaggcctcagatatcttatgggagataaggatggaaaaagttaagtagaaagaatttcagaaatgtcttcttatgtttatctgcctttcatgttggactttcataaaatattttatcttaaaaagaagaactttactgaaaaaaaaaaaataattcaagaaccactgatttaccccattggaattgtgttgttttgggtattgattcattcttatgtaacttcgtgaggtaaccgaggaccagctatgtgctcagaacagtgatggctgccataggatatgcaggaagtctaaaaaatgtggttatccctgtccttaaattgttgatagaaccaatacgatatcaatttatttcttacatcaactatgataagaaaatacatgaagaagttattcggaatatggcaattgatttaa

SEQ ID NO: 51490 - DNA, 5320 bp, Homo sapiens
agcaagattctgtctcaaaaaaaaaaaaagtctaaggtttttcattgacttctctgtgagttaacagtatggcatgggccaaaacccaaggcaagctgattacattcaatgcattcatgaacatacagtatggaatacttctgttgtggaattgcagagatgatcactgcactttccagcttctcctatatgaggttcagtctgtcatttattctggtttggcctcatgactggctttggccattagaatatggttgaagtgaggttgtgtcacttgagcccatttttcaagcatgcagtctccattctcgaactcggggaacgctgatacagccatgtgaataagtcctggttagccttctggaagaagacaaatagtgttgagagagatcccacctgttctagcccaggtcaccctagaccagtcaatctctagctgatctgaagctgatgcagatgcatgaaattaccaagcccaatccagaccagaagaattgcctagctgacttctagaagtgtgagctaacttttggaatgttttgttaggcatcaaatcctaacagacggacccattgtcttgcactggcaaagccactctggaagacaatactatgaccacatttgattgctagaaacattcataacattggctacaaatgtttacaaactaaaagatgttcagatcagggtggggagaaaggctctgaaaaccaaggagttgagaaagcttagtttgaaaagtaaagatgtttttaggaacatgaactccaccttctgagatctgaaattagtaggaaaagtgagttgaataatttgtaacttctgtggttggttgaatatttcgctgcaattcttgccccgttgcatccattttgtcatagccttataacaggcagcatgcactttccttcccctttaccttgggattagatgtgtggcttgctttggccaatgagatgtaggtagatgttatagagtgccagttctggccccataaggaacatctcatgtttccactcattctcctatacttctgctatcactgtaataacctagcccacttggcccactggtcccagataaggtgagaaacatggaacacagctacctcccaccacccttcagcatgttccagagccttcccagctagcccataccttcgtaagtgagaaattaatggttattgtacatgcctctgagggtgtgataatgattcgtacccagaaattgttggccaacatactgctgagattaaaattaggattaaagaaacataaaataattaggatcaaggaatagctacaccaataaagtagacttctgttgcatttaaggaggaatttctttgccaaggaagaagaactggtgaaattaggaattctgtatcctgagggatgttcaaccatcagcaagatgtacatcgtctttgtagctggaatgagaatcagaccttcatttcccggtgaccaagatatcaagtaatttaggggatgaatagtaggtcatttcagctgtgtttcagcagagagggaggatgagcatgggagcttatgtgtgtgcacagtgaaggtgttgcttaggagaagcagaggctgggggaggtttgtatgcctcaacaagatgctgacctttgatctaaacctgtgtgcatttgttatccaatctcgaattcctccctcttaccaacaagttctgctcctgaagatccagcttaagtctaattttctctgtgacaattttctctgacctttctagcctacagggaccaatgcatttctgaattttttatcttggctgtaatttatatgctgtctttgcttttccttgacttcttttccaggctgttagatgttttccaggtactcacatagcatttcctcaaattaaaaaacctgttactctgatcatggtcttgtctctttccttaaatgtgtgaactggtagaaggccaggagtatggcttattcactctggtgcccctgtatcaaccacaatgcccagcatgccacagggcttcaggaaatagttcttaaatgagtggacatggatttcttttgtctttctgactcaagtataaattccttaaaaggctactggtactcacattctcatagtgctccaaggcctgtgcatttattcattcaacacatatttgatgaatgatccttactgtggcttacgaagtcctatgtcacctggctcctaaccatctctctgacatcatcttgtgtaactctttctctgaatcactgaccttcgctagccacattcattttttctcagtttttttagctcttaaagttctttcccatctcagggttttgtagtttctttggctacaatatcttccccttgattttctgtggcttcctctttcttatcattcaggttcagtttgaacttctccttttttgagaatcctgttctgaatacccaatttgaggtatcatccagcctctctccatcacatcttccaatctcagttttctgcatgatatgcctcactttctgataatttccctttttccttcttttattcctctctctcttgctccttccctccctctctcccttccttcttttcttccttccatcctttctttcttacttctaacttgcttatttatttaattgattggctttctctgttaaaatgcaagcttcataataacaagcacctttttggttttgtccactgctgtgtccctactgtctaataaatatgttttgaatgaataaatgaatgaatatgagtctaggagtcagatgaatgttgggaatagacaggaaagaattcagacaaagttattgtctttgagtattttacaatttcttgctgaatgaacaatcaatgtgtaaatgataaagcaaaatgaacgaaaacaaaataaacaaacaaaaacaaccaacgaaccaatcaaacagcaaaacaaaacagactggattgcgtgtagcccatctgatgtacttaagcctcagctttctgtgcaaaataggaataataatacatagtttgcaggtttgccatgaggattaactgaggcagtgaatgggcagcagcatatcattcctagaatatcatacctggaattcagcaggtgctgaattcccagaatggtattcttgactcccctgcctcatctcccttctgatatgtgaaataaagtaattaagaagctcatattggtctcccatctgaaccacttcagagaattgaactccaattccaagtatgactcctagatttaaatcccattatgaaaatctctctatcccaagttctccagagtgttaacagtggaggtggaactgatgatagttcatttgtgtggcatgcactttgattctttcagagcctttgtgtgacctgtgaagtcttgttagttgctgttccaccgcaatgtggtggggaactatgtgataattggctaaaagccactgaaaaagcataaagtgtctggaaatgctatagacagggctggtcttctgcagaggtgcagttgacaacggctggcgtttcctgaaacaccaccattgatgagtcagtcctttaggttatatcattgctagataaaacaaaacaaaacacactttagtagtgatttgcatgttcatacaagtttgctaaatagcagtgtttagttctagacctttaaatagatcttgttcagccctgacattcaagacaattgaaatattctgtgagcagaactgtgaccacaactataataaggttaagtgaatccatatttggggatagttctttctgaggctggctggttgtgtctagtgaagaggacccacaaaagccctggagaaggggcaagtttagccactggaaggggcaaggtcaagggcagttacacaacagaactcccagagttaactcatatcttttcctactgttcctaatctatttccctcccccctccacgtacacggatgtgccctttaaatatttatttgcccacctttgcagtgtgcggtagactttgtctcacaagtcagcttgatccctttgaaggtgtttactaattaaatcaggctgggaggttaggaaagttcagatatatttatcctgtataaagtagtccctggacccaggacccctaaacagccctagggaggtcagctacagtttccctgcttactttctttgttggaggaagtcctaatcattgcccaattaagctgaataacgctgcttctttttctaccattggctcctggcacaattctaagacagacatcggaatggctggagccagaaagctaaatgctcttaacaagtatgtttatgggccagtttcccacacagccgtatgaaattctcactcagtaacacagcatctgagccacagacactgactcaaatacaatattggcttggaaggaagagtgctgctgtagcacaggtcatttccctctaatattttaaaatagtatttgtttcagaagaatctgtgcacattcatggatgtatgtgtctgagtgtatatgagtagtgcctgtgtgtatgtgtttgtatatatcttcagctaagagagctttctgaagaggcgaaacacaaagtgagtgggagatctctgttgtattgggtcttagggcagcctctgcctcaatacaactccattgtattaagttcaggcttatttgattcccttcatccactttgttcattttcactggtctgatagagagtgagaaatagctgatcatgattacatgaaatgtctggttttggtctcagggaatccccttagagattcttgtcttaaaggtctcatctagttccaacagcaaggccaaccacttcccatttctggagcagtggcatgaagcacttgggggtgcctgaaagcacactgagaatcatgcagttagcactgtgacaaagctgtgggtgcccatgggcttttctaggcatggccttcctctcatggacagagtctggagcattctgctttctgcatctatgggtcatcagtcacagggctgccatgtccataatccacagtctcttgctatttttaccatgaaactgggagcaccttaaccctgtagactcaatccctagctctgtgcccattaacacagaataaatagctagtagtggtgtttctggtttaaagggcctgcactttttaaggttttgatgaatactccctaattattctacaaaaagactttaccaagttcaagtttctttcccaataatctatggcaataatttcaatctccctcttccctttttttttttaacttctaggtaaacataagaaaggaaaacttttgtacggtgaacttgggctaaaaagaa

SEQ ID NO: 51491 - DNA, 1743 bp, Homo sapiens
tgttcagaatccagttgcttcttaccacctctgctgccatcctcctttgcccaaacacttcttgtctcttgtctgtattgttggaatatggtgtctctgctttcactcttgtctatccatgctcaaatatatttggacaccgctgggtcaaaattaatttccaagtcttgtactgccgcaggacttctcagaggctttcacatactaaccaatgtactgactctccaagaagtgggtgcagtatacagcatattacacacatttgaccacagggactcttttcttatagtgcatttcacacaactgctgtttcgtggaagacatgctgaaaaacacagaaaatgtttatgaaaatattaatacatcacataaaggattattattattccacaggagtacatgatgggaaatggagccacctacaacagtttcatgaacagggagtcaggtttactgagtcctagctgcagttacctttttctgagctgggtggcattcaacaagttatttaatatctctgggtttcctcatctgtgaaatacagacaataattcctgtcctgtctactttgccaggctattggaagaaacaaataaaattaaaaatgttaaagaaagaacttccccttccctccactacaccaaacacgaactaaacctgacaccattactgtgctagtgtggacacttagaaaatcattagtattttcagttacacgatctctgcacttaatcaatgagcaacaaattaacatttggtttatttatttaagcaaccaggagtaaaacccaaagagttgctggctgttggctggaaatcaaacaaaacaaagaattaattggagctaaggctgtggaaagtgccagtctgtgacatgcatggaagaaagcaaggaaagcctggagtgacctggattgcatagcagaaagaaaaatccctgcaggggcagtgtgaaaagactagggaggtaagagaacctgaaaatacagcactgtaggtagaaggctgtaaagctggaatgatgctaacaaatactgtattattaccttagctgatagcggtgacatagtggcccacacagaatcattgaatagcatcgggtgtggtaattcagggagagccagtggggcaatgtagaaactctaagctggcaaagttctgtggtttttgtaaagtgcctatccagagtacatggttcattcatgccagatcagcaaaagcagctgctgatgtgatgatgatttcccttttgagctaaacctctacagagttccttttttctctagggcttttggctatgactgatgacgtagccttaggctcaggattctaacaccccacaaaagcaaaaattgacaaatgggatctaattaaactcaagaacttctgcacagtaaaataaactattaacagagtaaacagacaacctacagaacaagagaaaatatttgcaaattgtgtatccaacaaatgtctagtatccagtatctataaagaacttaaacaaatttacaagaaaaaaaaacccaaacaacgccattaaaaatgggcaaaggacatgaacagacacttcaaaagaaaacatatatgaggccaacaagcatatgaaaaaagctctatgttactgatcattagagaaatgcaaatcaaagccacaatgagataccaccttacaccagtcagaatggctattaataaaaattttaaaaaatgagagatgatggcaaggttgcagagaaaaga

SEQ ID NO: 51492 - DNA, 4191 bp, Homo sapiens
attctgatgccccagactaacttacactcagtaaatacattttgatgtatttgtgggccaaagctcctaatggagatgatgatgatgctgctgctgctgatgacgatgatgactgtattgataatggtaataaaaaacatagctttcatatggagtcaggttacatgagatacaatactctttcagagggacaaagcaagattcagaggatggtgatggtgaggtctagaggagcaagagacttttgctcaatagtcatatagcagctcagaaaccacactcatggccaggcatggtggctcatgcctgtaatcccagcactctgggagggcaaagcagggcagatcatgaggtcaggggattgagaccattctagctaacatggggaagccctgtctctattaaaaatacaaaaaattatccaggcatggtggcacactcctgtagtcccagctactcaggagtctgaggcaggaggatcgcttgattctcctgggaggcagagcttgcagtgagccgagatcgcaccaccgcactccagactgggcgacagagcgagaatccatctcaaaataaataaataaataaataaataaataaataaacaaacaaacaaataaataaacacactcacctctaacccccttaaatgatggcctgaagttggcattgaaatccccattgaatttaaaaggggaacccaaactccaacaatttactggaggtcacatggcagagagagacagcactggggcaggaagcaaatcttctgtccttccattgtctttgttttatatgatgtgcttctctggccacaacccggtgggaccattaaatcttttgggcactcagtgctgggaaaaaatctcttgctggactctttcatatttgaaatgaatcccaatggataagaagtttcatgttttggggcatttgtaagtgaagatattctaggctgatggcaaagttaagttgtcattcaacctctaagttaatgcttagaagttttacttgatgaaccaacgtatggtcattaaaaactacaaagttttcctcctcaaatgtggcacttaagtgctgtgtgacctgatgtgtccatggttcaattttccagctgtaaagcggggttcataatacttcccaactttgtagggttgttgagagagttacacaaatatgtgtaaggtacctggcattgtacaaatatatgtgagccacattgtcaggcacactcaggctttacgattcttgtttattttgtatctgttatttttgttttcctacaattcaccattctgaatgttaattatctagccctaacagactaacaggtcttggagggcagggagcgtctcattcactgctatatctctagtacctggaggataaaaagtctcagaaaacaatcgttgattgaatgagggaataaataaacatatgaatagctgtttaatgtagccaattaaaaaataggtaaaatattttccattacttgttttcttatttgtgaagagtcataatttcttctgacacagtaaaaaaaaaaaaattaaaaagcaagaggtagataacttcttaaagtcttgtcttttcagtactcatacattgaccaattcaaattaaactactgaaggtgacagagccagtgtttactggtcaaatactctgccattaattatttctatcgtatagaatattccttgattgggtattaaaaaaagaagacagagcctatgctatattctctgttatattctgaacagctaagaactgtgcctgccacccagtaagcactcaatatttatttaaatgaataaagatattactgctaagtgttctttcattttgttataagctcatttataaggtagtttaaatccaaaacactttttccacctatccctggaccttaacattgagcctctagtgtcacaggcaagaacccaatagaattaaaaggtttttgtttgcacaaagttatttgccaggattactaagcaaacaggagaaatggaacaaaaatgataaaaacaatttgtggtgctttcctgtgggatttttggaggtttttcaaagcatgactagtgagtaatgtaattgacttttggaggagaaggggaagaaaaatgggcacatgattatggactttgtctcctgtgagctttgtggctgtatccagcctttgcaaaacatcacttttttggaatggcctgtagctaggtacataggccaatggcattcactggaaacacagggaacttggtcttcctcagaaatgagggttcattacataacagaatccaggtggcagcacagtcaagggacagggagcagtggctgaactcaggtgatcagtcgtggcaccttaattgcctggatcagtaatggacacaaatatttaggtagctgttggatttctcacaagtagaaggaccatagctcacaaaacaggctgacagctcattcagtttgaggtgaacattattgttcccattgaacagacgaggaacctgaaccctggaaattatattgaacttgcttgaggttactccactagtttacccaggtccaaattttgagttttcagtattgtgtcatgagctctttccttacagaaaaaaactaaatatcctcaaggttgtttagccactagcccagatattgacaatgagtcattctctaattactggtttactctgaagctggttgtgcagtgcagcctagtgaggggatgcaggatagttgatcccaggggctttaaaacccctggaattttaacaactcacaaatattgagcacttgctaagagcaaggtagaacactgaaggctctatgtgcaggaactcccccagtcattgcaataactttttgagatatgcattgttatcatctccatttaatgttgattgagactgaggctcagagaaattgacctgcccaagtttgctcagctagaaagtagaagagctgagcagtgacttcaggtaggttgaccaattcatcctggctgtgcagttcttagaatggtgttaggaccagcagtatcggcatcgatgggtaaattgttacagatgcaaattcttggttccactccagacctactaaatcagaaactctggcagtggagcccagaaatctgagttttaacagttttcctataggtcttgttgcatactcaagtttgagaacttctggaccatattaaatcactgtgctttcagggaagaaaggacttacacagagcactgagcataccagcggagcttagagccttgggaagatgttcttccaaaagatgctattattttgggcttctggaccacaactgagggagtagagtggaagcagaatctcttaagaaagaatatgtgatgggaggagatggtagaaagaggtgacatcacagccaccttctgagaatatgatgtgtttatagaacaggtgttgattatccactagactcactgaggtcaagtgacttggccaaggttgggtaatcagtgacaaatgaatggactcaaacccagtcccctggctcctcagagagtatgttaaagctacatttcctcactagagtagggtgaggcatagaggttcagtgagcctctgaatcatgagaacctctcctcagtaactgtcacaacttctgactagatgagctagaatcaaaagaagaattaaaaagatagtaatttggtggtcccaggagggagggaagactaagggaagaattcagagagaggcactaaggaggcgaggatgtcttcaaggtaccactctggaacccatgactgtctccttatcttgatcatcattgtcaccatttattgggttgcacatgctctagtatgttaccaaccagaaaatgcaacacaggcgaccttgagtttaattcccaactttgccagtgaccccaagcaggttattgagcttctctgagattatttcttcatgtacaaaatgaagatcatgagagttccaacctcatgggatttgagggaagttttaaaagaaagaatgtatgtaaaacccctagtagattgtctagctcataataggtgctaaataaacattcactatgttgttgttattatcttatccaaaggctggttcacaggacaaggcagccatggacataaaaggatgcctcagtgagtgaggatgatgatttagctgtttgtgggcacataa

SEQ ID NO: 51493 - DNA, 1418 bp, Homo sapiens
ggccccctggggcagcctactacaccttcccctaaatgaagagtgagtcacagcctcagggaggcttaattattctacctaaaatttcagtgccttaatctcataccccttctaccctgccttatttttatccatggtattttcagtagtaatttattatagtaatatggactcacctactttatagtgatttctctattatgtttctggaactgctctagaaccctgtccaaactacttgaggacagagatttgttttgctcataactttgcctagtttctagaacagggcttggcatggactaaactgtttataaatatatttttagttaagtgcaataatgaaattaataaatataatacagattgaggacttactttatgggaagcactcaagttccaaacactttcagtaactaataaaatcttcacaactgtcaggagaccctagtattaattatctccattttacagatggagaaactgaggcacagaaagtttaattatctggctaagaccttgcagctaagaagtactgtattaaggatcagagccaggcaagtggattcctactccaaactgctaagtcctactccctttcttagcaggtcctcactaaaggctagtcatcccttccctacctacattcctttcttccttgtcacctagaatctgtgcatagtcatcacatatttggatgctccagatatcttggtcgaatctttgctgttttacagattcagtccaaaggtgagagcttggctcaaactcctacctcctcttgcctttttctcaatactagcacctcagaacttgatcgattcatataacttgtttttgtttgtttctttctttttacaaagccattgacaagttatgatgctgttaggtttatggtgctgtttttcaggcatcatcttatttaatcagctcatcttcccaggcatatgtgcagtgcaagaatggctacctgaattttatagatgaggaaacagagattctaagaagctatttggaagtaaagttactaattctaagtcccatgcttgttctatttttctctttacttttccttcttgggggctagataataagaattaagcctggaatttttcggctttccagatttagtgaaagtcacatggaacatcggtaagcatttcacatttgcttttccctatttgacaaatgaggaatctgaggcacaatgaggttacatgatttccccagatcatagggtgatgtcgctgcagctgggatattagtttcaaagctcatgtgcttttcaccaacttacctgcttcttctaagttagcagttctgaggtctgcttgaaagccccatctatctttccttgagcaatgtaatagggttcatgtttaacattttagaaataatgctaattaaaagtttaaaat

SEQ ID NO: 51494 - DNA, 1474 bp, Homo sapiens
caaggccagtgtggcttgatatccggctgattggcagaccattcacatgtctgttggtaaaccactcactacctcagttttcccaaactgtaaaacgaagtgatagtgcctacctcatcaggttgttataaggatgaaaaataggttagcaaaacatctgaggcttagtaagactacagtgtcaggaaataatagaagccagatttcgaatctatcagcatttacggtagcatgcaggcatacatggctgtttcttcattttagttcagccgacatctgcaaggagcctcctgtgctcctgtacaggagactgtactaggctagtctctgaggacataaatatggtgaagattctgtcctcacgaggacagatgtgaatttacatctagtatttatacagtacgtgtatccttggagaaaccacagcccatataatgtaaagggctcacatgcagccccagagctagttatttccagaattcatatccaaggcttctgataatactttttccactgaccgacaactcttattttaagaaaggagcagggcctgttatatcattctgaacaaaggctctgcttaagcccagctacccagagaccagagcagagtggattattgaatataacaaaccaaataaaagctaactgaaggccaaaatgtgatcacattgggaaatggagccactgctttcttgggctgagcttcttgtctgctggctccgggaacacctagtcacctcctcctcacccaggcactgcaaacaggtcattttgatgatctaagagatgagcctttggtgatgtcagtctctccctaggcacaaggcccataatcacatgcacttgatcttcactccctatgtccctggatctcagcataggaatgactcagcaagggtgagcctttggccctcctccagagaagggtctgcattgcctccgtgaaaatgttactggctgcatcccctggcccacccaggcgtataaagttatgcctttcagccaatttagaccctatttaaaatttacctgcactgtagagacaggacagaaatttactgtgtgtgtttccttcagagaactaggatgaggatttgctaactttgcccctgtggatttacttattttccactaaatttcactatgaggatattcaaacatagagaaaagtagaaagtagtcgtatacctactaacaaaattatgtcattatccttttactgtaacttgcatcatcacatatttattgattggtctatccattggtctatccatccatcaacctatctaatttcataaataaaatgtaaagtaagctacagtatcagtatatgttcttcttaatacttcagcattttaatcattatctagagtttaatatttttatatccatttttccttttgaacatgcaatgcaatgtacaaatgtataaatcttaaatctaaaggtaagttttgaaaaatgcgtatgc

SEQ ID NO: 51495 - DNA, 1995 bp, Homo sapiens
tctatggaagaaggaagagagggggaagcaatatttttatgtggttgagaataggggctttggaactagccagttggattagagtccctgctatgtggctttctagcctcagatttttcatctatataatgggatgatacttacaatagctacaatcatatatagctcctaggtttgtggtgctaagtacttaacctatgttatttcatcaagtcttacaaacaccttgtgaggggtgaacataccaaggtaagactggatgagaatagcaaagtgcctggttcataaaagaggcccaatgtcaattagtttcatctccttctcccttcctccatttactagacactgaggtgcagacaggttctggaccaaactgctgactggctgggctgggcttccaagttcatcagctgagtcccaaatccacgccatttccacatggcccttgagtttccatcagagacaagtggggaagttatctttgcatgtgtatgaacccctctgtttcttagctagaagccatcttcatttagctgtctggaggccttgcagaacgagtcagtcacatgcctgctccagggccattttccaggtgacagagacaaatgccatacttggccaggatataaagatcctcctggaccagcagcccctatcaatgtactttgccgttttgtctatgaaggagccagcatttctgaccagtagcttctttatgggcagtggctagctgtgcaattggtttgaggtctcactgaagctactttgcctctttttaaatagccaatgttagggcattgctgaaaagccagagctgagtcaccttcaatgcaagcttcttttgtgtctgcagcttcttgccagagaggctctatctgattttctgatgcaagaagctgcaagcttctttctctgccacaatgtcatcctgttggctggctccatccataaagttcaacaaaccagttcaacctggagagagagagggagagagaagatttagactctaggctgaaacctgagtcctccaggtaatggcaaacaactgccatgactaggcagagtgagaaagtctcatttgtaatctgccttcctgccttctcatcttgcagctactattcatttttgagctggaagactttacctcaagcaagagttttgactccctgccttaagcctttgtttctgcatctgtaaattgatgactatgattgcttaactcacaagatagttgggggactaaattatctaacagaaaaaaggaactctcccgggcccctgactgacacctcagactgtgctgggctcttgtgttgaatgctttcattggccactacattctccctccttaaaacccttcatccaaattatgcaattcattctgcttcttgctttatatctgtcatcctttctaaaacatccttccattagactggaagctgttttactttttcaccagtgaatagggtaacaaagaaggtctaggtaatgccctgtccctgtcactgtcaatccacgaaagaggcagatgttccaaggcacagcccaaattcagggtgataatttcagtgccagagggaagcaggacattatggaagaagtgcttagatggtcagggaaggctttatcaataaggtgaagaacaggagatctaattgtgttggggctacgtcaggctcactcactgctctatgtgggctatctagctgagaacctggcagccatttgggggtgcaataaatatttgttgaatgattaagctacaaattatttaaacaaacttctaactggtttccaccagtcccctgcatacagctttgcccctctcgaaaccatacatctcagaggtgatagagcaatctttataaagcaaacatccagcatttccttcctttccttaagccctgctattctctctagagtcaaggaatcatgtagctccccattctcactcactggtctttactctttgaatttcacttcttgtcttcttgg

SEQ ID NO: 51496 - DNA, 753 bp, Homo sapiens
tttcatttcctaattgccagtcacatatttgtcttccctcaaaaagatggcacattccagaggggcatggtatacgtaggaatggtagtcaggtagataggagtggaggagggaggcaggaaccataatgatgagtgtgcccttgtgagggtgaatgaatgctctgggtgagaggactggaaagatggttggacaagtttgcatcagaaatggtggcatttttaatccagggcaaatgcagggcactctacatctgtcaggtcacctgcagcagcagcaactgagactgagtcccgaaatagactgcacagcaggcgaaagtgtgtgtgccagtgctcccttcgccgaatactggcacatggcccagcatcaggcacatatccaaattaggcttgaattccctccgtaagcaaacagcaggacaaggaacacaagtgcttgctaagtttgagtggatcaatgctttttgtgctagagatggcctaaagcagctctaggattcagccaggtccccttgctgaatcagctgggggctcagtggtagtgctgcatgtgtgtgactggagttctgcctctgactttagagaactgtttatttatatcccctaatatccatctggattctggatagtttgaagtataaaatagaagtgaagggcatggtagaaagagcccaggctttgcattttgatggaggtgggtttttccttctgagtaaccatgacgaagccacttaactttctgagactcagt

SEQ ID NO: 51497 - DNA, 1201 bp, Homo sapiens
gacatctattgtagcacttaagaggcattgtcttttttgtttaaatgtcttgctctcttgcagaactctgaaattctgaaagacaaagtctgtaccttacttgtctccgtaacttcaatgcataaggcggtgcctgattcgtaagaggtgatcaataagtgtattttaagcaaatgaatggataaatgaatgaaccacatcaaaataacctctctgacataaaagtttagtcccttgagagtaacatatcatagctcttttagcaaaagtcatagggtttcaaaactggaagagatcttggaaaccatctgttccaaacccataatttagctttggagcacatattaggatggattggactctcttggtcagcacagaatgaattgcctattatgctttgattcagaaagaaaacaggagagccaggacataagacagggaaaggcagggagaagccaaggcaaaattaaacatttactaagaggcttatctgcctaggggaaatgatcacacattgtcctaatgacctccctgctgaatactacatgcccctccttgtctcctgatttgttttccctacccttctctgtaagttttttccatggcacttattaacttctaacatgccatatcgtctcattattgatcatgcccatcgtttatcttctgactcccaattcaatgctcccttcactacaagcatttatgcctaactggttcattacattcatggcaagggctgagtttttgcaggctgtatagcatgatgttttaaagcagtgctcatcaaaccatctctactgaaggactcatgtttaaatttctaatcgcccatgggcaatgtcatcccactgtgcatgactaacatttggcctacaccacatccagaatggccctataccatgttcactgagatgaatctagtggtcacactctggatgccaggataattgcaaattgctataaaattttctagtgcttattctaagcttctatattatcccatcacatattgctaacaggtcatgggaccagcaccagtcctcatgtcacactttgaggatcaactaatttataagatggacttcagagtccattggtctgggtttgaattctagctctactttttcctagcagtgtggctttgaactcattttcttaacattctggctctcaatttcttcttctgcaaagtgggaat

SEQ ID NO: 51498 - DNA, 2771 bp, Homo sapiens
taacaaacataatagatcatctcagcttcctgacaaccatcagtgtgggctaatttgttactggaaatctaagggaaactagattaactgtgggatgttgttttcaattttacagatctcagagatgaaaggcaacctgtatgtcatcttaccatactgccttctttaacccaggaggaaatatggacctaagagatgaggcaccttggtcccagggcatccgttgaaaatttttatgtgcttttttcgtaatacaacatggcctctctaattattaactctggacaagcattctattatccaattgatttattgagtgcttactatgtgcttagctatgtttttgggacaaattctgggaaaaaaatgaattatgtaggcaataaagaactgtttattgacacatactacctcttttaatcctcataatggcactgtgagtctgaggtcattatccctattacaaatgaggaaagcaaaacttgcgtatagtcttatgggctgattgatggcggagctgtgattccaattctagctgtctgatgcacatttaggattatcaccctataccatgttgtctttctcaacccagatttttttcctccctcttcaactcttgcaccaccttccacacttaattccacaggccttgttctcatctggctctcagagatgtacaacgacctggtagcctgcaaagcccccaacctcgagaatctaatatgctagggctccacagactgaagaccataaacaaatatatatctgatatttatccatttgatattagcactaagaaggaaaattaagccaagtaaaggagaacagactgactagaagagctagtttggatagggttgccagggaaagcccttctgaggggtgacgtttgatcagaggctgaagtccagggatagaggtgggaagtggcaaaggccccagcggttgtcttagataatacaaacacaaagtgagatgcagggaaggggtcagcactgtgtggcagataagggcacctgctctgacatcaatgcccctgggactaaatatctaccaggctctttagtggctgtctgacgaagaaggttacccaaattccctggatctcagttcactcatctctgaaacggggctaaaaatagtactcacgtctagggtcatgtgacgattaacggcaaacagtgtgtagcacacaacaaataacaaatatcagctgggttttttcccctctccttcatcattaaatgctatagctttcattcttttaacttaatataattgccctagattctttctatacttaaaaaaatggaagtggaatattttcatatttttaaaaaataaaatatgaggaaatctgatatgataaaatcaataaatgagaagccattctggtttactcagtggagtagcaggcaggtttgctctctgctcagctccacccacagccccacagtgattctgaagaggccctgcgcttcagagagcacagctaatactattcctattaggcagagctcctaacataatgactggtatgaaataggggccgaacatttcattgttgaaagaacgttgaaaattacaaagtagaacctctttctttttttttttttacatttttttgagaaaagagattactaggccacaccacacagagcgatccttcttgaggtgaatgtcgggggttgtttatgaagctcaggcttagtcacaagttcagaacattttgtgggttttactggaactcaatatcattgctcatcccaactcagatcaccctggcaaaggctactagtgacccctggattcccaggttccacaagagaattgggagtcctgctctttttcagccttaaggaagtcccctggggtttctgcatctccaagagccagagctgcagagctgaaagggtcagatacgtgtggcagcctgtgtctaataccctctatggatacctttccacattttggagtctagagagccttctactttgaatttctggaaatatatccatcacctggaggtcaacaagttatgtttttgttcctttcgtgtgtcttacttgtatgctgctgtgaattcgggtgtggttagcccaaatatgggtctgttgttgagggtttgttggtctcttgtctgtttacttcaattcacctcaccgcagcacttaccaaaaccctatttcctcagagtcctgaacctcaccctgttcagggaaagacacttatatttgttgcatactctactatgtgttagccagaggataggcactttcacctatagaaacttgtttaatcctctcaacagtcctaaatgacacccaaagacattaaataagtcatccaaggtcacagtgaataagtagagcaatgtcaattcaaaccaaaattaggctcaaaattctcctttttttccaactgcaatgtgctctagtgaggacgtccacctaattaaaaatatatatttgatgtgcagtttaacctaacataaaataatcacattttaatacttgaggtttacttacccaagtgatttttttagacagtataatttcaagttgtgtatatgtgaatgtttgagtgaatgtgcaggaatgtgtgtctatcagtgtgtagggcagagaaaaaaacaaagaaaacaagtaggaaataagggtgacatgcttaggcaagtatgttcttctttctctggccctcagtttctacaagtgtaaaatgaaagttttggatacagcatttccaatgttctctatgtgaaggcagtgact

SEQ ID NO: 51499 - DNA, 4448 bp, Homo sapiens
gccaaaccacatcatggcctgatcttcggactcagaaatgacagtcatcttaccctccgaggagctggctgcaactcaggaaggtgcatccatgaagaggcatgttgggtgaagtaagaaaacaccttgcttggaagggaagatccctgactcaggattctgatttaacactgtctacactttgtaatctgagtgaagtgactaaacctctctcagcttgtgtttctttgagtttaaaaagcaaagagccttcgtgacattgtgtttctgattatttattgtttcttctgttttacctcagaagactggttgacccttgtttaaaaacaaaacaaaaagaaactaacataggaaaggggcctcctggccccttgctatttatgcttgtccaatataagtgttttcctaaagtgcgtaaagtacttgtgaatgccattttttagatatatgctgtcagttctaattgcacagagcagaacattttagccatgagagcttctctgtgtcacaaacctagcatcctgtaaaagcaggcctacaaatgctttcacaaatcaactcatttcagaatcaggtcattggatggttggatatatggttggaaccacttggttccaaactctcctggctctattctttttttgtgtgtgtggaaaacagatctgccaggattcttctgtatgcctcagactagaaacccatctagacatcacacacatctcttaagctgattttaatttcattctgttgtgtggtcccagcttgctggatagaagttcttccagaactatgtagcccaacacactctaggttaatgcagagcctcctccccaccccgctcctgaaatggtgcttctcctgggctctgggcagtagccatccattcacatgacaacccacttttgttttgcaggcacataggtttttcatttattctgtagaacaatcatgcatgtcagacaaggattgacagctccattttatgggtagagaaactgactcagagagcttagataacctgccaaagctgatggtgatactcagaggttaacctaatcagaaagtaattaacctccttctactctaatacatctctacaaataatcccaattcactttcatccttgatgaaaatctgatttctatgaagctttgactaaaacttctttaactttacttcatttcatgatccattccatttatatgcctcggtttcctcatctaataaaaaagcaaaaagtaattaggctgagttacctatgcttggtctgttgaagtagtttgaatttttctgaatcaggatgaatgcaaattgcctcattatttcactaattaataatgtctgcttggaaatgcaactatcagtgcacaataaatgataaagcttataattatagatgagagcaattgcttctttttttgttcttaccttcatttcagtttatcttcctgagctatagctacctctgtaagggttaggaaaacatttaaaatatctaaacagtgattcctttctcaagcgttcggaaattgatgaatcatcttactctgcagcattcaaagtaactgtgtgcttgacacataggaggaaaagtgggctctttgaaatgtgagcagagcaccgatcgtgtcacctgcccggcgcgtgacctgttcactttccacctgaccctctgtgcccaatgtcacctggagcctgaaacctggaagggaaaagtccttgactggagtcagtggagagaaaatcatcacctgcttgggcacaaacatgcctggtgactgcgtcactgtctgttaagtgggatcagctaatagttgcacagcgggccttcaaagcatcacggcagaactgatgaagttcctgtaatgcattccctgtgtgaaggccttggactttagagctcaagtgcgccaggagcattttgagcttgccgacaggctctcccatggattctatttggttatacggcagtggaaaagaattgactttcattttcgtcactctctgcctgagtctctcgactgcagccacacttctgtttcccgtatattgcataggctattccctctacctgggacaccctcccctctggattgcagcaagatttgcttctatgtttcactcagttatctacttacaaatcacctccttagggaccttgcaggctgctctctttctccttacctggcttcattttccttcacagcacctgatactattacacatatttacttagttagtagtccatgctttttcttccccactggaccataagttctctgaaggcaagagccacatttgtgtttttccactgatctgtcctcagtgtctacaatagtactcaacccacaatataaccttgagaaacatttcttaaagaagtgaataaatgaacgagtgaaggagtgatttttttctcattttacaaatgaaacaagtcaaaaacaaagaggggaagtaagctagtccagctctacaaccatttagtggcacagctagtattaacattttgatttcctaactcacaatctaggattttattttcgttttattccatacaacactgttctccagaaatttggcaactcagacggcacttgacttttcacaaacacatttcttgctgtctttaacctgttcatgtcaatgagaatgactataacctcatgagagacaagtgtttactagttaagttcttactgaagtgattggtcttagaactccctttcaagggcaaagacgattgaaaattagttatacaattacatttttaaaacatttttgagtataatgattttaagcatttgttgtataaaggtggatatgcataaagaacaggtaaaaataataatcattataatcatatatagaagtcgtcttggtacattttaaacatatttaacaattggaatcctgctgtatgccgagttttctatctctgtttatacacattatattttaaacatttttctaatgtcactaaaactaacattgttttagggatagtatttcaatatataagtgtgtcacaatttcacagttttagttgatcattttcctcttatttatcattaagattgtttccactttttatttattgggtttctaggttttagtccttcatatttctgggttcagttattctataaacattttcaaaactatgcagaaaataaattgtccaagtttgtacttaaagtgctacaaataatctaaaaaaaaaatcagggtttcaagctcaaagcttctcttcaaatcaataactgttgaagatttcacttatttgcatttttagtctttgaggtttagagtggagggtggggatccgggggcagtgggacaggaaacattgaccaatttgagaacaaatagaggcttggaaaatttgtttacattctgttctatgtgtgattctggcctttgtaacaaggaggataaaaagccagaactcactttggtggcgcctgcagacctctgcactgtaatgacacgagtgcaagctgcactgggtgcaagtcagcatgactcagccaccctccccacggggtgagaggaagcagtggtggaaggccagcacttgttcctacctccgcatgtacagtggtgaagagaaggctcacaaagggtttctcaatctgagaaggaaccctgtattcagagtgcagcttaacccaatgggatattccagctataattctaataagggtgatggtcccactacatacctagcatatttatgaatctcaaattgatgccacctcttgtaccttgcacaagtaataatcactgccattgatctggcacctcctacgtgacagcttactaacctaggcactttcagctggtcaactaatttaattctcaaaacaagtttgccaggcaagtattattggctgcattttccagataaagacattgaagtttctaatgaacttcaggtaaagtttattccagataaacttcactgaggttcatgctgtccaaagtcacacagcgctgggatttaatactggtctatttgtcttcaaagcctatgcattactgcacacctatgaggttctgcagagaaaaggttcctccttctgctcagtacctgcaattctagggacagttgtcatggaaaaaactgtattagaataatctattgatcaataatctcattgactagctatttaatgagcacttactttgtgccaggctctctactagtttccactgacagagttgaatagaacacatttctgatcataaaacgggaggagggcgagattcgaagggcaggattgtgagatacataagcctccactctcaggacatagaatactctattcaccacagggattagctcgtcacagaaactcaataatatttgtggaagaagacaaagatcaaaggatgggtgataaattataaggcgcttaaaacttagtctaaatacttggaatcta

SEQ ID NO: 51500 - DNA, 3409 bp, Homo sapiens
gctcattttttacttggtaattttctaatttttccctctcagcatgtaagtttcatgaaaatgagatcttgtttcttgtatttatcacttcattctcatttcctatgtaagtctgggatctagtaggtggtcaatacatattgctggatggtcagatgaatgaatgagtttataaatgagttatacgtctcagtttccagagggttctccttttactctctttcagcaatgaagcttgttggttttgatgcttctaagaaactagattagcctaattcaaccccagtttaacattttttaaatgtcagctctcctttcctctattaacactaaattatttttattctttatgatctcatcttacagggcagtccactatagatagtaatagaatctcccaagtttcatcttggatagaacaaaagattcagaagtcaacatgctgttagtatattttatttgtttcaaactggtgggaaacttagcttgtctttattaagtatttgtaattgtagatactttgttcatattgtactgctgacaagtatgctctgaagccagaactatagtttttcatgtctgtggagttctcagcaagtggtgtcatgctaattactttgtcttctgtaagcccaaaatattaatggataataggttaaggatcccagcggaaaaatactggcaagacttcttacctattatgacatttttatttagctcggtctttattttccaatctactttctttagagttacttcatgtaagagtttattattcatagtaagaacattttttttttcctgtggcagagagagtagtctagagagttcagttgatgcaagggcaaattcaaaagcaatccaagtagactctggcctctgtgtagagccaaatccatcaaacagaggagatgagacagcaaaatgtactctttcattagtttctacccacagagagtggtttttaaggggggagggaacacttggttgctttataaaagtgtcttcttgtctctccaggatttcctgttgccttgaggaaaatttgtttgtttgcagattaggtctattcttgttttaatttgatagaaattttaaagtaggtgtttttaaaaaatcctttttagagacctcatttacttacacattcacaaggctggactccaaggccttcaaagagcaaaaagtacacttaattattattcagagtttatatagctcctagcatagtttccagcatatagtaagggctctctaagtgtttgtaagtgaaagaatggatgaatcaatgtgtgaataagtaaataaagtaaattagtaaatatttttcctacctgaatattgataataagaaattaataattctatttgcataattatttgaatgtatctcaactccctgtctcaatctaagaaaattctagagttccctgtagattcccttgaggcctctgttgcaactgcatcatggttcaccttttattgcctaatcctgcttccagcttttccttacaggtgtggttcccaaatgcagttcccaataaatatcccgcatgcaaaactctcctgcagagtctgtttgcaggaaatccaacctaaggcatcattctgagactcaattttctgtttttaaaatatgaaagatcccatttatcctataagactgttacgaggatttaaataaactgtagaaaagaaatgccattttgggccttcaataagtgttaatttccttttctttttcctcaaattgtgtccacatatgaaatcctttgctgccacaaaataagtggtcagcacatacttgtagcatgagtaaaaagtataaatgttcccacgtgtccttttattaacctgtggggtgatatcatgagtaaaggtcaagatgctcaaaggccaagccatctcatgtggattctgtaaatgaaacctgaacgtttgcatttaatatcatttgcttgcaacaagtttgagtttctccctttcttaaaggtaaagaaaactccaaaatcaaactaggctcttttttcccccttttatcaggggaagaggggctttctccttttattgggagctcagaattgcctttctccttttattgggggctcagaatagctttgaccaacaaagaaactaggttgcctgccctagtagtggttgtgaaggttcttctaagagtcatttggtgactctttttcacctgcaatcttaaacctgacatttacgtctgcctccaaagaaaagccactggggtcttaggcagaagcccagccagctctctccatgtatccaaacatcttctcttcttttgagagaatgctgaacatatttattgagctttcattgcatgttaggcagcagtttttacaggcagcaattaaccctgtatgttctatatattagggtggactttaggcatcaaggtgcaggttcatgcctcagtttccctccctgtaatgtggaggtacatactctttggtgacggagaagtagaatattttgtttaaatacagtgtagatatgtattcactcaaatacacaacccacttttaatggactcttgataccaggaatagaagaataagaacagttagatctagcgtttactgagattctttcatgtgccagggccttatatttggtattagtcagctgttgttgcaataatgctgcataaaaggaaacaaactcaaacaaaaggcttatgatcaacaataatttgttctaggggtcatggggttgcactaccacttagctgattgaggctgagcttgggggggggctttgcttcaagctgtaggtttgctgggctttgctccaagagtatgctcagtacatatttgctttttgtatgtttgtttgggggccagggatgaaaaggccaaagctacctgaaacactctcctccgagggaaaacacaccccctacactgtgattctatggtgtttcttgctcttctccatcataatctgcctataattacatagcaggtgtttgtttaccagagcttttgagggacaataagtccttttacctgagcttttgagaagcaattcactcatttctgaatccaatacttcagaaatttcatggcacacagaaggagctcaataaatgtttttgagttaacagatgcataagtgaataaaatctttatagatctgtactaataccttctaaaagggttgtgctaaaatgatgaatggttgagttacaatttgtaattaggacaagcttgacctgcttgggcagtcactgaatcttttgaagtcgacatcatggaacacaagtgacaaatgatcctttcatgtcagcattggtgctgtacaccgggtagaatgaaccactgatctgacctcgtgggtttcttttttgtatttattcatgggaacatgattaagtaattga

SEQ ID NO: 51501 - DNA, 1397 bp, Homo sapiens
gtgtacccccaaatctaaaatttaaaaaaagataaaagtatgagtttatacttagattctgtcatttagtagttgtgtaaatttaagcaagttacaagacctatctaagcctcagttttaccatccagaaaacggggatgatgataataacttacctcatagagctgtcaagggaattaaatgagataatgcacataaagtgcttggcactgtcgtgttcttatactccaatacataaacttattattattattgttattactctagcgtcctttcttactgtctctcctaatctcatctctttttacacatacatactctcatctactctgaggctcactcagattttcaaatatttttgaaggtgttattatgcagtggactgagtgagtgaacacacaggctatatgcaaactacctctggaattcattccacccctatctttgcatttcaatcagattcacatttcaaaggcccaagccatgtctgacaattctcctggcaatagctacaatgaaaacttgaacatagcctctaagcctttctaaaagcaagatttcccagttatcataattaaccatatttcagaatatacagagtgctatcagtgagcagtatcaaaccttcagaatcatcagcataaaactaggttgagttgcatgggagagaactctgaacctgattctatcacttcctgtctaaaagtgaatcaaccataccagagtggtgactgccccagtgtttgggtgtaacaatgtgtcaacaacttctaggaatagaatttatgtttcaactgcagggcaagatttagtgaagtataagcttgaagttttgatatgcagatttaaacacagagagcagaagaccagataatggaggataaaagagaaataaggaggaagaaagggaggagtgagaaacagagagacttagatggttgtcatgcaaatacttggtattgcaagactcttttctaagtatttgctatctgttaagaactttcattttcccctgatatctactatatcttttcagcaaaggatattttaaaaaattccaaatgcttaatgaattctcataaaaggtattaaaattaagaaaaaaagattctcagtttttgaagaattatagtaggtccttagaaacttaaatagttggcaagctttcagatattccaaatttacagtaaaaccccagttttctagaaataagtgattctgtggggttaaattttcctataatttagtattcatatgattgaacgttttttccactaatatatctctcctacttcctagctttatgaagctctgatgtatactgtatcacgtacttttaatctttccttgatgcctgaacatgttcatcattatcaccatatagtgaccagggtcaa

SEQ ID NO: 51502 - DNA, 923 bp, Homo sapiens
gggacaagccaagtcagctaggctggccctgtagaaggccctggtcaggtcaccaggaagctaagtactcctagtgatgcaagaaatatactcagaagtatataacccttgggcaggtcaaattttcctattttgcaaacagtatggatccttgagagttggggctgcttgcacccaaagataaagagtggaaggttctgagacacactgactcagcattgactattatgctctattatggactcaagtcacacctctgaggagcccgggtggcattggcagctgcgttttcacccactggtatctttgatttcctgtgtattcctctcgctggttatttgctagttcggtattaaactaaaataaaggtaaaatttcaaaatatgcatctctattccagctatcactgatttgttgcctgttcagaatggcatggccatagttgtggtgttcagctaacactgattctgattaatcattaatcactgcccatgccaaaccaatcaactttcactgctgatcctggccagtcttcaacttgggaacagcctttgtgaatcagcctagctcagcctggctgtgaagttggagcagagaattctggcagagggttccgacatggttggtaggatggatggagaaagtaaagatgggtgcaggggaagtaatggaaataatgtattaggcaaaagccctgcagactgtctctgaattgaaatcttgtacttagacatgcaacagagggggtttcccacctctgccccaaacctcctgggaaattctccaaagcagcccaatcacttggtatttgctccataaccgaggtcagaaagtataaggacaatttttctttcatatgaagctctgtgcatgtgaaaagtaaatttaccttctacttctaaagatctgtagtaggtactgca

SEQ ID NO: 51503 - DNA, 1202 bp, Homo sapiens
tgttataattgctttaattccttttttgctgttcacaaatccataaacatgctgaagggtaagaagtttccttgactccatacacaatctgaaaccctaacacaggtatctttctctgcattacaacagtgggaagtattttgtttttttcctttgctttttgcccaggaatgacaacttttacctgaaataggcttcctcaactcccttagaagccccaaatctccaatcagatgtctcccagggcagtagttcaagttaagaactatcttcctgcagcttttctaaaatcttactaatttactatttcaggcccatttgtctccaaaatttaggagcaggctgcatagttgaatactctgtttcttgcttacttgctttttgctaaatatggatcacttggttagttgttttttgttttttttttaaagctgtgtactttgtatctactaagtaaagtataggagaagagattattcattgcagctttctttttaaaaggaggtgttcctctaaatgttccttggagatataacctatatcttttatctctcatttgaaaatttgagctctgacttggtgacaacttttgagtgattttgtgaaggccatttgaactctcttggccttagcacactcatttttacaatgagagtcaggtgaggtgctctcttaagttttatttcagctgtaacattggtgattctattgtttgaaatcaaggatcatttcttataaatttctatgaaagctgcaatatgctctgcaacagtcctcagccagcacaaactcgatacaaataagtatgaatttgtaggcttacaaaatctcagagttcaaagggactgtcaaggtcgtagagctcatcccctgtggtgatacctgaataccttctacaacatctccaccatgtggccaatgagtccacaggtgaacacctctaccagaccccactacctcccaagtcaaccagtatttttctgtggctattacaaagttcttttctccagttgttccaaattctgctgcatgcatttttcattagtaggtctgaattctgccacttattacttcattaaaaataataattctttttttttacataaaaattatttacatatttgaaaacaatgacacaaatagtcttgtctccaggacaaataattcgtttctttgaaaataataattcttttttttacata

SEQ ID NO: 51504 - DNA, 763 bp, Homo sapiens
tgtgtttctgtgaaagagattaatgaggagctcttcattagattcactagataaaggtgtctttaaggtctctttgcctctcttccgcctctagcttcctgagtcactcacatcctctgtttttatttcctccttcatcattttggttggaggaagtggtcagaagtatgacagaggggtcaagaaggtgcattaacattctatctttatcttcttaaccctaatccagctcatgtactcataattccgttgtaaaacagaagcctgggtatatgcatggctagattcaccaatcatgttagttgttaaagaaactctcaaaataggaaacagaccaacaaaaattaggcctgggagaagaaggagaatatgaggtactagaagttcttggaaacatgaaaaagaggctttttggatgtcagcagggtttctctggacttggaatcatccctctgctgtgtatgacattgcaaaatgcagtaagagtttcacaatcaccgtgtggtttgctgtgaagtcactggcggcctctactcccgaaatcacttcccaataaacactttgatcctctatgatatcagtctcttgagccactaattgcttccaagtgaattttggcttgccaagagtctgggtggtgtctcccatctgatacagttctttgcacttacatatttgtttgcttccaaattcctctgaacagtttatgaacagaaatcctcccaacacacccgagctgaaagatatgcaattgtcttgaaaa

SEQ ID NO: 51505 - DNA, 958 bp, Homo sapiens
gccctcttgccacgtggtgccctccaccatatcatgacacagcaagaagtttgtcccctgatggggccccttgaccttggacttcccagcctccagaattataagaaaaaaattttttttaaaataaattacccagtctctggtattctgctattgtaacacaaacagactgacacatttcctttgctgaagccctgctctgcagtgtggaagacactgtgttttgcctctggatgctaggggcaggcagcatgttttttgctgcaaagacacagaataaattatttattgcctttcttcagaaaaattcatgagatgggcctatgtgtttagcagatgggcatctggacaaatgaaggaagatagtcaccttttgttagtaaattaaaatagggaaaatggagcaaaaggtgtagagaatcctccttccttgtttcctaagtctagaaatcccccaccccaacccccccatttattttacttatctgagaaagatttgtactttggagctagtggatctgcttggcaggtaatgggctgcccatccaccagctgctgccttggcaaaaggcacatcactattgccatggcaacccacaggcaggcaaagggcgcacagccctggctggaggccaaggtaatccagtggcactgggctttgttaatagaaagagaaaagcaggccagagccgcttccttctgcctttgccagtagaggctggacaggagcagagtgcagagctaattaaccggccagaccagctgttggctgccgcttgccaaatccgacaagtggcccagggttcctctattcctaacccttgtcatcttccagggaggctgcgcccgggggaaacaagagccttttctcggtgatgtcatctgagtatttgtagaatttcctttttgtgggaaaattatctggcaaagtataaagggatttgatttctctcagaag

SEQ ID NO: 51506 - DNA, 922 bp, Homo sapiens
gaaaaatgcggtcatcatttcatttaattcaacaattagtgtattcaagtatattcaatttagaatatttgagggccactgagtgatgacaagcactagaggtgcagaagtgaaagacattgccccttattgtgtagttttgtggcactatctaatacggtgcttcctaaccaatgtgttgggacacatgggacagctgtgccaagatgttgatccacttagtactcagggaggctggatagggctgagctggccagagcccaaggatagtgaactctgcagagagcaacctcttctatttgtcctagtgtactgaacaaatagcagctcttccatgactgccatactgtgacaaaggttaggaagaactttactaagattattggcatgtccagggttattggccccaaccttgaataacccaactttcatgcttttgaaatcttatgtctactttttatagtttttatgtttctgtttccttccagttaattgccacatcttgctatcatgagtgttcttcccttcttggtggctgtttctagtcttctcttagacaaaaacacaaagcagtgaagcaaagaactcattacactcaacaaacacttcctgagcacctactatatgttaggcactccatgttcttgcagaagaagggaaagtgtaggtggagaaggtacacagttacattttttagtgagaacacaacctaaaattataaataaaatataggtcactaggccctagaagagtaataacaaggcccccaaattctagggctaatatttgagactattgcaaagtgcttcatgagttttaaagcaaagcccaattagaaggttccaaaatccgagctgaggagtaagctttactcgtgcatatataagcagaccacagaagcacagagcacacaaattctgaa

SEQ ID NO: 51507 - DNA, 687 bp, Homo sapiens
cctcttaccctaaaagtctccttattcactcccagcccgcctcactcgttcatcattgcaggaaaatgtgccaaagatcaaaaacaggtgagatccgaccccagggacagagcaaagaagtaactggactgtaggcaccagctggtcctgttctgccctgccctcgtagaactgtgaacagctaagaagtgctgttcctttaaactttgcccctttgtggctcacagatgagtagattcaggcagcagctgtcagctctgcaggcagcagagaatctttccagagcagcattcccagcagtgtcaggatgggaggatgaaattaggtgagccaagcaacctgaaagtcctcattcaaaagcctctactgccatctactgcctctctgaagaactcattggcaaaaagccaagaaaagactgcaatggaggtggggtagagagaagccttagcaatagactgaattgtctggatcaattagtccacccttcattctccagctggggaaaatgagacccaaagaggtaaagaggcttgtctgaagtcactctgctagcccacggcagcccatcatctcttggatacacatattagctctgccccacaacacactgtttctgtctgaatatataaactatcaataaagctggcttagagcaaagaggtttgtgtggttgttattattgag

SEQ ID NO: 51508 - DNA, 2151 bp, Homo sapiens
gaatgtagaatattgttttcaaatgactaagatgaagagagtgaacgaattaatgtattgaggaccctaaaagttagatattataatgcccattttaaagatgtgaaaatgaaggtaagtgagcagccagttaactgtagaacagagatgcccaccaggtctgcgtggtttcaggcctaaactccttctcccttacccgtgtttcctccgcatgccttgtcataagactcaccttggaaatctgcattatcaacatgtaatacattttattataaactgaattccaattgagaacctacaaaaagctacctgaggtcagatcatgattcagaagaaacaagttaacaagattgtgcctctgatggagcccagacatggtcagatatggtttctcacaaccttacatgtcaagaggaaagaattccagactagatgtcaggagatccgggttgtattctcacctcctccagtcaccagccaaaaagtcatggccacatcattcaatttatctgggcctcagttttctaatctatatattgggataacacaaccttccctgtcaagctgaatagattctaaatagcaaaggaaataatgaagcaatatacaaacataagagacctttatgaatcctactacagatccatcagcggtgaattttccagccctctaaaacacatcaaagaattgtaaacagagaaggaaactctgagcccaactaattttagagacagagagactgacttcctgagaaggtaggcagcttgcccaaagattcagagtgagttaggaacccagctaacactagaagccagtgtctggattcacacaggaatattccttttataagaccacctttacggtgataaatgtcccagacgcgttcacataaacacgttgacagcaattcagtttagttccgtttatttcagttaagtaaagataagctgagcatttgtttgccatgtacaatgacctcttcagtcaaggaattccagctcttgtttttgtcttaacttctttcaactttgagggtttctttgcatgttccttacctaacaagaccagcctgaaaagagtagaaaaaaacataaagaaacttggagtctgaattttccacatgctgggagctctcacacccaattccagatacagcactctcctgaatgtgacctgaagtggtttcctcaattgatcacatcccaggaatctggagagcttccagggcagggaaaattagttacagagtcacagagtggtgcggcctgtcacatgaaagtcacttccagcttggaacggattgcacattcctgccttctgagtggtgtttcagatgactgggatctggcctgtctgcagacaggccccaaagcagcagaaggaagccagcgggcaggggcattccaacaccgttcccgagacccgcagtcacaggaaaggagaacttcctgaggctcctccaagccttgcctcaacttaatggtgtttgagaaaaacatcaagtttccatttacctccattttgaaacactgaaagcatttgtcattaaatagcatgatgactctcctgcctcaactcagagctttgtcaaactgctcacatggcataaacaaggatgatggggtttcctacacatatatcagaacttctaaatgcttcttatatgccaagtaccattatataccatgccttggctcatctaatccttacagacaacctcaggagagaggtgctctatatcactaccacagccaaggaacctggggctcaggatggttaagtaacttgtacaaggtcaaaaattggcaaatgacaatgcacgaacttaacacagatctgtctgactccaaatcccaggtctacactggctggataaatatgaggcagaggccacatgtagtagctcacgcctgtaatcccagcaccttggaaggccgaggcgagtggctaacctgaggtcaggagttcaagactagcttggccaacatggtgaaaccccgtctctactaaaaatacaaaaactagctgaacgtggtggtgcatgcctgtaatcccagctacttgggagactgagacaggagaattgcttgaacccgggaggcggaggttgcagtgagccaagatcgcaccattgcactccagcctgggcga

SEQ ID NO: 51509 - DNA, 581 bp, Homo sapiens
gggtcctgggctttttcagagtcatcagctcaaagcccttttaatgtgagttcctgattcgattgggtgtggagagaagagaaaaggtgacgaatggcccaaatacaaggaaaattcaaatacctgactttgttcttatcttgagaagaatgtgacagcctgaaagagtcagcagcaggcatactgagtcatgatgaactaagaaactcaagaatgtcccttgataaatgtttgctggatgaatgaatgcttctgttgcttattaccttttaagtgaatagggtcaaaggttgctattaacccaaggctcatgggggaaagatattctttgtgacctggcaggaattattaccaagggcagacgaggccagcaaattcacatggctaatgaagacagggtcacaagtttgaggccccctagagactagttatctgcaggcagagggaaaatctgcttcacaaccatatcacatgccctaatgctgggcagccgtcttgcagattcatgcattcctcctggaccatcttgtccaggaggggaaggtctaggacggatgcctttgctgaaaccccttatcaaa

SEQ ID NO: 51510 - DNA, 1488 bp, Homo sapiens
gagcaatcacagtacctggttttaacttcatatcattggatgaggcattgaagagggttggagagatggtatgaaatgatggtagcaacccctcactcctcgcagcacagtagcctaccatttcggaaatttcgtactcttgggagagagggagagcagaatgactgggtaactttacattgaactcagtactgccttgtcatagcagagagcagagccaggctgggctcaatcagtgccagtgcacgaagggagcatttgaacaagacccactcaaagaggaattgcccattccttctttcagaactcaagtttcttggcaagccttgcaaatgccagccaaagagctctggagtcctaggtaaacttaaaggtcagtctaggacagaaggactgcaatgtttaggcaatttctaatgctgagctaggctcagagccagaggactagagtgacatgtgacctaaagagacaccagctggggtgactaaaaaaaggtgcttgcgctaccccacccccaatctcaggcagtgcagctcacagaaatgaaagtgtctcattccctttgtttaagtgaagagagtgaagagtacagaggattctgtcccgcatcgtggatatcacctcagccacagtaggacaggagactgggtagagttgtgaggcccccattccaagccctagctcctggacaacatctctagacacccctgggtgaaaagggaacctactgccttgaagggaagaacacagtcctggcagaattcatcatctgctgaatacagaaccattgggccctaaataaccagcagcagtacccaggtggtatgtagtgggccttgggctctgagatgtgctaactaaaggtgtgactcagcatattcccagctgcggtggctatggtgaaagactccttctgtttgagaaaagcagagggaaaagtaaagaggaggctttgccttgcatcttaggtaccagttcagccacagtggtgtagtgcaccaagcaggctcttggggccctcaagaccaggcctagggtcttcaacagcatttctggacctgccctgggccacaggagagcccacttccctaaagggtgagacccaggccagacaccatttaccacaagctgactcatgagcccttgggctgtcagcaaacatatgcagtggcctggcagaacccctcatgggccggtggtaatggtggccacagagagagctcctctacctgtgaaaaggggagggaagagtggggaaaactttgtcttgtgatttgagtgacagcttagcagcagtagagcagaacataaggtaaatttataagatattttacttcaatccctagctcccaaacagcatctctgtacccacccaaggcctgggaaaactcactgctctgacgggaagtgaaaaaatctcactggctttgtcacctgctgattgtagagccctagggccttcagtgaacacaggtagtagccaagta

SEQ ID NO: 51511 - DNA, 542 bp, Homo sapiens
ttctggggtttaagtgatttatttgttttgtttttaaaatcagaaaacatcttaaattttaagtatataaaaatacattctaacacttaaaaatataagggatcacatgattaaaaacctaagaaatacctcttcaccctttcctaacaattttctattgatcagttaaaatagcatcattcacactaaaacaccaatttaataattcttctcaatttaacaaccagacaagctaaagcgatatcaacagccaaaaaaagcaaaagctttgcaacatgcaccaaggtcaatgacacttacctgccactcttagaccatattacaataggtcatgcaacataaaacaaacagaaggcaaattacttaaaggtctgtgaacccattatttttcctttcatttagagtcagaaaaaataaattcctgaaataaatacattctatttttttaacttttcaaattatctgcaaagattaaataatttaggttcacacttaccttttaatattatgcccaaattactgagctctgaatggccttcatg

SEQ ID NO: 51512 - DNA, 2179 bp, Homo sapiens
agaatactaattttctgccaaattttacactcagaggaaattaatccatcatagaagtcttccatgaaaaaaataaaaaaggtactcagtatgacccagaatagccatgaggttaaaacacatacacacacacacacagcaattgccacttccactagagtttgacagttatagatttgggtaattatagtagaaattgcgcgtttggaaacacactaagaccacaccctaagactgagaatctggactttaaacgctgatcattaattaaaaggacaacgcagtatctaagttggaagatctggccgcgcaggtggaaggcgaagtgatggggagcgataaagacaccaacttcaaaaccagggaccaggagggctgggtgtcgaggcgaggcgaggcgaagcccgggggataagggggtgtggagctggggacgggaacaggggatgaggagaaaaagcggccgcgaagaggaaggagtggtgggagccaggattggggaggggggacaacgccgacacgggaagggacgagccaacgagccaggagtcactggcgggcgcaggatctggggtgggagggggcggcgagagcgcgcgtggaggtgccaatggaaggaagggggcggaagaaaggaagacccgaatgaatgagcgccgggggcaggccggggccgcggggccacagaggaagcgggcccggggcgtcgcggggccgggggcgggcccagcgcgcctggaaaggaggaagccccgcgccagcgcgggccccgccgcacccgcctcttcgccaaaatggggtcgcagagcaggaaagctaggagtgtgaaggaagaggggaaaatggcaaaaaccaatcactcaccctccgctcgagcctccaggcgctctcagtcccgctcctgcgccctcctggagccgcagaggcggctcctcagcggcgctagggggagccccgggtccggagcgggggagcggcggcagccggaccgggagcccctcaacacctgcccctgtggcagagccgcgacaagccaggcggcagctccgagcggggagggcaagtgacccggatgtacagggtaacgacggggagggggaggagggaatgccaggaagtgagggcgccgcggacctgtccggccgtgcgcatgcgccgcacgcccgccccgcaaggtaaatccttagcctatcttctccgcccctcatccccgcccctcccgaaggggcggggcgaagccagagacaggtggtcggcgggcgcggcgtgcagaggaaggaggcgtggccacccccttgcaccccggcctccttaaaggggcagcaccttcgcaaatatcgcgccgagatagcttctgagtgggttggggtcttccagccttccagatgtacagatgggaaacggaggttcagaggtggcggtgacctgcctcttgtcagcgggcttggaaatggcaggaactggacctcgggactcgatgctgagccctgcgaagttgccatattccccccacgcctggaaccgctaggctgcgggcgcgcctctcccctttgggtcaggtactgagcctcgcccgcgattcccggcgcggcacgtgttcctggcaggcgcccagcgccaggagactgtactgttaccgcctgcgatggtatcgcggagacgcccttgggtggtgaaaaatgatcattctgagaacaaaaattagactccacttacaacactctcagatatatcagacccctgttctggggtcgactctgggcaaaaatatctagtgggcagaaacttggatgtgacagagggcacagcctcttaattacttccctaattcccctttcactctttgaacataaatgatccctttccctttacagacaaaaacagaacatcccatctagctagcttctcctaatcctgttataaagctgaatttttttttattaacattaaaggggaaaagatgacaatgttatctctcccagggttgttttcagtttgacagctgagcagatcactaagatggaggtaaatgattatgaacattttgcagtcacaggcccaactgaaaatactgtaacagtatggacttttccccccgggaaaatacagacatgcacacacatttgcataaaatttcaggagtttcatgcaaccagggagcctatccatgaaatcctga

SEQ ID NO: 51513 - DNA, 1345 bp, Homo sapiens
caggagctcactaatagatgagcaagataaaaatgatgtttctgaagcaatggagaactgattatcaaatacttccccagtgtaaggatgtatcacttttaaaggtatgtcactatttacttgaaaatgtgacatttgcagagatagagaatattatttctgggtatctggtccaactccctgattttataggtgagggaatctaaagtctgcaagaaaagaacacgcctggggcctgggagtgggatcacagcagagcaggaccaggaccaagcttcctgactgagcttcctcccatttccaaagcccttcacctggagaactgcttcccgggcttcaggtttcagttcagggagcctgctgtccagacaggtgcccccgctggtccacccgaccactgtccccctctctcagagcactcctcaagctataggtgaaggacaccatcatctattcatctagcttccccgctggactgagagtaactcgagtgggcattcctctttgtgtcctggtactgagtgcagtaatgacatcacatggatactgtgtgtagtgaacaggggatcaacttgtccccattggccagggaatttcctagctttagcaatgcaagtcccaagtcctggaaaacccctcaaccaagatggctggtcactggtagcgacattaacaggatcagacagcctggtcacactttccccttctctaactgtcctccaacacccagcccaggccccagagccctgtctgtgccatgcagtccctccagctcagccctgtccaatagaaccttctgcctcgatgaagatgatctctgtctgaactatccaataccttagcttgggccacatgtggttactgagcacttgaactctggctactgtgactgaggaactgaatttttaattttatttaattttaactaaccgaaacataaatagccccatgcggctagtggctactctgttggacaattcgattctggttttccatttatggaattagtgtgccatcactgcacacagggatgaactttaaagccagacagaccttgatccaagtcctgactcatttaccaatacagcacttcttagggaatcttgttgcttcatctgtaatcctcacaaacttactttgcaacaatgtatggaaagtgaaatgactggccaatagcagaacgtcaagaaacaggatttctctagaagcaactaaaccaaatatatgtccaaatgcgagaaaaatctgattctgaaccaaaaaagcaaacgcatgagcatcatttccagcagatctctaaaacccttgcctgttttaaattctcattctaaattgtcatggctgc

SEQ ID NO: 51514 - DNA, 512 bp, Homo sapiens
acacaagctgcttccctctccttgcagatggctgagcactttccagttgcccaggacctccccatccagtgtctcccaggcagggctggcagggaggccctcttccccacccactgagcatccaagtgcgggaggcctaatccatgcacctggcacttaggaagcccacagtcactgctgttactgtggttgctaccctcatctcactgggaaagaagccggctcagagagatgggatgagtcacccaaggccacatgatactgggggcagggctggcacaggaacactgggctctagggctcattctcctccctgtaccccaggatgcggccactgccctgccctcccccaacaccttttttcctccctcttacagaaaacaggcaggctctaccagtcaggataacacttcattcattgcacacgctagggctttaattcatgggaccccacctgtcctcctcaaaatagtcctgggtcctctaggaatgccctccaaccaccaagtggt

SEQ ID NO: 51515 - DNA, 661 bp, Homo sapiens
gccactatccagaaggccggtctttctcacggcctctccacgctccatcctggcccgggaaagctccacactgctcaccctcttgccttactcacccccttgaaattccccaggctccatgagccggtgacccactgcctctcgcttgcccaaattcctcttgggtgcctggtccaccctggagacaatggtgacccaccatgtggctggaggtaccacatcctcccccaccccccagaaatagtaaatgagaagtaacctttttctattccccattccagacttccttaattaaaatcaaatatttgcacactctccaaagcctataaacctgattgctctcagaaaaaaaaaatgcttcagagcaaatagagtgagtgtggcacaggttgtctggcaggacctcagggtacagggcagcaggtcctgaacaaccacaccagcccagagcagtcgccctccacttttctcagtccacctccacaacaaatcaatgcaacattcactttgcaaaaggcccactgaaaagcccctgagggtgagcaggtgttgggaagggatggaaatgaggaacagtctaccccagccctaccctgaacactttcaaaccagccacttcccaccggcatggctgcccagctgttaaaatactgagtccttc

SEQ ID NO: 51516 - DNA, 1069 bp, Homo sapiens
ccgctagccgattggttgccacttcctatgggaagccctccttaacctctcaggctgggatcaatgtcccccaacccccacctcacaccccacaggccacggcagctcagacttccctacatcacaagctccctgtatcagcactgggtctccttctatctaaacttcctggtttagatgtgaaagggactcatccaccccatccaccactgcatcctctgagcctagtacagtgcctggcacacagtgaagcagaatggatgtcctgaggaagtgccagtgggaagacccaggaggacagaggggccgtggggaaacagaagccaagtgggaaagggcaggggagactcaaggtaagaatctggcattatcattccctactcatttgtggattaggacatttatctcagagagcttgagggacttgcccacaatattactgctagtaaactagctgggtctctgcactcactctcttcataccaatttccaaaccaactctctacatctcagacagctttgagccctccctcccccacagcccgcagaattccatctctcttcctgtgaccaacttactgtttgggatctaatgtattctgtaccctccctccggggtattttttttaagataccctgaagatagaagcctgtgattaaaagaaagaaaaggattcctaacgatggaatggcaggaactcacttattcattaaacaaatatttactgaacacctagagtatgttctattctaagtgcaaatataccagcgtgaacacaggcaaaaatcactgccctctaagataccatcatgaaatggtgttatgaaaacccagtatgcctttgtgaaggaaggaaggaaggagggagggagggagggagggagggagggagggaaggagggagggaaggaaggaaggaaggaaggaaggaggaggaggaggaggagggaggaaaggagggagagggaataccaagtgatctattcaagatgtcacttaagctgacccagggaacatggtctattgggggcgaggagacaccacacaatccttcaccccaagaccact

SEQ ID NO: 51517 - DNA, 2381 bp, Homo sapiens
ctgtgagcccagcaaggatctagagtgcaaattccaatgtgcctcctcaggaagaaaactcaggccagctgaccacttctgcatgccgaccaaggtagaaaagtcacctcttccgggcttcccccacattacaggaaccccaggcctgggaaaccatcccagacgtcagccctggctcagtcttggctgttggcctcagccagtcacctggcggtggcaatcaaaatgacgccttctttttatttttcccccagtgcaatcttccaagaatgggagagtctcaaagtcagagtttaagccctttttcacaagggagtcagtattttcacaagatggtcttcctcagagaggggaggagtccatccaacccagatagcaaaattgctccctggagatcctggatggatgttacagggcaaggaagccaaaatgtggaagcacaccgactcacctctcaaaattcaccacccactcgttcatctcacaattatctatggggtgcttcccacgtgcttcaacgcaccctttctaggtgctggggatgcagaaattcaaggtgactggcaatgacactttctatcactgcgccccctgcaggccaggaaatctacgctcgttttctcaaggccccactcgcagcagcccatttcacagacgggaccctaagactcagagagggtaagcgacttgcccaaggtcacacagctagtaagcggcagggccaggaattaaacatagctgcaaagtgcatgtgacactcccccgcagccccagctctatccctccgcacccctccacctcttgcagcagggtgggtagcaaaggcacactccaagtagctccagcatggtaagacctcgattcctccttcgttccactcctgacacaggacacacgtttcaaaggacacacaggtttttcccaaccccagtgtgtgtgtacacagccccaggaaagccctgcaggctgcaagggcacccacccgctaacactgaacttccatttaaaaagaaagataatgaaaagataaaaggcgaagaggaagtgctctttaaacacaggcgggtggctaccccaggaggaagtcttgaggccagtggagattttgttcaccccctctagttcctcaaatccaatgcgactggtcttccaagcccctgatgggaggtggccgggggccagcgctgctcccggggtcagtccccgcaccgacacccggctcgcaggaagggtctgccagggaccagccaccccgacccgagcgccccctgcctcgaggcgcacaaggcgccggctccgcagctgggtggacccgggcggcggccccgctgcgcgctcccctcgcgtccgcccgccgccccccgcgcactcgaggcgcctcccccgggacccccgcgcccgccggcccggacgcccccaccacggcggcgccccctgtccacccgccgcagcgcccggcccggcggcccggatggtacctccgcctctccccgcacccatcacgcgcgcgccccgcaccccgcgccctctccgggggcaaatcggatccaggggcgcgcgcgcgggccggccgggcggcggcgccttcagagccccggcacgtacctggcggcccgggcgggcgaggggagcgcggcgcgggagcgcaggagcctcggagcctccggtgccgccgccgccgccgtttccgggttggcggggctcacgtcaccgccacaggtttgcgagctgcccccgccgcggcggcagcagcagcagcagcagcagcccgggcgagtgccaggcgagaaataactataaaaggaagaggcgcggcgaggaggaagaggaagcgctgtttaccttcgagaagccgagccgccggcgctcgcacaaaaggaggacgctcgcctcgcgacgcgcctccccccgcgcccagtccccgccgcatcgcggggccccggcgtcagcgcgcgccgcgccccgggaccgccccgcgccggcccccaccccagaaccccgcgcccgcctggcccgtgtcctcccgagccggggcgccacgggcccgggacggtggtgaccttgggcaagtcaccgcggggcgcgctgcgattgggggtcatcgccctcattgtgcgaggaggaaacccggctccgagaggcgcaagagtgacccccaaggtcactgcctgtcaggcagggcttgggctcgaaccccggtctccagaccttcaggccggccaggttcccatccctgggtcgcttccccctcacctggacttcaggaatggtgacagcccctgcctggctcacctcgcagcggggtcagtgagaggaatgctgtccacgcacccattcagccctcccgcagatacttactgggcctactaagtgcccgggct

SEQ ID NO: 51518 - DNA, 1017 bp, Homo sapiens
atttgttgacccatttccatagctctttgtacagctcttggtacttagaaaactatggacatgtctccaattttagctccaccacttactagctgtgtgaatttgggcaaattacacaacctctctatgctgcaatttactgatctcttaaaaccctacttcaaagggttggcatgcagattacatgggttaatatatgcaaagaatttactgacaagccctggcaggctgtaagcattatgcagtagtactaccatcactgttagggttctttaaggccctattacagtattacattcctgttttactcatttttgtaactttggctcctggcacaagggccaaggacatagcctgcactcagggaggaaacagctgactaaggcacactgagtgactcacattaggaatttgatcctaaaaatataacgtattcagaaagacattcttaaagaaggagaagaaacagataaacctcatgttgtaaatgtcacaggctgtactagggctgtttctgctcatgacctgtctagtcatatctctaaaaaagtcaaaatcaaggggcaccctgctcacaggctggtccctaagcttctgctgaggtggcttggctctaaaagttaatttacatgaatctcgttcctctcttggaagtctgaaattggctaagaaacaatctgagccaggcagtcaagagggaaaaagctagggggaatccctgaggtggtggggctagaaaggccttggctgtgagtcacactgatggggcaagagaaactctaagtgccaggcatggaaaaccttcaaaataccccaccctcttcacctgcagctccaattctaggaatttatcctaaaacagtgatcaaagtcatacactgagatgtctgtgctagagtgtttggcacagtactgcttataacgaaaaaaatgccacccatctgaatgcaggggattgtatggacaataaataaaaattagccaggtgtggtggtacatgcctgcagtcctagctac

SEQ ID NO: 51519 - DNA, 468 bp, Homo sapiens
ttatttatatatcagaaaccaaaatgcatgatcaccttcacacaagtgagatataatactttcaatgtgtatttccaatgtatgttcgacacagaaatcatcattcttttagccaattaaaaagcaaaagttgctaaaggttatctttaaaaaaaaatcaatggtagagatgtggaagagaattcaggttaagcagtttctctctcagcttcgataaatctactctatcagctgggccaaaggtacaaattccaggaatttcacaatgggattttctttaagcaaatcctaggcgactaaaaagctttttagttgaggtgtggaagttacctaggactaaaaagctttttgttttttctttctcacccctaggaccaaggattgagggggaaggattattgaaatgttctctatatgacgtaatattttggaaaggctgtaattctttttactcacatatgaaatgtc

SEQ ID NO: 51520 - DNA, 965 bp, Homo sapiens
ctcttgttcctaagcttaaagtctacagaattgccctttcttttccaaagcttgcttttcacactgcacataaatatctggggatctctttaaaatacagattctgattcagcaggtctgacgaggaggctcagattcagcattctgaagatgctcccaggtcatactgatgctgctggtccccattccccagtgtgagtagcaaaaaatggattcaccaaggctttccaaatcaataagtggttgccccaccaggtaagactggattcaatcacccaactgaggcagcattttaatttctggctcttttctaacttccaacatccatcgctcatgccccagcaaaccacttcctgaaaccaaactgcctcatgacatattaaatcagccttcagtcacagaggtgacaagacgtgctcaggctcaacccagcttagaatgacagtacaaggtccaattctgacagcagggccaaaagtagtaagtaaggattcccccacccccaccacaatcagccccagagctggctggagggatttccaaatcagctttgcacactatagcctcaagggtcaccatctaccactcaacaatgggtcattttctttagattattttcacaaatgaccatctatctcatgaggctacaaatgtttcttgtgtgaaggaccccatgtcccctattgtccagcacaaggctaggtgctcaaatatctgtaaaaaataagtacaaagggagaaaagaaatcaatgactcaccaacatttactgaatgtgcaccatgtgccttgcaatggcctggctgctgagggagcaacaatgaataaaacagactttcctcctgccactaatgcaatttgagcctctatgtaagagccaaatactctgctaatgttttacctacattatcacacttctcaattctcacaataatcttacgtaataggtattatacccacattttg

SEQ ID NO: 51521 - DNA, 1680 bp, Homo sapiens
tgtctggtcagctcaagcaggctgcaccggcctccgatctccttgtccagcctcggagtgccctgcgggcaggtcctgctggcgcagcagccctaagccctaccaaaccctccgggttagggaagccgggtggaaacctatgtgcacagatctctttccatctgggcttcaggcaccagagactaacagggaggactcctggagtggatacagtcccagcctgagttctctctgggtcctctgggatttttccaacggccctcgtctccgcagctacgcctgcctggtccagtcgggccgctgaggggtgcgttcactgcccatctcctagtcccttgctggtgaccttggctgcactacttcgcctctgggccctcggtggcctgacgccacctacctcgagggttacaggagggtcacgaagatgtggaagcgccgaacagtgcatgccagggacaggacttccatcttctgtcctccctggagtgtccacagctcgctcagtcctctcccacctccagtccccaggcctttcaacccgcaagacccagaaagggcgaggagatggggaaggcgccgcccgtccgaagtcccttattcacccggcggctccctgagggggtgtggcgcccccggcccccgcgtccccttcctcccagctcggagaggagatcctccagctgcgcggcggcagcggcgagcgtggacggcgggggtcccggcccgacctacctcctccagcagcgtgacggtgttcctgcagttgtgcagccgcgtggtgaagctggacgtggtgggcgagttgtagtcctcggtggtctcggcgatgaactccgagacagagatctggtccggcatcctgccgggagggacgagacacaagcgggggcggggggtgagtcacggcgcaggctcccggggccgcgggccgcccggaggctcatgaaccccggcgcgcagcccgccacccgccgcccggcctggcgcgcggctcccgtccccggcagcggcgagagggagggaaggaggcgggcgaaggcaggcggcggcggcgctggcggggctcggcgcggggcccttcaaactccaagccgcgcgcgaggcagggggctctccgggacccgcctccctctgctcatgccggcggcggcagctcctcagcggcgggggaggggacgcggctgcgcgcggggtcttcgcgggggtctgggctccggccggccgctggggcgtgcgcgggctgggcggctggggcgcccggcgctgcctcctcagacgcgctgacaggcggcggcgcgggcctgactgactgagcgcacactcccgcggcgggcgggcgggcgggcggcgctcgcgctgcagtcacggggccaaacaaggaagtgctctgcgcacgcgcgccgcccccagccccgcccccccggtccctccccgcccgcgccccgcccccggcccggcccccgccccgccccgcccccgctcgcgcacagcccctggggcctggctccgaagctgccgctcccgaccccggctgcgcggcacgggggctccggaagcccgagtccctggttcgcccccggagcggttacttcagcgagctcgttgcgcgagcgttttgcaagaagggggcccaaaaaagttgtacgtgttcttttttagtcgcgtgtgggtgcaggaagt

SEQ ID NO: 51522 - DNA, 408 bp, Homo sapiens
cttcttctcaatttcaatctagtctctgctcactgtgcccctgtatcttaagcccctggctcccatcccttccacatcctaccacatcaacctcttctccaatccttctccaagtctctacacttggccacaaagcacccgccccaccattgtctacatggtgactcatgggccaccatctgagagaactttggggattcccttttcccacacagtcatgcagtgaatcaaacgtcacttcacctcttgaggaactgtccctcttcagtgtccatctcactctctagactgggaatatttactttgaatcacctgctcctagtataataccaacgaagttcccaaaaaatgccactggaggcatgtctaaaatataaaattggaaggaatattcatgccagtgctcgc

SEQ ID NO: 51523 - DNA, 3008 bp, Homo sapiens
ggaggtgtagagaatttcaatttccctcaccaaatggcaagcttgcgaaaagtcctttctctccaacattatcacatactaaaaatgaaaaaccagccattcagagctctcatgagaaaaatagatgggctgcttagctcacaagaaacaggagggctgaaaatcaagtctagagaacatcagagggtacattatgtgctaagatactgcccttttttggacctgggagtttctattttgcacaaaagaatgggatagggaaagtaattccccgtataataagccactcattttatacttcaaatccatttggtagctgaatctccaaatccacttagtggcgttaggtgatttttgttttttttaactccctatctcaaaatatgcagtttgaaataagtgcatatctcaaaaatagcagcattaacaggacagaagagaaggcactaaagtggtgaaggctgtgacgcaaagaagacgtttccaaatctgtttcatggctaacagatcaaaatctaacacagaaggggcatgggactgagcctgaagaagtggaaactactcctggccatgtgatcttgggcaagtcaggtcacctttctgggccttctctgaagggggtgaatcagttgttctcaaagatctttttctttccaaactgttcactgggtgtttccagaagacccgcattttcttaaagctatctggccgcgctacaattgcaaaacagaaaggctttgggatgaaggttgcaatacagataaccctggcctaaaaactgataagcttttacaatcccaaaacattactcagcaatccaggtcctgatgtcatcccagaatcaatcacgccaagataacctaacagagtagacaggggaaaatgcgagagaaagttcttttgctttcctgacgagtacaggtaaagttgaggtcaagttaacgatgatggtctgcagttgaccatccttctccctgagctactggaaaaccacattattaaaggaaactgctttagaagtgcccaagatgaacctcttgggatgtatcaaaccgcagaaaaccggacaccggcaagtttcttttttctttgaaacttcatgtcgctctcagaaaacgcagcaggtcccaaaatggtacaagcagaaaacacaagccacttcacggtccgcccaggagccaaccccaagctccaagtaggactccccccacccccttccctttcgtttctcttcttttgctttaggcaagtggcctggggcctgccaagcagcgccgggtccgggtaggggccgggggccgcggggaactttcctcggctgcaccagagacaatgccgggagggcgccccatcggcggggtccgggccgccaagcacgtcgtcccgggccctcccccggagggggacgcgaaaccccccagggcgggccccgtccccggccccactgcaggggccccctctcccgagctggaggcgaggagacctcccccccccaccgggcggcctcgcccggccccgcagagcctggccgcgcgtcccgcacacgccccagcccagggccggcgccctccccgcggagaaggacaccccgctgcgagaggagccgggagcccgccccgcgccccgtcccggcgcccttcttcgcgcgagagactgggcagggggcgcccgcgactgtgggcgactccgcccggccccgccgagcgcgcccgagcgccccgcaactcaccgggacctggcgggccgctgggcattattccatcgcgggttcggccgggcgctcgcggctctcgggtgggaaagcgaactgcgaccgggaagcgccggctgggcgggaggcgcgggcccggggctgcccagcgcacagtgctcgcccgcggcagcggccaggccaggcgaggcgcgggagccgagcgcggcgcaggaaggggcgggcgaccatgtgccgagggggaggaggccgcggcgacgcgagcggctcgcacgatcccgctcggcggcggagggcgcgggtttcaggaaatccaaacacttcgacaggaaatcggaatcctgactaagcattcccggccccgagccgctccgcgccgggggctcccgcctcgcttaacccttggcccgccggcagccacgaggggggcgtgggaggggccccagacctcggccggggtcgggcgtccttcgccttccgccccatgccccggccggccggcctcctccccgcctgaggtggaaggggtgggatttatccacagaaaaccctggacgcggaaggtgcctttctaaggccgggacagcggcaaaggacgtgcctgtcttccatctgcagaggatggacctgcactgtcctggccgttacccctattttcagtaaaggaatgatttcaccaggctgccccctttcaccacttcctctctgctcttataattttatttttgcccagtgccaagggaacaggaccttcccagtcaggatagtataggaacagtatggagagtaattgtgtgggctgcaggctctgtgtccggttggaatatggccttttttctactcatgttaccttgagtaactcgctcaactttcctgagcctcagtttccatttatgaaatggatgttaattccaccctcataggtttgatctggaagctgaatgtttagacagggactggcacattggaaacgcccaaataaatgatagccatgcttgtccttattattaccattaaaagacatcagagaaaggaggattttaatttgtgggatgtatattgtgcatatctatgtctactttcaaagtcagagacagtagtctttctttagaacttaatttccctcctaatcattgggtgattgtttttctttgcagcatttcagaaacggctctctgcagaggaaatggttagtggctgtggcagacccccttctggtgaaatccgaaacagaaaacctcacaaaatttgggattttgctcctaatctgagagtctgggtgtagtggggagtgggg

SEQ ID NO: 51524 - DNA, 605 bp, Homo sapiens
aggtgggtggagccaaagtgtgcagggcccctgagactatagggaggagtttgaattttactgcaagcataatagaaaaccctgggtatggtttgtgggggaggggcaggtcagtcacatggagatgagagggggctcattccaggcagaaggagaagcagaatcatatttggggcttgtaaagaagccattttagagaaacgtatcaggagccattctggggccagatgaaggagaccttcaaatgactgtagtttggcctttgaccctgggaaacataaccataaaggaatttgttctttagatcctggagatcctgtctgtggtgcagacagtcacctgtgagttattttatctcagcaaacatctcttttataggaatgttcggcattcccagagcttttaatattctgccaagtcaatgagagatgaaattgatttataccagcagccctgagaccacaggacaggatgagtccctctccttcctgggagccttgggcacatacttcttgctttcctcacaaccagcaccacacacacacacacacgcacacacacacacacacacacacaaccacacagactcacacaaacatagctta

SEQ ID NO: 51525 - DNA, 626 bp, Homo sapiens
cctcctctgagctctattttggggtgggttttattaataacagatgagcctgggctctggggacctcaggagtaattcatcattttcatcagggcttgatgaggcctcagaaccatgcagaagctcatcctgaatcatttcggggtttttttttttttttcctttttctgcttagcaattgaacaggcgccaccagcaaggagggcctttgctcaaacacaaacccttggcacgatgcccgccgatgtcagcaactgtgctgcctggcatctgctgtggtgaggtcagaatggagcatgctgccttgtgtttgcatgccagcaagggggtgacagacgcgatattgggtggaagaaaacatgcgcgggctatgctggtggcagagtgaggtctgggggctggtatgagagggagaccggtcaaagaggtggcttgtcaggttaaagagcgtgagtaccactgtaggagctctgcgaggcttggctggtaagagtgactttgcacttcgtgctactctcctagggcagctgtaaccagcaaccacaaactgggtatcttaaaaggacagaaatggattctctcacagttctggaggccagaaattcccagtcaaggtgttggcaggg

SEQ ID NO: 51526 - DNA, 652 bp, Homo sapiens
ttacaggcataagccaccatacctggcatgattcctaccattgctttttgctttctccataaatcatttctctcctcctcactgagagcgcggctccggaattagcaggctgctcagtcactttatcatgtaacacccagctacaaagcaaatcaaatactgctggcaggttctgcttgatgagaaaatatttattatgttggagctctggtttggaagccagttatcacttactagctgtgttttaatattgtgttgtttttccattattgctttagctgctggaaggaaatcccaatggcctcagatactgccacctggcggtgaagtgaaatgataaccagtttttgagcaaaagtaggttactgaaggtcaaacatgcttgctggagaattgcaaagaggggaagcaccataccatttttgtaatgcttgtgccatgccagtaactttgtgagtcacgcaccagctcatctaatccccactatggctctacaagggagatgctatggtctcatttcacagatcgggaactggaggctctgagaaattgacttgcaagagggctaaggtttgggagattcacacctggaagcatctgaccccaaaacccatgctctttctaccattcctgatgatctcctatagataga

SEQ ID NO: 51527 - DNA, 4664 bp, Homo sapiens
agtggagaaataaatgaaactgtgcttgacagggttaaagcaagtggtgacttagaggaattattgagcttgttttacaaaatggcagataaggagacaggttgttgaaatcccccctgcttgcaaaacagcaaagctggctgaaacttgttggaacctgttgcgggaagtcagggaccccgaacagagagacctgctgaagccgtggcagaacaacataaattgtgatgatttaatggatatttatcagttccccaaattaatacttttatgatttcttatgcccctcatgtagacaggtgtgagattcacagaggctgccaggtgagtctcaagaaccatgttcactgggacatcaggctgaggtatccggaggtacttcccagcctccaggaacaacttccctgaccttttctttctcagctctgcaaagattatatgagcccctaagagtaccttctagattcaatttctggctttatttctttctggcggggcaaacattccgagcttttatgtcctcctctgtaatatgcaggtaatattctccccacatctgttctttaggaatcatgagatatttacacaaaggacccaccacagtgtttggcaaagtgcagacgtgttaaatattaactcattcctctccatctctgtgtttcagaaatatctgacgcacaggtgaaggaagaagcgagtaaacaaagacacggtggccaggctgttcagaggaattggtgccttctttcatttgacaatgtcccaaggcagttcctttgttcaggacagatgctgatgtttgagaagaggcacacattactggataaagaggcacacattactgaggaaggaagtgtgtggttgtgtaaggaagtgtgttgtatttgtgtacctctttactgttattacgagatgcagagagcatgctggaggcatctccataatatcacaactgtctgaagctacttagctgccagaaaccttggcagacttcaggttgaataagtgcccatagtacattcaattattgttgcaaagatcattggatgcgaaaggtcagaactgtttgggatgcatctcagagttgatgtagttcatctctaactgctgcttgataatctttatgcatatatatgcatattatacatgtattaatctgctgattaatgtgaataatctcttcttctctccatatatatgtgcagagattaattagcagactctgctagaggtctgcctttccttccacatgtaccttccttcaggtgctgggttctgttggaagtttcttaagcctgagcctagaaggtctagttatgtgtagggaagtgttcttccctcagaagagaagagggatgataatattagctcctatttatcaagcctttttcctgtgccagcaacacagttgaatgcttttgcacaacttctcttactaaatcttcccaagtttctgcagtaagtgggattatcacttccactcaacaaaggaaggaatggagactgggagtcacccatcactcatcccaggtcactcagcgaggaagtggcagagtttagattccaaccagccagctcgactcctagttccttgtgctaaacctcctccttatcccatgccccccggcccatgcagtgtggcaatggctgtggcctcagcagttcatgtgtcagatcttggcttctatttgccataggcttggtctgtatctttctatgggaggcccaggacttcataatcagttagaatcccttttggtcacatagtccccacaatggatgttctatgttagggtgtgaaagctcagacgcaacatgtgccacaggtttaatttcagtgagcaagactggctgggaggggacaccagctcatggctaggctcatccctccttcaagaggggagccccttccccttctgctctggccaactgctgccaggcagatgatagactctatgtaaacgaattgtccaattattttattttatttgacatatagaaattatagatatttgtggtgtacaacatattttgaaatatgtataccttatagaatgactaacttgagctaacatgtgcattacctcacctacttattatgtgtgatgagaatacttaaaatctactatttttcaagtacgcaatacattgttattaactatagtcactatgttgtataatagatctcttgaacttattccccctttctaaataacattttgtatcctttaattaacatctcctccatccccacccccagctcctggtcaccactactctttgactctttgagtttgatttgtaaagattccacgtataaatgagatcatgcaatatttgtttttcttgtgcctggcttgttttacttcacgtaatgtcctacaagttcagccatgttattgcaaatggaattatccaactttttcagaggagccagagatctagattttaaaattttccagtgttttaaatgctgaatgcttactcaattaaaaaaaatctctgcctcctctttccttccaaacaaagaatctcgggactggtgattcactgctccatttaatcatttgtttaatgatttgacaaatgtttattcattgtttgctcactgctaggcttgggctaggcactggagagtgatgaagagcaagacagggaagacaggcaatgttatagtaacactagtacagcgtggtactcgccaaaacgggaagcagagctgtggcagttttgcaagagtcaggatgcagcaagcaggctcttctcagttgtgttttgagaaagtagaatattattgaggttactgttattcacgagatttggagaatcgtgatgtaaatgtttaaggtgatggatatctcatttactgtgatttgatcatcacacactgtatgtatgtaagtatcacatgtaccctcccaaatatatacagccgtgatttattagttaaaaaagagaaatttggagaattgtgaatctgcttgcaaccttttgattcagaattttaattccaactcttacgagaaggaagtagtgagtcgtagcaggggggaaacatggcttgttacatgttatgatagctgtggctgctgtgtagacagcaagggaggaaataaagggtgaattgagatgagccagtgaggacacagtgaggagaagaggtgagtcaatatattgatttggctgcaatgggatgtgagattaagagaagttgagattagagaaatagttggctgtggatgtggggttgagggagaaagataaatgaaagaattcctggccacaagacttgctttttgctgctttggttgacttaagtttcatttgttagtttgcattaaactttgctgcaaatgacagagaaccccaaacactggaggtgtaaacaagatagtgttatatttctgtgcgttttagaaagagtctgtagatagcccaaggctggcagggtactctgtgcagtggtcccctacatttttggcaccaggaactggttttatggaagataatttttccatgcaccaggtggggggatggttttgggatgattcaagtgtattatttctatcattattacattgtaataaataatgaaataattatacgactcaccataatgtagaattggtgggagccccgagtttgttttcctgcaactagacagtcccatctgggggtgatgggagacagtgacagatcatcaggcattagattctcattaggagcacgtaacctagatatttcgcatgcgcaattcacaataaggttcatactcctatgagaatctaatgctgcctctgatctgacaggaggcagctcaggcagtagtgtaaacaatggggagtggctgtaaatacagatgaagctttgctctctcactgccaactcaccttctggtgtgcagcctggttcctaacaggccacagacaggtatcctgctctacgagatagcctcaatatcagggtctatggcagtataaaaatatggtctgtggtttcctccaaaaaaaaatggagcctaattctcctctcctcgaatgtgagctggacttagcaacttgtttctaaagaatagggtgtggtggaaagtgatgatgtgtaaccaagttctaaaaagacaatgttatttcttccttcaatcacgagctctgggagaagccagctgccatattgtgagagcgctcaagcagccctatgaggaggcccatgtggcagggaactaaaaagtctctgccaaagctaggaggaaacagatctcctatgtgagtgagccattgtggaagcagatcctccagccccaggcaatcctgaggttactgtagctggggttgatgtcttgatgcaccctgtgagagttcctgagtcagaaccaccgagcttagcctcttctgaattcctgactcatggaaatggtaagatgatgaatgttctctcttttaagccattcagctttgaggtgatttgttacatagcaacagataatacatggtccaagacattccagggtgcaggatggagggggaggaggaaggtgagttcctagaaggtgaaacttgacgcttttattaccttgcatcaatcaggactcagtcacatggctctacagccagctgctggaggccaggaatgtagcctccattcttaacacctttgccacctttaaa

SEQ ID NO: 51528 - DNA, 642 bp, Homo sapiens
cttttggaggccagcctttttgctagctttgtttgccaagcctcgacctacctgagctcagctccccacctgcatctggtggttccaagtctcagcaggcatgaagctttactttgtttaaatgtcctcagtctgttggactgaacaacccatggggctttcctgacctcggattctctgagtctatgaagattgtaacagcctctggcattggtagagggatttacagtatgctgaggcttttcacttgtcatcttcacattcctttggggccttgcatgaatttggagggggcatacttctttgatgtgtatatcgtttcctagagcaaacagcatcccaaatgtggttcaaagttcaaggtttacctgaatcaattccctctctgctttgtgcctcaagagaagacagcttcacttctaacattagggtcccacttgagatgcctcaggtagatgtttttttgagggtatatctactgtggatttgttacctggggctaagtttcttttaaatgggatggtgttcagagtcaagtgtttagagaatggttgggattttataattctcattcaattacttaaaccttgtacctccaacatagcgcttatcagaatagcttagtgtttataaacatggact

SEQ ID NO: 51529 - DNA, 1990 bp, Homo sapiens
attttttttaatagatgaagacactgagggtttctgagatttactgacttactcaaggctacagagaggaaaaaaaagtagaaccaggatttgaacctgatgcattaaagttcccaaagcacactctttgcatcattctatgacattatgctggcttcaattacctctcctaaccctgagatgaaatgatgtgactaagaaagagtagagggagaaggaagaaaagacagccaagacaaacccatagagaacaggccatacatgagctcattctcttaccctcaaaactgtttcatgtttctgttaatgaccttaccatccttctcaacatcgtgtttgaaaatcagaaattttctctgacaacatgttctttcctgctccagcatgtctgtttttgtccttttctattatgttcctgaaatagttcccatcatattcccttccctcctttttctgttgtgtcatacttcagatctgattacctccaactgcaatagttgcaacagccacctaatgtatctctccatctcagttactcctattgtgaatcaacatgcatggagcttccagaagatcactaagaagaagagagagaatgaagccactcccctgctctaaatcatcagtgcctcccaatgtctacggaacaaagttcaaatgccatagttggtattttctattttacacctggtaacattttaactttccagctgtttgttttagctccctttgtattctctgtggctatacaaaattctactttctggtgttccctacacctcagtcatcaggcattccatcaacaaattgtattgagggcttactataaacccagcacagttgcatagactaagaatacaaaggtgaacaaagaagttgtcactcttgccctaagaggctttcaatttagtagagaaaacaaagattaataaaattgaaaacatcaagagtaaagtttatgactattatacaaagtaaaaaaaaaaaaaaaaaaaaagaatcccataagcatataagagaatgttgatccaggcttgatgggtcagagaaacctctaagctgaagttaataggatgaggaggagttagccaggtgccaatggtgggcagaaatatttcagcaagaaataataaaatatatgaaggcccaaaatcataaaagagcaaggatatctgggaaactgtttgaccttggaaacatttttgagttgtagtttccttgtctataaagtgagtatattgatctctatcttcaattattgtggagagaagtgagggaataagaattccacatgttatgtgaagtatctagcaggagtaatgtatagtatagttgatgaataaacaatactttcccctaaaattatgtgcatattacctctttctaattccactctaaatctcctgagggcatgtctatgccttcgcttgtgaaatccaaacatcccagtttccaggagactttgatcttaaataccatcattttatcagccctgttcaaaatgcaatggttttcagggccttaggctgaccacctcttctcaagatggtctttgtttacctccaaaatcccttaagtgcctctggagctgtcaagcagagcccttcgaatctctgcttcagcccctgctgagggtttcaccactgccagagtcagatgtttctaggactctgctgctatgagcttgtaaatcttcctggagaccatgttgagctcttatggtggccaggctagaaggtgctctggggcaggatatggaggaagaggctccctcctcttgcctactcagggctatacttgagctcttaggctgcaaaataaaactgcttgtggcctgaatttcaccagactttgtaggtactcagtccttcctgctgtgccggaagaagttaacatgttgatatggtttggctctgcccccatccaaatcttaaatgggtagctcccataattaccacatgtcatgggagggacccagtgcgaggtaact

SEQ ID NO: 51530 - DNA, 1322 bp, Homo sapiens
caaaacacaaacaaagtcctttccatccaccacggcatgatcctcaaactttcatggaggtaaagatcatttggagaaattgttacacagacattcctggggcccacattcaaagattctaaggtagtttatatttgatggagtccaagtttatatttaattagcagcccagtgggttccaatacagtgtcccagagaaaatacatggttttgtatgctgcaatggcttgtggtgtggtatggctcctcacacggggcgccggttgaggtattgctcctcacacttgagagcatttgctgtggggtctgcccgcagaccctgacccaaatgatggatgaataaaacgtacactgacacacagatattctgttttgccagtcctgctgagtgtctgaccacctacacaccaagagaggtttgtcactgcggctggtcctgagcagctcgcactccaggcatttatttagtatacaattaacagcagaagctttgagtaaacacacttgtggataattaacatggttaggagagtagttctacgaatgattaaagctcaggtaccttggtctaaagtaaatatcactgggggcaacatccttggtcaacctcccccccaccaagagggccaactggctcaaaggttagttaatggaggtagggtaaacagacttaactggggaagcctctattgtcccgagtatttaccctatgacctaatgctctaaagtaagaactggctgccttcagcctgttcaattattacaagctgtgtaacctttcggccttccaaaatgtttgtgactatttcctataactttctctaatatttctctttaatatttctgccaccatcctgagtgaatcccaacattttggcataaagcctataattccttagcatggcaagcaaggccctgcgtgatctaacctcacctgcacctggtttcatgccccacttctccatgccttcttgtgtacactcttcagcaacaccaaaccatctgtggctccccactctcccccatgctctagcaggcctaggtactttttctgttggtgttctcactctggaatgcccttctccacttaggtctactgagattgggtaaatggttgtgcaagctcttgccagtgaaaggctgaggggcctcaacccagagccaaaatccagcttgtcccagggtgctgtcaatatggaggcagggatacctttacctaattgaatgctcagagggcatatgcttttgtggatttatatgttcaaagtgaataatttttcaaattctgaaaaacggcttgtgctggaggcagccctgtttct

SEQ ID NO: 51531 - DNA, 857 bp, Homo sapiens
tccctctcaggactgtcatcaaaacagtggagaagccgtttcccacctcccacattaattccaccatcatcagaacatagttttaaatgtgcctttgccaaattggaatttgtggaattatgagcagaaatgagtgtgctgtcagctgctggggtttcagagtaagaggtgtgtgtcattttggcaagacagcctagggatccctgggtttccacctaactggaaaatggccaaaggctaaaatttttcctttgccttctacacccagttagcatcataggaaagtctttccaattctctcagccaaaacaaacaaacgaacaaaatatcaactcttccctactccagacatatacagtgcctactactagtgtcttccaaaggccttttaacagcaggagatggtttagaataatgaaaaggaaatgtgcattgaaatcagaactaggtgtacattcatggcccattgctcattcatatgaacttggcagtcttactgtctctgataggcatagcatagaagtcactagctgtgaatgtttacacttgctggttaattctgggtgatgtaattagacaaacacaacccctccacattttagtcaaaaagtcatttgatgacaatttgagaaaggaacatgatttctggctgttgtctgaaagctttttgcctcttggtaaatgataaaactgagtcaagtacaatcaaagaagaaccaaggaattgagtcccacgatagaagtgtccatgttcatggaggaagctgcaaattgcagaggtgacagtggattccacctgggaatggacagtccagagcaactgctcaataacttcagcaatcccaccatagggaggt

SEQ ID NO: 51532 - DNA, 1030 bp, Homo sapiens
aactacctctcacggttgctttcaggtttagaattgacatctgtaatgtgcctgacacgtggcaggtagtcccgaaaatgcagcttttattactgaacaaagctcagaataagtcagtgatttgtccaagttcacacaagtagtgaacagagtaggaactctaaaacaaagtgtctgattctaatcctgtcttcctccgcagcaccacttatagcacttaggcaatcatctattgtaggcaatgggacggttcgaaaatagagcaggtgctacataaatatctccacgtatctatatatatacattttacatatttttctcagttctcttttcttcttaagtgaccagaaaaaagaaaaggtcaaataaaagttggtttttttttccattgaaaatctgctgcccaaattcccagttcacagtccccaacatcaatagtacaggctgcaattaaaagaggaaatgagagggactcattatgcctatggagaaatccatcctataactgcaaaacctgcaaagtaactctgttcataggatatgggccatttaccttctaggctatgactccactgtcctgtggactgggctgaaaagcccacccgagacctctcaagatacctgtttagtttccattttaatttaatgggtaatgagttccctttatggaagatactcactttccttagctctctgtaataatgaaacagggctgctaaagaaaacacagagcggtggtgaagagaaaaccccagtcaaccaggccactgcctgctgaccatgagtcagcaggtagcactgttatgcaacatgaatgctgaaatgagccgcacgatctgagaacaaccacagaagctggagttgcaagaaaccttagagcattctttttcaaaacagattttttaactcattccacaatcagaagtacattttacaattacaagctaacacacatgtataaatacataaacaaaaaactttcataaaacaattgttatccttaccacaggggatgcagtccaatattgcc

SEQ ID NO: 51533 - DNA, 5907 bp, Homo sapiens
ttctccaattatcttgcattctctgaccctttagcatatgaatccattcaagatagtcctactaaggacttaggtccaaatctttgttttaacctattttttcccttttagaatgtgtggatttacttttccttttatgggtgaatcaagaaacaaaagaactccaacttcctactacttaaactaaagacaatgtataatttttgtgttgtaactaattattgttacaacaaaaatattaaacatgtagcaaagatatgtaccagttgtcatgacccaggagtcaatatttatttccaccatttattccccaaactgcagcatgaaagaaaatgcagagatcagggaaatgcagataatatatgcatttgtgtctcctgacaccattatctccagtcagtgactttatccatatcttttgtgtcatttctgaaacctggatggctgtcataccaagtgacccctggccagttattccttgatcagctgaaacatgtgatatcattttctttcatttgctagcaagcaaggaaaggatagtcaattagacagcagagaaatacttgtattggcagctaccatctgcagagttgactgattgattgtggactcataagattataatggcaatcaaatgatcagacaggtctaggactgtatcttggtgtgtgtgtttctttgttttatcttctactactattcccaccttaattttttgaattcagagctatgtccatgtttctagatacaaagatcaactttttaggtcctggaggagaatgacaatgcactttggggagtttgtggcagctcttgcatatttttgtgagtgtgcaagtagtagagataaatgcttttatcctaactcccaagaccttatttccagctctcttgagtaatagccagattcctagctattactcaagttttccttatttaacggaggtttctgagaccaccccagggagttctaggggctctacgtttgtgctacttctagcactttgcacctaattaggttaaaggcggttagccctaatttgtacttaccagcccacatttctttccactctcacaagattccctatctctcacagaaagagaatgataatcacagtatacctgttacgtagcatatgcccttagcattccaaagatatctgttgaattaccctctgtgttgaaaaattctcactgagaaaaatcaaaagccttagcaaagtcaaaatataatgtgtttcaatttgtctatcactctgtcacagaaggaaaacaggctagtttgatgttattgattctctgcaaagccctgctatttttcacccaaaaccctgcgctcttacggctgcttaggaattgatttctggtaagatattcagtttgtttgtttgtttcacagtatgacacactgatggatccatatcacaatgcactatcatgtctatgatttcatgagaatggacttcaaattgctcctttcattgactttgatcacctctcccaagcttcatgaatcatttacaatcattgctagtggttgtcatgtccctatttgaccttgggtaaactcgactttgtcaattaaaacacattccacttacttaaaatgtaaccaagattccctcaggacgaatcagtatagtggttaaaaataggattttcttaacactaataaaaagtatatttctccttcctccttacatactactatgattcccatctgatgcaaattcttccccatacagtatccctgggggtcactgaaaatgtcacagatgtttgtaaacaaattctcttggctgccatcccaccatgttcctcctctcccgcccctctgctttgatgtgttctgttgttgccagccacaaaagcgtcatgaagctgcctatgtccctgaggcactgttaacacccaccaaaaagtgacatctgctaccacgtcttcatgagagacacaggctagctcaccctgctcccaatccctctgtgccactctcttccacagcagccacaaaacagcattgccttagggacttagcatctcgtggtgcttttgctgaaatacctccttcagatttgacgctcagtcctctctctgtgcgatcagacaaaagtgtggtatttaagccataaacaaacagagtggcagacaataggtgattttccagaatgactccaaactcctgtacaaactatttttttctctgtccaaactgtcttctcagaatgatgtcttccccaagagattgatggtccatcatgacaacagagcacctgtgggtatgtgcaagtggcctttagacataccccaatatatctgcatcataatgtgaccataacttagggtcagactaagactcttttcatattaaataatagaaaactagtagctacagctctatgttgtgtcttcctattctcccatgctatgtgttaccctgtccacagattataaatgacatttaacatttttctgttttggggacttctgttgcctagtcagctcaattaaatttcgtaaaaagttattgagcaattccaatatgccagatatttgccagtccatacaatataacaataaataaagcagaaactctagactgtagggttttctagctgattggaaagacacgaaaaagtatttaccctgtagattgatgaatttcataatagggttaaatatagatgggagcacagaagggaggaacttttgttagttcagggatcaaagaaaacttcctgaaggacagcatgccccagtgaagtgctaaaggacaaatagaccttatcagatgggtcaggatagagaatggtgtgggcaggagagcatcatgagccaagattctgaggcatgcagatctgaggcaaaccgagctttggtgttcttgggagaactccaagtaattggagatcatgggatcataaggtgaagcattaaagaagggtagcagtaggggattgcatctatttgtggcttctaaggcttatgaccacgtctttatatttagcttattcccaactccaaaccataaggatttgcatcttctttatgggttttgccaaaaaaaaatttaacaatcccaagtaaccattactattagtaaaacatttgtaacagagaaaaactaagaaataaacaattcagtgggttagtataataatcacttttgctcgctcacctcagaatccaatacagtagacagcgggctctgttccacacaggcattcatgtatccaggattcatccatattgtggcacaactatcttcaataattggtctctaaagttccatgaaagagcaagagaaagcatggagtattccagggaaaggaagatatttggttaggaatggcatatcacttttgcacacattctggtatttagaactcagtcacatatcctcaacctaattgtaagagaaatttggaaacatggtctttccatgtgccctagaaaaaaaatgaaaccatttagtttaaatatatggcattgtctcagacatatttaggagcaaggaaaaactagagttgaccactgccttttgtagtgttgatcactgacccaaaggatcatagaaaaaacatggggttaccccaccattatatctttgtattgaacactaagccatttccttttaataaaatcaggctcaacacaccatcctaggcattgagaatggcagatgactatgttttgtgcctctgtgtctggatctatatgtgcgagagagagctaaacatttaaatgaggccttgtaagctactagagagaatcagagaatgaagtatgcagctttctaagcaagaagagtctgtgagttttattaacgaatactgtagtctgagaactagcccttaacattttccctctgagtctatacttttaaggccattagcaattttttccatatgacaagacgtcacattcataagaacacttggcaacactgtctcctaagaccatttctcattggccatggttacaatagaatcaaattaaatttgagaggataaaaggtacctttttatcttccaggagcaaatatctatctaataacacagcccatgtaacatttatacatagatctaaaacgttagcttcttgggaaaaatgatagaaaatgaggaaggtcattttggctcattatataagattcttgcaaagctccacagacttttgagctaatcctacattttttatgtgtatcatttcagtgcctagctgtatttgtagggttgttttttctaaagacctctcaaaatatcacaaaacatctttttatcaagatctagatgttatatatgaatataaagcaatagaatagcttgtgaaagggcattacatctcaagaaatacctttataatgttggtttaggaatggtattagaattcattttacagtggttatcattttgtgtaagatatttgggtttccaaacttccttcactttctaccctcctcctttcaccctttgggtaattgtaatcatcagtattttcctaatgaggataatgaaagtcaccttcttatagtggtggtatggggatcaaatgaggtaatatgcacataatcattttgtaataaaattttgcatctgttattatcacttggtcttgtccaggcagaaatggctctctctcccctgccctgggtgcatttcttcatgacagttttattcccttaaactggaattctttattataaagtcaggactctgggataggtgtaagttagcttaaggataaactgaatgtattagctctcaaaatgaaaagtctgtgagactaggcttcaagcaaaactaaatttgggtgctcagattatatggtctctctctttcactccctccctccttacttttttccttctttccctctctccttttctcagtctccatctctagttatgttttctttaagagcttgggagactatttctgatcaagagaaagcccatcaagtctaagcttacatggtcttctagctactaatttcagaaggagagaaacacactcaatcagtgtttcttttggtttccccataataactttaattggttttcctgggtgagtcactgtgtcccaggggaatgtgaacagttgattagccagcttagtcatccactccagcagcagtggagttggggatcccaaactgacaaccccagcagaatcacatagactggcaaaagggtgattttcaaaaggtatgaggggcagacacaaaatggcagatattgtatcatattctattccatattagactgtgatcttctgaggagatgcaagttggacaaaacttagtagtgagcagataataataacacttaaaaatattagtggaatagaagaattgtccatctcacttttgactaaatgcaaattagcatggctaatcaagaagataagtttgtaaagcataaaatgtgttggtattacacataagcaactaaacctagatattaccataacctgataataatctcagaacctttcaattaccttagtagtacaaagcaaatttagtaagtaaattgaaagtatggaatttgcattgaattccaatggaataataaataagagggggaaaacaagcagattccttaaaatcatattagatctcagcagttcagtttgtctttttgatctcaaaacccaaggccaggtgcactggctcacacctgcaatccagcactttagggggctgaggtgggcagatcccttgaggagtctgagaccaggctgggcacatggcaaaatcccatttcaacaaaaaatacaaaaaaaaaaaaaaaaaaaaaaagctgggcatggtggtgtgcacctgtagtcccagctggccaggaggctgaggtgggaggatcatttgagtgcaggtggttgaggctgcagtgaaccttgatcatgc

SEQ ID NO: 51534 - DNA, 3937 bp, Homo sapiens
gtatgttttgttcactgatgtatcctaggaacttaaaactgtgtgtggcatacatttggtacttaataaacatttgttgaatgcaagatttgtgcatgcattgtattgttgaatgcaagaatgaaatcacaagggcatgaatgaaaaatagataggaatttatgtgtaatgagaacagcagtgaggcagaagcctatgaagaaaagtgtcaagtgagaaatgcctgcgagtaggaaagccaaaggacttttaaaaataagggtatgtaaaataaaatgtggtttggtttgcatcactacactgtagttctttctctggtggtgttttttaaaaacatccacaaattatttaacacttctcttattgagaggtgggagcctatgttccctctccttgaataaatactccccatcaatacaaatagcagaagtgaggctgtgagactttcgaggctgagtgaaaaaagatcgttcagtggccaggcgcagtggctcatgcccgtaatccagcactttgggaggccgaggcaggtggatcacctgtggtcaggagttcgagaccagcctggccaacatggcgaaacccctgtctctaccaaatacaaagtattagccgggtgcagtggcacatgcctataatcccagctacttgggaggctgaggctggagaatcacttgaactcaggaggcagaggttgcagcaagccgaggttgcgccattgcactccagtgcagacaacaagagcaaaactctgtctcaccaaaaaaaaaaaaacaaaaaacattgtgcagcttctcactggtcgtcccgaatgcttgcttgggagacactggctcttggaatccaggcaccacgctgtgagaagcacaagtcaccctgagagcccatgggtaggcgtccagttggcagtccaagctgggcgcaagcctctgagtcacacatgtgagtggagactcatccagatgattcagccttctgctgactgagtcatctcctgtgaaggccccagatagctagtaggagagctgccatggcctcagtgcactgtttgaattcttgaccaaaaaacaaaatgaaaaaaaagtgtgcttaataaagtgattgtctttttatatcactaatttccatgtggagtttttaaatgtggtgataataactggaataataatctccatcctccaaagtcacacatatgacctgcgagatgaagttatatgtttgtggaactctagatcagcatagggcagacagtaaagggcaaacacagaaagtgaaactctgatttagagaccagccatctggcaggaacaaaaactcagaggtagaagcggctgagcaaaaggtctccagaaaatctagggaaagcagacaactgaccacagattgtcagatggagacttgagataacttataccagatgacttaaacctgagtctcgggggggaagtagaggactttgcatgttaatttgcctgttgattaccaactaggatctaaaatgtaggatgtcagctgtaggcatcagtatcctagaattgtatctatcagctgaccttgtgtcttgaatttgaaatccggattttttttcccaactcttctctctccttcagccccacatctaatactggaagccgggagattagacgtaattaagtgagtgactttggacccagctctctggttttgattcacaacaactccactttctagctgtgaattcttgggaaatttgtgtaacttctccaacattctgcttccacatctgtaagtggagattataaaagtgctaacttatgggatattccaaggattatataaactaacatgaggaaagcactttaagaagtgtctgggacacagtaattcctcaataaattctagctattcaccttatccgtgatcaaacttcgttagccacccttgtcaacagtcttttaaatgtgcctccactgttccgtctacaccttcttatttccttctttcttctccttctccatcctactctccagaaatgctcctgtattatccgtctataaaacaggtcaccagccaaggtaaaaataaccaatgactcctcatcactttagaataccacaaagaccttcccagtgttaccaccccaacctcatcactatgatgcctgtagccttttttcttgtaactgcctttttttcccacaaatgtgttaccttcagcagcaatgacctttgcctgcactttcctcattctctaatgtggtcatttatgaaggaatgttcttggcaaggcacactgaaatctttatgagaacccactgacagagaccttaattctaagaatttttttctgcttcattctgaagtaaaaggtgggtaaaggaatgtaagtgagctcacatcagggaaactccttttaataaatgattttcagtttcttctctaagagcactttaggttaaacagttccctaactactgcagggctgcgctggccactctttcccttctacttcccagcatacggccaggaaaaacaaacgcccatctgaagctcagcaattgcacccattcctctaattctctggaggggaagagataggaaagagggaaaaacaattcaacaaaagtaatcatgataatgagaaaacttttaatattataattattggtgcacgtttgtctttctacctgaacctccctgccacccacccaaatagtgcaggcacacacatgcacacccatcgtgtgatattatcaccccctgacacactaagtatttgtgctgctgttgtttactgtctgtcccctcctcctcatgtcacaaaatgcaaaaccccctataggagacttaggtttttgttcactgttacatatcagtacatagtagtagcagcacatagtaggttctcaacaaatatttgatgaatgaataaacgatgagtgagtgaatattggaaagaactcactaaaattataatcagtaaaagttttgttacttcttaacttcacagccttaagtggggtgttaaacccagatgggtctcagtattctcatctgtaaaaaggcacaacaaggattttagaaggaaaagtcacagaagaaagaaaccactctacccatgtctcaaggatcagttacacaccatcacccctatgaaagatttgcccgtctctccagatagcatctggcattcactcttctagattccctctacactttctacatatgtttactgcagttgattactaaggtccaataatgtgctctagagaagaacagagtttaaagacattgagtagagactccgtctggaaaactaacaagggctagaggtaaaaactggaattaaaccaggggcattataaggactctgacaaaaataagaaacttcacaagaataaaggaaaatacaaaaggcaataagaaggaaacaatgataaatgtgccctgacttctacaaaatcaggaaattatcagcatggagttagcaggtatttttagagcaaggaggttatgtgctcagggcaaccgacagttccatagacattagatctccctggaaagggccataccgacatcgttcattgtgtcgagataaggaggagatgcccatttgtcagtgagtcaccttcgtcccagcagaaatgcttacacttacaaagtgaacaaactagatgcgatattggaggtagatctcaggacttaacacagtgctgaataagaggggccagatacatggtcattgatgtcatagatgaagaggaacagtgccacccagtgttctgaagattgctcctgtccacatttaatgtttttcatgactgaaagaattttagaatttatttctgttaaaacatgctttgagctaaagtacagccggttgattcattcccaagtacaaatgttgcagtcactcatttcgtgctttgagagagggaggataaattacggaagaaaaa

SEQ ID NO: 51535 - DNA, 3998 bp, Homo sapiens
cagctgccatgactcactctaaattacccttcatcctctccccagcctcttttaggactcccctaggctttgctaattcaaattctgctttcttccaagtccacctcaagccaagactaatttctcctcagcgcttcctagctctgatcttcatgttcttcatcttctcctcccagtactgcacaatatcatttcttaatcagaaggttagccctactttttaggacaaaggttctcagtattatcattgtatttaaatcatctgtatatgtgttcgtagatttggctcagcacctaggaatctgcttttcaacaagtccccaggggatccaagcacaaaaggatcctggaccactttgacccactttgaggaaggctgtgttaaacctctgcggttggcttttatatctccatatgggctgtccgcagcccacggcgcctagcatagtgtaggtgcgttgctcagctctctggctcccggtgtctgctcagcttggtgactattagatacctcaattattaatgacacccagagtcaagaagagtagctcagccaagtgcacagagctgccctctccagaggagactaactcctgagggataaggtcgctctgaaagtcacaagagcaaaaggaaattacattttctgccctctcaaaaaatgagcagccatcaccccaaatgaccttagtgcatctcaaataaaccatgctttcagagtatgcaaaacgcactgcaagttaaaccgattgcaaaagaaaaagcccacaggtactccgtgcgctcaaagccatcatcctcacaaacgtaaagtgatgcactccaaatagagatcaaggaaaacgaatgccacgcaggtcaccaggcttggaaaatagaaggcacccgaagttgttctacgtggctgtccccagccacccattccacccgctcgacaagggatcctgggccgagcccggccatccgcgggggcggggccgggacggcggcggcgcgctgacgtaacgggcgtgggtcgtccgtcgcgccgcccggcgaggagtgggctggcggcggtagctgtcgcccgcttggttgcgtgaccgcggggtccgcgtccgctccctccacccttcgcccttcgcccttcgcctcgttccggcctccgcggcccagcaacggccgtcatggtgccgtcggcgctccctgcgcggccccgctgagcctcggtgcggcggcgagcgcggtcgagatcgccatgcctacccgtgagtggccggccgagggccgggggcgttgggaggcgactgcctgcgcgacgcgcttgggccgggtactcctcccgggcggctggggaggctgggccgcgctgagcagagccaggaagtgtctgcgagcggcggagttagtttcgtttcggcttagccttccggagatggcgtgagcccgttgcacggatcgggaaactgaggcccgaacgttaagggaactgcggggacgcgctgttaggaggcggcagagctggtggtaacctgacccgtgggatttcaaagttaaagcccttttcccacggccacacggcttcgtgggactttatggaaatattgaaaataactgcggtaccattgtcagtcccttctcacctcgggccggacgtcgctagtggacgcgccggccccgagtcccttcccgcggccgccagacagacccccgacagcctaactcggcgtccgtatcgccgtcggggcggctgaagtcggagctttctgtggagcttgttaggcagaggcacctcgactgtggcttttggaccacacttcggattcacccgggcagatgattaaaaatgccggtttcgggacccgccctattcccatggaattagtctggagcttgggccccggagtctgcatgtctaataagcgtccctggggttaccaaggcaccccaaagtttaaaagtcactcggtgttggaggatttttagacagacgcgatactacaagtactgctaatgacctattttaaaatgacccagataatcgcagtgtgactttatagccactggtcaatgtggatatgtgcaaactagggaagctcctgatcttgggtagagaggaagcaactttgtcattgatttgagaattcaagtaggactcctttgactaagtgttcaatactatagaatctttacacacttgtgaatatatttcctagaattcataactacttctagttgtccttgttttgtagccatctgggacgctgaatttccaggtcagtctccaatgcacgtttcgtctagtggtgggaaaagatgagttatttcttgatattataaagattgatattttcctgatatttaaggatattaaatttaaattgatattaaagatatttaaatatctttttgagatttaaagattttcctgtggcaaatctttacatagtcctgatgtagagattacttttaactcctcatacatgtgtgggtactgtggattttgttttcttcacacactactgtgtgtccttaactcacgttcttggacttcgcatccagtaaatatgtccagtttaaatttctgttttattccttttggctggaggaatatcatttacaatcatcttcattgttattgccagtttagtacttctaaattcatgttcacgttattcagtgaatatctgagactagcactatgctaatcttttattttctgagaaaccaaaggggaggaggtaagcacctattgaaagttgaggcttcaagtagaatttattggtaacatgccagaattatcctgtgaaataaaatttttagttatgttctagggttatctagcttcacagagtggatatagtaaactcgtttcttttcaaatgttgagttcattctgcaaaatgattttaggatgggccatggtggagtttacatagttaagaatgcagatttcacaccctgactggaagacaagtgaaatgtttgttttatctgtcattgttaatatttgtcatggtacattttttatgactgaataaaaatgtgctgtggattgattgggggtaccagtgtgaggtgaatagtgttcatatttgccttttctctcctttggcagtcacagctgccgaaattgctgggatagtgcagtggacaacaatatttctttgaaattctgtttgtagaatatatatccaacacagagatggcaaaattgttattctctgtaggaatttaggaggaagttcacagctcttaggaggaaaactgtgctcagataagctaagtgtttttgtttgattggttgttttaatgttaaatggttgagaggcttagtgataagcccaagccagttaatccgtacgagttttaattaaaatcaaagggttggaggtgatcactgtggtctctcagactctacaattccgagagcaacccttgctgtaagtcatagaattattctactcttgctattttgttgcttatttggaatattggtactcattgaaactgttgttaataactagaatccagtgaagcatgcagtaaccccactggttaagcaatgatatatctcatgaatattaacagccacttcactagaattattttggagatccgtagactctttgagaaagcaaccacctggaaggatgcctgacaggaaactgccaggacacagaaacaattttgtggtcgtgttacaagcctgtagtctgaaacaatccttaggcacagatttcaagactatgctgctgaatgctgttgcaaacctgtaaacctataatttgacacatcatttttctagaggcctttatttcattctccattcaaaggaccattaagaagcgttttatttgaaagattttcaaactctgaatcggagtttgagttggaacgactgttaaagcttcttcatcattttatgttgtgtatcgggaagctgagccttctgagagtttccatggagtaaaaccatgacttgaacacagaactggcccctataatcagtaaccaca

SEQ ID NO: 51536 - DNA, 1251 bp, Homo sapiens
aggctgtgtatgtgtgcacacctgcgcatggtaattttgtcttttattcacatatttattgaatgctatgtgtcatttattatgctagacactgaggatacggtgctatcctcatacaggacatatggacaccaacaggggtgtcgtccctgccctcatggatcttggtctgatggggaagaaaggtgctcagcacgtagttaaactgatgagacagggagctttagagggcctatggtttctttcctttactgctgtgtttatagttttggtatagtgtctgggccatggcacacattcaatgtatgtttatagagtgaatcaaagaaatgtaatagatgttaataataaaagaaacacaagttgctatgtaaacatgtaagtgagcctggaggaaaagcagttagaggttattaaaatacagtagtctaattggtgggctttggacttggatggtggttgtaggaaggactgcagtgaacaaatgtgaacacttttgaggaaatacaattgataggattaattggatcaaaggattgagggagaaaggggagtaaggatttactcaggtttctggctttatcatatgggtgaatggttctggtttgctatagggactttttggaggaggaggaatttggggaaattgagatggaagatgagtccattttaggatatgatgagtatagtgccttaaagacattcatgttatgtttgtaggagtaatagtgcataaaattactgaaggataggttgtatagaggctaaagaagctgagggcaaactcttgaggaacatgtttatttaaagatggagtgaggcacaggaaccgaagagggagcaggtgggtcattttttaaacaaataccattgcaacaaatgtttgcaggatgagagttatgcaagactcaaatgactcacacttatttttagtagcatttgaatattccaatgtagcaagaagcagaaacactggacagtctcttacagtttgatctgatatgatgacaataaaggtaatttatgaaacaattttttttaagctttaggacttaagaacaattgttgtgtctcagccgtggcagttctgtcctatacgtctggcctaaactgtcttttcacagcttcctagctgggggaggtgattgtcaaattataattgggtgagaggatgtaaactgtaaattgtgcagtttgcaagtagaaattagggtggctccacatatataagctaaaataaataatatagaa

SEQ ID NO: 51537 - DNA, 1160 bp, Homo sapiens
tataacacttactgtgtctaaaacagtagtatgattgccattattttggagatgaagaagctgaggcccaaggggtgaagtcactcgctcaaagtcacaggaagagggaggacttcaaccctggctccagagtcggaaccctccaccattaggctacactgccttccggaatgagtccgaagattgcggcttggagacagtgactggcccacgttcacagccagtaaggagccacttggccggaacgtggtgtgtctggcgccaaaacccctgcacgttccccgacccctttcctggagtccagtgcctttctgcctcttcctccccttcccacggccccgcccattttacagattaggaacctgagctggaaaaggccaggctgtccggccagtctgcagaggacctggtgcagccggggctgcggtgcggagggccgggtggggttagggtccgcccaggcgcgggggaaccgacagcgcagggcgggagcgggcggcgaggatcccacgagacccgggactacttccacaaggggaacgatcgaggacggaaggtggaggggggcttactccagcccatggcgcctctccagttcgctgaccccgcaagccggacccggacctcgaatgacgcttttcacccttcacccctgctcctcagcgcgtccccgtcggaattcaggagccatggcaacggggactctacggcggccgcgcgggaccaaaacaagccgcgtttcctgagctccgcggagcaagcagaggagaccgcagtgaaggggctcagcagacaggggttccccaacccaaacccagtcttcgtcctcgtcgcacttccgacttgccacagactgcttccctctccctgaatcaatggtttagagtgaacaaagtatgaggacgcttctcttttctgtgccttccaggcttgccttccagaccgcctttgactttttcctttttgtgtttgatttacagcttccagagccaacagatctggatttggcccccaactctaccagcggcgtgaccttacacttccttctcctcagtttgcacatctgtaagatgagaaataacctaagaggatcactgtgaagctttaattagataatttgagtgaatgaaagacactatgaaaacaacaggctcactata

SEQ ID NO: 51538 - DNA, 1789 bp, Homo sapiens
gacatttgtatgcaacgttgcacttgaaaaccagagtggtacagtggaaaccaagagaaaaaagatgtttcatttcaatattattttcaatgtgttcacttattggtttctccccacagcaaggatactgtctcctgtgcttagtaaagtttgggagggtaggtattcgataaaagcagttctgctatcattagctgtgtagtcttggggaagtgatatcaatgtagccataggttaaggttattcagctgtgcctgagcacgcgcgtacacacatcttagtaatattcgtctttgtattgtaaagatctccaagactggaaagcaatacaattgtaatacagttgtacagttgtgattgtcatgtgacatatttacagcctagtgtctatcacaaagcatccattcaagggaggtttattgattttgtagtagtaaccatgctctattcttgatgtggagtgggatggatatctaagaaagcatgtaatgcatttgaaaaagtttgccaagggtcctgggtaaaggggttttggtgacgtggttcccaacgaatcaagaataataaacaatgcccttcgtcctcaaatctcaaaggtcaaatacttcacaactaccaataggcaccaagagctcgcgttctttcctccagtaaccagagccccgcccgctagcggtccgtcaacgaccgcaaagccccgcctcctacggcggcccgccaatcggctgcgcggcccgggcccaaccctcgtgagtcacgtgacaaggccaggcccgcttccggcacgtcgcgggcggctgacgtcgccggggcccggcgtcgcgtcagggctggccggcggcggaggcggcggcggcggcggcgatggcagcggaccctgagcgagcttgagggctcggacccagctccctcccgcgaaaccttgggcggatccggcgctgcggccccagctcgctccgctcctgctccctccccggccgctgcctgggcggaggcagaggcagaggcccgggctggccgccctgctcgtgccccagctcggccccggacggcccggctgctgtgcagagaggaggccgagtcggtaagaggcggcggcggctgagccggcaggccgcctggcccccgccgggccgcccgggacgcccccattctggtgtctctctttccggcccgctcccctcccgcctccctccccgtaactcgccggccctattgtctgggcgccgcagctccctcttcccctcccttccttacccccctgcggagggccggatggctgtcaaacctggaggcttctccagctccctgccagccctgtcagcctttcctgcctgtctcgtgccaccccctctctgtctggcctcacctcctcaccttttttggcctggcggtcattctctgaccattgctttacattgtcggtctctatgtcttcttgctcatttcttcttccctctaacttgtcatctccgaaaacttccactgtcctatttcttgccattctttgctcctttccttactgtttttactcctctccgtgctttctgccttgtttttgcttcaagttttactcccagtagactgtcttactttatgaaagttccttaattcaaatccctcttcatccttccctcttcgaacctaagacaaaggaaaatcttgttttttttctggtacttcatccctaagtgtcactgggggattatactcattcaatccatcacttaattatgggctctaagtttgattctagatgttagtgtaccttgtgaactatcccttactg

SEQ ID NO: 51539 - DNA, 694 bp, Homo sapiens
tgtgtatatgtattttcccccttatatataaaaatacataattcctatatatataaaggggaaaattatcttaaatgacagataaaaattgccaagagggactagaactctgtggggtgggatgacaggacgctaacctctcggaaatgtcttgagtatgttggccttctaaagatggggaagtgaacccttaactccatcacagctccaactttctgattgtttcattttctgactgttcttccagttgcagtttaaatttgtttatcttcttctctcttttagttctggaaagctggcttgatttcacaggggagttggagccaccagatcctcttgcaagattgccccaacttaaacgccacataaaacagctcctaattgacatgggcaaagtacagcagatagcaactctttgctctgtatgacaacagtgaacacttaatgaaagaatgtggctttcttcagtcaaagcatttttattatccacgtgatggctaagtggataatttaaaagcttagtaatgtctggtcattcactgatttgtgatgtcaataggatggcaccttggaaagaaaaatgaagaacaactttatcaaggaagctagtatttaaaaacaaattcatgagcaagctgcaaatgagaatgtgttatatgccaaggaacaatgaagtagaatataatgtatacta

SEQ ID NO: 51540 - DNA, 843 bp, Homo sapiens
tcaccctttgatttcagtccactaagatcgatcctggatttctgaactccagacattgtcagatagtaatttgtgttgttttaagccactgagtttgtggtaatttcttagggcagcaatagagaattaatacagccagttttccagaagcgcctcccgagaaacaggctgttgaacctttcatcccactgtgaggagaaggactaatccccagtggggagaaagtcggccagacatcactggaggaagaaagaggaggggggcccctattaaccctgggcctcctggcttctctgtcgccaccgcagagggagtgtggtgattgagaaacaagacagcttcaacaagaccggcagtggggtatgactcaccttccagaagccaaaggcaaagtccagacctctctttgggcaaagcccgattttttactatgcagtggtgaaatccatcctggcttttccactctaccactctccctggttcccagtgctcactccatggcccatgtaccaggctcctcagcaccagctccagcccaggccattcacaccactggactggcttccaagtcattattcccaccaggatgctgcttcctagatatttaatccagtctagcatgtatttattgaataactcctatttgccaggtactgtgctgcggtgggcttcatggataaatgtcttccttgaaaagtcataagagtgtgagttgtatatgaacacaggctagtgcggagaatgggctcaaatacaagctactttcattattgctttttcagtgactagaagaacaccaatatccagtgataccataagtatcgtggttagaatatgacccaa

SEQ ID NO: 51541 - DNA, 803 bp, Homo sapiens
cagatctgtgagaaagcaagcttctgttgttttaagccactgagtttatggaaatcattatggtagcaccaggaaactcatccagttgcctcattccatccccacaacctgcaatggaacatattatcagcccattttacagatgggaaatctgaggctcagagaaggtaaatagctcctctgtgatgaaacactggcaggaagtggagtcagatcccgcccctgcctggatccacagcacacacttttccactctgccgtatttcttaaagcaggctccaaggatgctcttcctctgactcacccggaggtgtttgtttaaaagcaaatttgcaaacccttaccagacacactgactcagaacctctgggtcacagtcctgggaatttttatgttttaaaagcttccaggtgaattccatgcaccagggctttgagaacgtccgttccacaatgtgctgcatttgatgtgggccagctgctaagccctaggagctcaagaatgaagacactctcatcgctacccaccccaacccccggcccaggcccccaggtggctccctaggcatggttcaggggctggggtcactctaggttcctggcacagtctggctttgaaaccgcttctctgccgttttctccacgggtgctttggaaacgctcaacacccaggacaagcacaatatcactccctttcccgtggcagagtcgcatggcagctgctcactgcttcccagcccagaatgcctgcttcctgctcgctgccaacccaaaccagtgcagcctccaagccccacgtgcacc

SEQ ID NO: 51542 - DNA, 814 bp, Homo sapiens
aaaaatgagccattgcaaccctggcttatataactcaaacagagtatgatggggacaatggcaatctggtgtgtgcaagccctggctttcagagatgaccctactgggcccagccactctggccaagcagaaaaaagctaggtcttgttcagcatgcttagttttcaagagaatccaggtacatagatttgtgtatgatttgtaaacattggcaatacattcaaaaatatttttaaaaccactctgtgggccaaactaaatacatctgtgggcagagggtgacctctgagttacatcatttggctatttcagttgcacaaacactactctacgtttaaatgaagctgggtcaggcctgaggtcagtgtggtttggtggaaggattatgatatttacaagctgacagacttgagttttagatcctggctctgccacttgctagctacgtgaccatgtgcacatcacttaaggagtgtcataaaaccaacctcacatgcttgttgcaaaataaataaggaaatgtcaaaaaataaaaataaaagtaattggctgctcttggcttgccttgcaaggaaagttacctcagtcttattcacggccacctttagaggagggagcaggtctagctcctggcctagatcccccatactgaagagtgagggagtagtaaattcatgcatgctctttggacctagacaacccagctggaatcccagcatcatcactcactattactatgactttaggcgaactacttagccttttaagtctcagtttcttcttcaaggaaaatgtgacaaagaaagtttatatc

SEQ ID NO: 51543 - DNA, 591 bp, Homo sapiens
atcacaatttttaaaagctccccaggttcccctggggttcccctgtgcagctggtagggaaagccactgtgctggggactccgggcatctagcactgacctctccctccaaagtctccacatgcagggacagagttccgggcttagcccactcccttctccacacacacacacacacacacacactcttcctggagagacagcgtgcaggcagaggcagggtgactcagaatgcaaagatgagtgattcacccagcgcttcctctgctttttttgccttcctctgtcccctccttcactggtgtctggtggcaggaaatgggctgtggagtcaggtctcctgggtttgagtcccagctgtatcattcaacagtttcgtgaccttgaacaaacgaatcatttaacctctctgagagctttcctgtccatcaaaggagaaaaataaaactcttcatgaagtcattgggagaactgaatgagataatgtatcagatgatacctggcactagatcagagggtcagttgatgttagcatctttcctttctgcacctcctgcacggataaccgcaccccaaaaaaaacaatagccgc

SEQ ID NO: 51544 - DNA, 1267 bp, Homo sapiens
caaaatgcttaaagtaaaactatcacctcccttgatttgaacagtgtatctctattgatgtatcccatgattatctccagtcagtcagcccgtaagaaactcatggttcactaaggcatgccaggtatttactacatgaacatttgcaaatgtcactctgcagatcactgcacaaagcatggcagtactgcaggactctgatccatagcccctaagtcttccatctccccagctgtggggttgtttgaaaggcagattcctctctttgctgccacaaagttgcaggtgggagttaaggggtgaaaggagtcaggaagctttgctaagccctgcctcccagtgcctctctcccctgccagctcatcaggcaccagtcagtttggaaagatccagctgcttcccaaataagaggtgagtctcttggccaggaagccaagtggcaaacatgcccatataaacaagccgatgggacacagactggcgggtgaggggacctgggagaggagacactgccaagcaaccagggctggcagccaccagggaaagagactgagtggctgggccctctgcccaaaggccaatatggcatttcaaaaaacatcacctgccctgatggggcagaggagaggaggggcaggcagggccacttcaacaaagtcaaccagactttgcctgttgaattaaacacagaaatcagctgtgatttctacataccacggcatccactgcaggcgagctgtccccaaccaccaacagagcagggcacctggggtcagggatagagcagagaattagcacaaggttcctttaaagattgtcccactcccaggcctgccaggctggggcctgcattctacaaacaatgtcattttggtttccccaacaccctttgctcttttacttcattctcctttgatcttaggataacattggttactagtcattcacaacttagtatgaatttcagccagggaatttctgtgactcagtgcttttgttttaaagcatcttctcctcaaggatggttaagcaggacttagctggcaatcaagaccgaaacaagaacagcatgaaggacaaaggcaatgacgtgccaggttcccaagtgtcacacaacgcggtgcactcagccacaaaaagacaccatcattactggtggaaacccagttagttctgtccatgactgtcttttcctcctaggtgtatggagcactttaaggctgggtcctgtgctatccatccctaggcttcatggagcaaagcctca

SEQ ID NO: 51545 - DNA, 878 bp, Homo sapiens
gctctttcccagctcacagcctggagttagacaagcaggatccaaatcatgctctgccactttctagctgtgtggccttggggagaacacaggatctctttgcgcctttgcttcctcaacaggaaatgacagtaattccaggaccttcacagtgggatttggagaggggtcagttaattacggtgctatctacacgggcaagttaacagtgtggagtctgcgggctgtgctggtttcctctgtgtctccagcgcccagccgaatgcctgactcgctccagttctcagaaagtgtttactaagtgaaccgcactgccaggtttcggtttcttcagtcacatccacagtgaggatgttaccactgagatgagggcaggattgtaaaaggaggcagatactaagctctgttacaaatgttaatttcaagaagtcactttattaacatttgagcagagataaacactatgaggctcatttctatctcctgttctgcgagcgtggcagagcgagctcagcaggttgagcgagctccctggaagattacagagtctctggctgacaccaatggccctgagctgtctcctcccctagctgagctccagataagcacctagtgctggttgagagggccacgccttaggcaaaggccatgttcaggtcctccttatccttggaatgacaaactcccagaagcctgcctggattatccccggcctccaggagtgctttgctgctctctcacttagctcttcttacatttggcctttcgtgaaggtcagcagcgggcacacatatttactctcaaccctctgagtgtgcgactgcgtccctctcacgtctgcacccccagtggtctggagtgtttgttcagatccctgc

SEQ ID NO: 51546 - DNA, 5714 bp, Homo sapiens
ctatctccaagttgaaagataaaaagcaagtggacacgcggtacttccatcacacagccatcaagggaggcaggaacaacagcctggggtggatccaggaaacaagctccttctcaaaaggtgggcccagagggtgtgggtggcctccaagcgcaatgttggagggtggaaagggctcaggaggctcaccttgggcagaaccccactcactggactctggacagaagagtcaccagcctgagcctcaattttctgacctgagaggtggaaagaatgtcttctacctcagttagctgatgtgatgcattgaacctccaaggcactatagcaaacaagagctatttactgagcactcactaattccctggcactgtggacacagggtggcctgaaggtacagcggcatgtatgactacaccttccttcttctctcccctgtcattccagagcagaggttctcaactctgtctgcctgcaggataccccattcccaacccagccaaaggagctttgaaacaacagcatatcccctgatggagagagaatcgcaggagaccgggcctggaaatgtgcatttcagacaagattttcatgacactattatgcaacctacataagcttagcaaaaagcaatacctaggtcaagcatttgcaggcactttcacagccttgggtaggtttaggacaaagggtcccagactctgcctgccaagaagatgccttgagaatgtcttctgcgggtgctactgacggcaaacacctacacgctgttttccacatgctcagtgctgttctcaggttacacagattaatatttacacattctgatggcatcatgtctgttactctcattttacagaaaagcaaactgaggcatggagctcctgactgccttttcatttgagcctgatttcttcaggcgccccaacatgttgtcatggaaaaaaaacaaaggctctgaagtccaactgtccgggttcaaagtctggctctcccacctgagccatatggcaacaggcaaatcctgaaactctcctggcctcagttgcctcatccattcaatggagcaatacgatccaggcaacgttcttgcgaggatgaaggcagatggagggagacagtggctgctctggagggagagagatgtcgtgtccctccctggccttccttccaggctgagtcaaacctgaaccctgcttgagtctcagatgctgagtcatcacgctttctctcccaggacaaggcctctgagtcacatctggaatgggattctctggggttgggtcccaaggaagaactgcagctttgggccacccgaaaaacacaatgctatctttctttcaggtccatgaggaggcaagttcaggccagcggatttcaacgtaacccaggggggccctcagctcagttgagatctgtcttctgtcatggggggggggcagccccattcagtcaaaggccaactcagggggctgcagcctctaagcccctgcccttcaggctggctttgctaatctctcaagaacacctgatttacacttaaaaaaaatcattccgctctgcccctttggcctcaaaagtttcctcaccagaaattcaatgaagatgcaatttcctttcgcccctccatagcaggcaggcaaaatcctgccaggaaccctttccactgccttcagtcccacccaggagcctctcacaaagctgagctccagctcagttcggcctgggcacatccctccccatccctgtgcctcattttccatctgtaaaatggaaagaagttggactaggtaggtcctgtgtgagttttttattccattccaaatgatcaaactttgttgctccaaaagaacttcctcacaagagacccaaacagacactccaggatccctcaaaagcaaaagccaacacctccacccatgcacagtctattacctcgcccgaaactcaacctgctggttcacaggagaatggggcagaagacccagagccatccacttcatcccatgtgcatatttcaactcctcccacctgccaggcgctgggccaggggccaggttacagggcagggcaggcaaatcctcctccttgcccagatgcagtgggagacacggtcccacaaagctaagaagtcacaggtcaggggaacacccagttttccatccacaccaaaaccctctctctcccttacaccttccttcatccccgacactgtgccaccccagcctggggctggctctgccgccacacacaccacacagaaccggtctgcgtctccagccgtgtgtcttccccaccagaaggcagcccttccaagaaaggcgctggggtttgccccctctgtaccttgcttatttcaatcacatttgtgaaactcaataagaacgccagaatttctcaacaggaagagtctagactgaaaaattcgccttgaaactacatttctgcagcaagaacagggggtttgtatttagatatgttcttttgaggcagcttaggagaaggtcccgtgcagctgatgggtattataaggatgtctaccgccctcctgcctggccactggctgacttctgaatattagatatttcccagtagcttaaagaaaccaaacaaactgaagtgcccccagcgtccgtgaggaaggggtgttcttggatgggcataagataaccaagggccctgcctcccccacccactgccaggcatctcccacttccaagccacagaggcgtgctgttcaggacccccagggacagcagggacaacaggcgggggatatgggggaggggtgggtaaggaaccgacccactaaatcccagctccagctactaatttgacagaggcgtgacagcgtgtttcccccagaaccagccgcattccccaagcccagcccgaaatctcctcccgaggctgaatcagagaccgcggcggatcccccaggaacgtcgaagtaattccagctgttttcccccgtggagggcaggagcggccagcaccagaggcaggggaggggaggaaagcgggggagggtgggcggaggcgaaaatgacgccactcctagctccagccagctcaaggggccgccaaatgtccgcgagacccctctcgcccaggtcacttctcccacgccgccgatgcgccaatcccgggttcctccgggggcgcaccctgcccagtggcgctcgcagacacttgctccggctcgcgtgttgcactgtgacacaccctggaccctccccccacacacacgcttacactcacacatgcacaccgccctgtgtgtgctacgggactgaagcgccaccagcctctcggatccacacccgttcccgacccagtctgcaagccagacacacccacgcccccctctccagcctccttgccagcgccactcacctctaccaacccctcatctacacactcgcgcgcaatctctccgttcccagacacagacacacacacacacacacacacacacacacacacacactcacctagtcccttctgcacccacgtccagcgcgcacccctgccagcggcgccagctgggattcggagacgacgccaggaaacgctatcctggtattttttcggaccgtctcatcgcccccttcccgacctccagaaccccaatccccagctaggggggagatgaatgggaccctgtctttttttcctccctttccgtaattgaaccccccacttcagcggtgtctgcacccaaagccccctcgcgcccgcgccccggggtgaccgcgcacttgcagctccggggcgcttactcctggagtacgcggggctacaaagggcggtcctggcgctccagcggcaccgcacgggcggcccctttctgctccgcgtcgcgcctgggagaagagggcgcgggcttacctaacgcgagggagaaaggaaaggacggtgccgaggctggcggcccagcgccccgcggaagccgagggcggatggtgaactgacgagcttcagcaccagctgggagccaggcgaggtttgtttacgtccgggcggagggcgactttataggcgccgcggccccgcccccgcgcctcgcccctcccagaccctcgcagtcccagcacgcagccgggacacaccccttccccgctccctgctccctcctcccgggcgcgccgggctgggctgggctccggcagcgcgcggcgggcgcccactggagccgccgcctgttgcgcaagcagtcgtaggggcgcggccgggaggggcatcggggcccgggttgtgggtcggctctgcagtcccctccgagtccagggcctcggcctgtgcagcgggcgcgtgtgccctgcccggaggaggcgtttgtgtgcttgtgcgtgttcatgtgcgcgctcgtgcgtgtgcatgtggacttccttgtgtctccgtatgggcggaggccccccatctctgcctcagagtttcttctaagagtctcgttgcgccacgccctgagcgactcccttcacttcctgtaggtctcaccagctcggctctccagccggattcggctgcctgcccagcagccgccttcgctttcgcccgacaggctccctccgattctcagccttccgtgtcgccaaagctctcgctgaaatcctcgctcccgtttaatctcgtccatcttgcccaccgccgcccagcgcttacccttcccctcatcttcccagttctaagcacactcactggaccttgcccactgggctcttctctcctgccccacaagcccagatgagaggattctcaccccttcctattctgatttcctgaactttcatgactcaccctttccaaccttagcaccgtcctgctctgctgctctgtttgtgcgtaactattggcctgcatgttcccatctggccaaagaaaccagcaattctcaacccctactgcatatgagaagtcccagaggagccgccaaattaaaaaataaataaatagatagataataaaaagagagagatggactccagaacagtttaatcagaatctcagggggtgcaaaccaactgggcattggggtttttacaaagctacccaggtggctcctgacgtgcagccaggttgagaagcactgcatggaggaacatgattttatgaataaaggaagtctgactcacagctggcaccgtcattgtcctcaggccacctgcccagcgttgaatttgccactgagcccaggaccagacccagggcaagctcaggtgaccctccctgcgcctccacagacacacacgcgcgcacgcacaacacttcctgctgaattgtaaacctcttttctgtgccaacccatgctgtccccaaggcaggggccatggctttcccctctgattattagggccagttttggagaagggttttctggaacaaaagaaatatggagaggggcaaacagcacctctaggacccaggacatctgtgtttcaggcctgtctttgacactatcgatcacaaatcaacaaatctgggcttcagaattctcactggcaaagggagaggattagattcaatgatctttcagaacctatctagtgctaaagctctgttattctattacaaatgaccagtgtgaagaacagagttccagtgtcatgggttttgctgctagaagagtttggctaaactacaaagtttggctattagctatgaagtttggctaaactacaaagtttggctacattcaagaatgccttgaatgt

SEQ ID NO: 51547 - DNA, 2757 bp, Homo sapiens
agactaacaggcctggctgattcccaagaatctgctctttctgggaggacccagtgccatcaacatctctggacaggcatatggaatgactatcattaaatggtgtctggagcatgtcttatcagaaatgttcttggggaatcccttttttcccctatgctggtcctattgctgttttttccatgcacccctccagaatgtggtggggactcttccttgctggaacacctctccgcggctcagggcccactttagttaagctctgcaagaatgagaggaggctcatccctcctttggctctgttctttgtcttcacctcctgttaccaccactttcctcacctcttggcttctctgagtctcacctgtccaggaagccctccatgatgaaaactcagagttaacctgaagacctttcagaagaaaagaacaagaagagagggcttgccatgactaaatgtcaaccctacacagggacttcacctacatcatttcatgcaattagcactccaactgtaggagttattatatccacattttgccaatggggaagctaagcttcaggcaggtaaatttctggaccaagtgttcatggcgaatgagaagaactaatacttatttagcatataagtaccagggatggttataaaccacttgtatgtaataaccatagtcttcaacacatctccaaaaggtaaggtactgtttttaacatccccactgtataaatggaaataccgaggcagaaaaaaaataatttgccgaagacgtccagtagagctgggattggaacccaggcagtcagtcaagtgtgtccctaaccaccattatctggatgaccccaaacctccatggtttctttttcctaagcaaccaagtgtcttctgaatgcaaaggttggtggggaaatgcttgaagtcaacattcttcctgtgtagtctgaggaacctgacacccagagagagtgttcctggctctaggtcccaggtcttatgactgcagatccagtcttaccacaatccagcccacactgcctctactcaaagggagaaagggcattgctgctgatctcacctcctccctgccccctcggtggtggtgggccaggactctctctgaaacagtgatcatggtttaatcactaggtgagtaaccatgggaggcttcctggctgattattaatagaagctggagaaggtgtgcgtgtttagcaacaggccagcagtttgggatgccaggctggcttggtctcttggtttctggagtcatctgaatgatttgactcatctcctggctgagggcttggcttcttacttctgagacaccccattcccaaggcaaattgctgccttgcctctctccttacactcatttacatcatctgtttccaggctgcctgcaggaactgaagcttctagacaaagagacctgggtttaatccttgcagaccttagctatattgtctaacctcttgggacgtcagtttcctcatctttgaaatgggcatgccaacatccaacttctcatgaggacttatggagatgattgcacagcagacattcaggaagctgccaccattgtgactagtaccattcggaggctgccacgctggaacctgcgggccacaggccctaacaaaactgttcctttgctgcaaatgtcttttccaggtctttcccccttttcttcacattgggagtgacggtcctatggggaagaataatgtgttgcaatattagagagtgaggttcttctttttgtttttttcagcagggctcttgggaagaaacctggccatttgagcccactttacctgggggtcagggtgactgggcctaaagcaagacacagtcattgctggcttttgttttgataaaacttaaggcatgaaaatatttgatcaagaattccagaagggaaggagagaaacttaaagttggagaaggaagaacactttgcctgagctgggggcagggtctggggttctgttagcagcagggacccttgctcctgccctagggaggtagacaggctgctatgtcctcagcccaccctctctggagagcctggtgcccaggcagcaacccctgctctgaagaaaccctgagttccccaatgcctgcctgctctgtaacacaacccgtgaaactttgcttgacattggtgcaggggaactgggtgtccgctcatgacagagactgaatttccccactgagccagcggaatgaggactgcaagtccccacggactgaaaaaaagtaagaaaaatggatatttcttgcacacctgaacttgtgacctcagatttttgcccaccacccctgtgttgggacctctgcctcactgcaagggccagagcaacagtgcatgaagctcccatgtagaaaacaggtcttgagaagaaatgtccatgataatacagtggctgcagttctgcgaaggagaaggctagacctgtgccgtttaatacaacaaccggtagccacacaggtctgtgtttaaattcattcaaaggaaatgaaattaaaaattagccatgtttcaagtgctcaataacccttgtgaccagtggctacggagactggccagcacacagttctatcactgcagaatgttctattggtctaccggtttatttgtctagacaattccatctagagtaaggaacacggaacaattccccaaaaagcactggaaaaaaactttctttaccctctgcacaacaggtgaagattacctctgttttcagggacagttt

SEQ ID NO: 51548 - DNA, 1467 bp, Homo sapiens
acccattccatagataggaaactgagttctcatgagcttcagtgacttgtccggagttacccttaactgttgagcatcagagctggaagctgctcccctatctaacacagaaacccacactgtctttccttgggctacgctgtgttttcaggaaggaaagggagtgaaccgtctgactaggtgatggctgatggaagctctctttttcctctgccattgctgggttttctggacagcctcctcgggcctctatttggcttcgactgtgggacacaaccttggctttcgccacagacagctgggtgtgtcctccagttgggaaagtttggtaaagcctgcgttttgccccagacagataactcaggccagaagcacgttcttcatggactcaccttgagaaaaccacttctctgcatgcagaggcaggcctggatgctgactcagggctgcctggatggtctggggttgctcattctcacacaactgggagtattatgacctgtggtctgttggccagcccctcacctgtgagcagagactctgaggggcctatccaggctcctccttggagaaccggagccacttctcccctctgccttgcacccctccatctccacagtgactttgtgctaactttgcaaaggtttcaatgcttatcaagtaactttgaataggaaatacatttcaatagcttacaaaataagcagtttcaaaaggcacacaggaaaagttcttattcccatttttgcctgctatccactgagttccccacccccgccataataaccacctttattatcttcctgagattcctacagaaaacaaacatgtataaaggtatatgcttatcaccacgcacttccatcacacaaagtagcatacctaaacacctcttgcgtcctatttcaagtaccaatacatcccgaatctcttataatatataaaaatatttgtattctttttggcatctgcatatattccacggaatggatatactaggattatttaattagtctcctcttgagggacattatgtatgtttccaaggttttactacaagcaatactgcaataatttgtcacttagtaactgagcaagcttatcagttgggtaaattcccagaaatgagatcgatggctcaaagggtatatatgcttttatggctttgctagtattccaaaattgccctccatagagtttgtaccaatttacactctctcctgcaatttaccagtttctacccaacctcacacacacaatgtgtggtcaatatttaatttttttaccaacctgatagatgaaaaatggcatctcagtgttgtttcaatttgattatctcttatgttgtgtctttctgtattttaaaaaccatttatgttttttactgtgaactttctattcatatcttctgcccatttttctttttagttattactctttttatcatttctaagagctctttacata

SEQ ID NO: 51549 - DNA, 1492 bp, Homo sapiens
aggaggctgaggcagatgaggcagataattgcttgaacccgggaggcagaggttgcagtgagccaagatcgcaccactgcactccagcctgggtgacagagtgagactccgtctaaaaaaaaaaaaaaaaaaagttcctggcacaaattatacaagtgctagctattatttttattatcattatttactattatctacctatctcccgccaaaccctgtattaaccacggtctggctagtgtgagttacataggtgtactaccctaccctgcatccatcatttgtttactgtacaaaaattacttcatatcccaccctacttaaaaatgtgctactgaagtcaagctaagggtatgaaaaaaatgtgccggtggacattcatgcaagtaaaacagtcgtttatgatgatctaagctcagaacctagctacatgttacatagacactcagacgggcttttgtgcacactgttaatatttcctaaatgttctaggaagcaactacagtgtaaagtgagagaagcttgtgctttgtttggtctggagttctttcaagagtcacttgctgtttgggaaaattacaacactctcagcaattctactcatagtctctgaatcaccagcaaaacacacccaagttggtctgtgtttgtaagtgtgcattcacagtggttccttatttataggtgttgggaatctgattgtttcatcatgtcttccagtgtggtcatgcccaagcacttgcatatttagaaatatactacaaatcatttttattccatttctcctttatatgtaaaagcacatcatatctattgtcttaaaattacatatgtaaggagatcataggatctataatttggattcagatagtaaagaatatctactttacaaaggggaatggagtcatgagttttagttcttttctaggaaataaatgggtcagaaagaggaagcttgcactggcagagggtgtggtggaattccaggtatgtaaacagcatttagagaagttaccctatgctcctctatcattcttccctagccttctgaactgtattttcttccagcttctaagacacaggcagtatctatgcatctttgccttttaaattatctagaaacaattacgtttcttggtccttgtatcccaatgggtttgggtttttttgtttttttttagaagaaacagcactgggttaggagacagaggacctcagtttgagtcttctgctggtgacctcgggacactgcacttgtctgggcctctgtttcctcatctgcaaaagtgagagtaatcacctcatttctgagcggggagtgttttgagctctgtaaggggccacgggaaaacaaggcagcaggcccaggagggccaagaccacagcccctggaaataaatcaggctcactgcagagcaaggcgtgctggaaggagctcagactagctctgccccacagcaggccctgggactcaggtctgctctctgagcct

SEQ ID NO: 51550 - DNA, 695 bp, Homo sapiens
tatattaactgggaccttgaatgacagaagtttgagaagccctaccagaagctctcagtggcctgctgctgtgtcattgaaatgtatttcagtgtctaagagaaactgcattgtcctcccggcagccctggactggaccctgtaatatcatgagctactctggaagaggagagacaaagttcactgctctgagcagcagggtctttggttgccatgtgactgaagatgggtacagatttttttttgtaaacgtaataaaaatcaaaaataataaaacgaggtgtgatttcttccatgaaaaaccataaaatctctctcatagtctcccagtctgaatgcctccttccttctctctcccctttggctcatgaatttctcattcctgccaaataggtcggttgagttggaaacattaattgtttgctctagtggatgccaaggttcctgcctggccttcctcatctgacccaacttcatgtgcctttcaaagcccagcttagatagccccttttcttggaccctccctgctgcccagccatgcccccactgcacacatgcagctaggtgaggtcagtcactgcctcttgagccctcctcagctctggggagaccctcctcctctcagcacctgctcccatggccttcccccttagactctgaggatcctgtcctggaagtgggggccttgtcttctc

SEQ ID NO: 51551 - DNA, 852 bp, Homo sapiens
ggtggataacttaaggccaggagtctgaggccagcctgaccaacatggtgaaaccctgtatctactaaaaatgcaaaaaattagtcgggtgtggtgtggtggcacacacctgacacatggaaggctgaggcatgagaatcatttgaacctgggaggcggaggttgcagtgagccaaggttgcgccactgcaccccagcctgggttacaaagcaagactctgtctcaaaaacaaaacaaacaaacaagcaaaaaactgctgctctttcctctgcaggggctgcctggccagccctggtcaaccttgggcctgagaggagccaaggtcagctgggcagtgaggtgggggatatgggagggaaagaaccagtatctgctttttttctcttctagttaaataaaagctcaaataacaaaggtgctacctaagccctaagccctcgtgcgcacaaggccatatccagatggattcgctaggctggttggtcgaactcctctggagacggggccaaagctggcaaatatttaaccagggaggggacgggtaggtcccatgcttccccagacctgcacgactcagccctagcgatgaccccaggtacttggaaaaagtgctgtgtgagatttctgcctgaatctgcctccctgtcccctaccactgtggtctgggggtgtctccaagcagctgcaagcctgaaaagtgcaggatccatcttttgctggaaagaaaacttctccagaccctcagcactgaacagctgaggtgaagaaatcttctacaatcagggcataaacgcttagagggaaggtttattgtctcttctttacagatggggaaactgaggcccagagaa

SEQ ID NO: 51552 - DNA, 1254 bp, Homo sapiens
ggggaggaaacagtggaaactcagaggtgcagacatttgcctaaggatatacagaagataaggagcagagctgacatcagaactcaagcttgcaaatgtgtatgcgggccaccatgccacatctgccacctctctcacagcactgctgggggaacaggagaagcattggaggtggcaggctttgccttactacacatggcatatgcattttaaataaggactttgatctggaagcaggagagcatatttattgcctcaactcagcttgatttgggctcttttgtcccacaaatgacaccaaccctcactggcctgaagaccttgcctgaaagagaaagagcagtggcatgaagtcagaagaggtgcgtttacctgccagctttgcctctgtctgtgttctctccctgagcctcaggaatcgcacttcagtaatggttttgctatgagaatttggaagcagcacgtgtaaaaaccctagctcagattgggtactagatagacatcagcagtgaagattcactgagtttgccccagggcaggcagtggaacgggtacattaatgcatatcccaaatcctcacagccacccagaggtagatcctgttactgtcatcacagctacctgatcagaaaactgaagttccaaacacaagaactgcattgcgagtggattttcaacccaggtgagtcggcagacatgtgtaaatgctagatttgaccatttagttcatgacacagcacagcccatgaacttggagtgtttacataagaattcagaaatgcagactcagggcaggcattgcctgggtccatgtcctttccccctgggctgtctgcccctggactgtttataatgttgctagagtttacttaatgccaaatgagtaacagactgttcaccagcacttgttttgtgactctcacttttaaaccgagttggagtctaacccgatgaggcccgacccagtaaacagcctatggaatgacaaacatttctgttagccagcaatggctgcatatgatgcctcccattggctgaaactgcccctttgtaaaagagatggtagtttggggatgacataaacaagggtagaaaaagtcaattcctgcaaagcttttttttttttttttcctgagatgtagtcttgctatctcccaggctggagtgcagtggcgcgatcttggctcactgcaagctccgcctcctgggttcacgccattctcttgcctcagcctcccgagtagctgggaatac

SEQ ID NO: 51553 - DNA, 1457 bp, Homo sapiens
gaaatcccatctcttgtaaaaaaatacaagaaccaaaaaaaaaaattagctgggtgtggtggtatgcacctgtagttccaactacgtgggaggctgaggcaggagaatcgcttgaacccagcaggcagaggttgcagtgagccaagattgcaccactgcactccagcctggtcaagagagtgagactccatctcaaaaaataacaaaattcttggcaaagggaatagcaggtgcaaaaagccctgagtcagaaacatacttggcataactgaggaccagcagggagtccagtggggctggagcagaagatgtgaggccaaaggtatggaggtgaggttggagagggtctaggttggccatggggcattgatggcatcagtgcatttggggtcttaggggctatgaaaggacttggttttaaccctgagaagatgtagtgtagagtaaccagctgacccagtttgtaccagatggagacgattcctggcatatgggaatttccatgctacaatcaggaaatagacaaaagagaagaggcaggaagactcaaagtatgaggcgattgcagtaccctaggcatgggaagatggcagcctggcccagagaggtagtcatgaggcaataagaacagacatgggcaatccctgcatggcatggtttcccccagctgcatggcatgggcaccttacaagcttcccaagggtaattttgattacacaagacttcgacataaccagttataaattaactgctgcataaagtacaacttccttgatgccatatgttcggcaatgtcccctgggtcccattctgcccagcaaccacaggcaaatgggcagggtttgagtccaaggggtcctcatcatgaggcttccccctgccccatggcaatgtagaatctcctctgccaagctggtttcaacttcctcccacttcacagctgttgggccttaaactctagccttaaacaagaaacacagcactgccgggaaaacccaggaaactggcacaggctccctgaactcagtgattcccctgctggttttcttctcatgccatatgggccagctgaggccagttcccacagtttgcaaggagactccacggttcttggacacgtgtgtcttggtccctgtggtgaagggaccacttccccagtgggagccatggagaccccctgctctctgtgtccatgggttactttggcagtggttccctagcactggctagggactggacattcagagagaactggggcagcccagccccgcccctaggaagagagatgcagcccgcagggagggagacatcacacacacttcagttcagttgcagggagccaaagttctgacagatggaggcccaaggggatggggaggctcagaggaggcccgggttccttcctggaggaagtggcagacagaggaggactaaccaggggcagaaggggagagaac

SEQ ID NO: 51554 - DNA, 2761 bp, Homo sapiens
atctggtgcccagctggggtctcacagcaacccttgttactgcccctatggaaacacaagacctcctggggcaacgaggtgagggtgtacctactctcagcatgccttttgctatccactcccttttattcattcaacaagcatttcctgagggctcaggaattgggggtatagctgcaaacggggcctcaagggccctgccctcaggcagctgacagtctagacaggagacacgcagtagccagatgagaaaccatatgactccacagattacccaggcacctgccatgtaagggggaagccacctgggcacccaggaagcccctgctgctcacagccatcctctcctcaccttcagcacacactttgccttaagagggagaaggaaactaagccgggggtattaaatgaggtcccaagtcctccatcatccaaatcctctgcatggcaaagccaggcttctccccagcgagaatcaggtgccctccctgctccaggctggcccgctgcagtcagcctcctctgagccagcctcagcttctgacttcacggaggccctgccatctgcacagcacatgccctcaggtccagaagagactgggcagagcaggtgttcgtatccatttttcagacctgcaagctgtggctcagagagcaaagagtcccacccagggttaccgttgctggtggcagggcctggcacctcacatccatgcaccttggggtagaattataggcctgtctcctccactgagctgggctccaggagggctggggcagggcctgggttcaactcctaaaccccaagtgggcccttagctgggacctgggaaaccagggtcttttccccgtcggggcttgcccaggccatgggtgcttgtcactgcctggcacaatcccaaggccactgttccaggctggagaaggggagggcagtgggaaggctgaaggcaagggagggctgaggctggaagccacctcccatcttcctcccacatggagacgtgcagcacctcacgcccctcccaggaatccctcaaggcccagaggtgactcagcaacacgtgagctaagctgtccgagctgtgccccacctcttgccagatgcagagcccagtggggggagggaacgtgccacccgccacgtgcacccctgcagcagctcagcctgcagcaacagagccgcccctgcctctccctcccaatctctctcttcttctttgtggggacctcacatgttccttctgcctccattcaaccctcacctcgctctacaggcattaaacgcaggactggtagtttgctgtgctgatggtgccacaaaagctacctcctgcaatcctctctgcaatcctgccaggccaagtggggaaactgagactcagagacagtttgtgacttatgcaaggaaccgagattcaaacctagctcagcctaaccctgaagactgtgtgatttctctttcatgagccatgctgagtgggatcattgacaaactctacccccttttgcgcattttacagagtgggagggaagactgaggcacagggaagggaggtgactggtgggggagggaagggaccagcataatgttgtcctaggacagaacggtggctctctgtgtccccagggcactgtggctgacactgggacagactccctgccctaggaatgtgtggtgaatgaatgagtaggtgctgggtgtgctctttcaacgtgatggtcacaggccacatgcggctatggggcacttgacatgtgacaaagaaactgaatatctcatttgattttattttaaatgtaaaatatcaatactgtctacagttgatatatttcaagacatacagcatcatttgcaccatgctttagcacttgcagagcagtttatagcctccatctgctctttcgattctcaaaactcaccaagacccacatctccactttccagaagaatgtgaagttcagagaggtcaagagacttgcccaagatcacacagccaggaagtggcaatgccagagaacctggccaccctgactgtctgccaaatccctttccactttgtgctttagtcacagttgcaagcgcttatatggcaggtccacctctcagtgctatgcctgcattacctcaatgattccatccatttccctaggggaaaaggacaccagtgttaaagttctaagatgaggagacacagacaagctgaattctttgcccactgctgcctggttagaaatcagcagagctggggtttgcatttgaggttctggagctggactccgacctttgttattacgtgagtggcctttgagtggtgtgtggggcgtgtggagtcagcaatgctcctgtcgctgagcaccttgggtgacgcctgagtctctgagcactgggaagccactgggaggtgttaagctcagaccatgggactttaggagagggctctgctgaggtctggggagggacagctggggtgagttcaggacaggcggcgcagggggagactgctcaatagccaagcactggccacagaaaggaaaaaacagaatgactagttaaaggacttggctgcaaagtcaggctgtgcaaggatgctgtcccagcacagatagggaagggacacagcccggaatcccaggcggcagccgcactgccacgtggaggaacaagaaggcccatgcagaatgtggctggaggcaaaggtgcatggtgaggaacaggcggggtctgtgggtggagccccctatggtgcagcaggctgct

SEQ ID NO: 51555 - DNA, 778 bp, Homo sapiens
gaagaatcaactttgtgtcctgggatcccctcttccctgctgtgtgacctcaggtgggttgcttaacttctctgcagtctctggtactcccagctcagggatgcactgaagagaagacacaccctgcctggagtcaggagcagcacagtcctccatgcaagccagtttcctccattccacttcaaactcaaggcggtcctttcctagtggtacaaacaggaactgagcaggctggaatggctgtttgaaagaactttctggccaagagggtgtgtctacacaacttggttctctgcccccagggatctgggaaaagttccaggcctgagcaagtttatcaaattcctttctttacccacccagccttgaatttcatggaaaacaaaatagagaagaaaaaaacaaagtagcctaacatttgctttagttagtgcatggattttaaagtctctcgaagctgggtttctgcacttcgctgtctccttactgggtctcctgggtaagatatttcagtccctctgagctcagtttccccatttcctgcacgtaaaatgggttcagtgatgaagctcctgctctgtgttaaagggcgagtgagccatgcccgagagcgtgcagcacagctcttggtatgacgtcagtggtcacggtatgacagaactggttgttgttgccgtggacagcctttttcacactctgccacagtgtctcctgcaacagttcttggctctagccctatttctgtgttcatccagaaagttctctttcttctccacac

SEQ ID NO: 51556 - DNA, 1238 bp, Homo sapiens
actaatcatcctccttttagagatgagaacattgaggctcggagacactgggtcacttgctggaggatgtacatcagggatgcctgagcctgagcaccttgccttgtgccacatgctggtcgggacacaaagcccaacctgatttcactgggagggcaacttctgcaccactctcaccttaagcatgcccccagccactctatgcttctctcttagacaccctgggtctctgggagcccttgggagaaaactctcaccacctttatctacacccacggactcagaggaagattttcaattattgaatacttactaagtgctaaaaaaaaaaaaatctcacatctgctttgctccattgtatcacatgtcccttaagacaggttgcagagtttatggttaataagtaaaccatacttgttattgagtggacaaagtcacgtctcttgcagagttggaagtggaggcgctaagaggctggttgacattcccatcccacagtggataaggaaagctgggacttgaatccaaggctagctggctcagggctcaggaccctgtccccagagggagccacacatcctcaatcgcatcaaatttacccctgaacccctacccccaaaccctgagctcaaagtccccagggagattaaggctaatcagctgtgtttataaaaggcaggtatagaagcctccggaccctggttactcattacattgtactaaatgctgatatcgcaaactctcataaataggccaaagggtagtaagtcaccaaaaggccaagccagacaaacaagagccttgctggataaccaaggccctgccttccaggcctgccagctgcccagcagccatggaggggccaaaactactgcctctgccaaggtggccaagcatcaaaggctgggcttgtttgctaggcgtcgctcatcaggaatctgaaaacctggcagccgaaaggagcccttgactttggtgccaactcccagagcctcttaaaggccccattgctgggtgactttaggaaagttgtctctgagtcctgctttctctgacgccatgtggctcactgaggggaaatggagaaacgcgctttcctcctgccttcctcagggacatctggggggcttgactgtcttctctcccactggactcagggcctcagctgccaccactgctctggtcctcaggctggatggaagtcagggccattggtgacattctttggtgcccccaag

SEQ ID NO: 51557 - DNA, 1671 bp, Homo sapiens
tccctgccgagggcctgccctggtctgtccaccccactgagcctgcagcactcctgtcccctggagtccctgccgagggtctgccttggtctgtcccactgagcctgcagaatggagcactcggcctgtgttcgctcagcactgacaagggcagcaccaggagcctctcaccagtcggctccaagtccaggcctgtgatatcgaggagaggcatgagggagctggttagtgcccctccactgttccggaggctccaaggcaccttccagttttcttacagctttgattggacaatgtagctggttttggctccagagcttgattgaaagcgatgggtatcgactccatggggagagttaggagccaacaagccacctttatctccttctccccttgtgcagtgaccttgaaaggcacatgctgaagttgaagttggcaatgtcccaagatgaaaacagctgggtagcctgagccgccacatgcagggctcacgtaggacactgcaatttccatcagactttgacccggcagtgaagaaacctttgttgttccatcttaggttgttgggattgtggagtttgtcagtattgtagcagcagcctcttctgtcctgactgagacagaatcagacctggtttttaaccctggttgatcagttatgaactgtggctacagacacataactaatagtctctgtgcctcagatcttccatgaggataccacccccatgtcattcatgggggttgttgtgagaattaaaggagaaaatgcgtgtgaaatgcttggcacacagaaaggactcagaaaagtctgcctgccgtctttccttaatatatactatgtcaccttatacccattttatagattaagaaactgaggttcaaagaagtcaggttttccccattggtcacacagctaagaaatcactgcagagtcaaggatgaagggtgggagagggaggccaagtagaaacaccaaggtgtggaggtctgggcaggcaggagccggtggtgccacgtggccctgtgaagccgtgggcagctggtcagacactcacccttgcttggggctttgacattttccaactggacacagacttcttctcaatctattttgttagctggatgacagagatataatctcctcatctggaaggtgttgtccttgttactatctaagatcaagttcttttaagttctggccttacacgtgggtgtgtggcttttcccttgaggttttcagcttgtgtctggttcccaaccaaaccccatgttgaatctggtggaaggtgggtccgttgcgccctctggtggccaccatcaccaggcgctcttggccaaggtcctaatgaataaacctggccgttgggccggaccagctctgtcgccgtgagccagccatgggcactcatcttcaaagtgcttttctctggagcaacaccgtcccctgtccccacacccctggggagtatggcgcacttgcaatctttacccgggactcaggaaccccagcccttgcgatttaagttctggctacatccctaaccccctggtaagtcacttaacctccttgagtgaagctcagtttcctctttaaattcccctctcgagagaccaatgcctcttggcaggattgttgcaggattaaacgagcttaatggaggtaaagca

SEQ ID NO: 51558 - DNA, 622 bp, Homo sapiens
aaaaatggggaggttgactctatctcaaaactagctagcccagtccacagggcaggataatcctgatggcgtgtagccacatttgctgcaaaccagatgtctgcgatggatataatgatacccccggggctcttctcaggggtgaggacaggtgctggttcctgatggtgcatggctggtgtccagtcatctttagctgggcagtggcccctcgaggctcgggcttccctgcacaaggtatttttgatccttgccagcggagggagagagagttatcttggtttcctttcacttgttttcgggctgcttcaaagcaaacatcccagttccaaatgttctttgtggtttgaatcctggcagaggccagggtcacatccaagtgggactggcctctagcaccaccttctggccacagcagagaatgggattccatcaaagcctctcaaccagccgtttccctaaagaatcacccagatcttaactgccctctccaccttctttttttttttccctcctattttacattctattttctcatatccagcttttctctctaagcctaaccaaatgctttggtgaatgatgcttggaaaagctggagttttaaaaggcattcatccat

SEQ ID NO: 51559 - DNA, 557 bp, Homo sapiens
actttaattaacagtacttatggggaggtagataggcattaaatctgtggttcttgcaaaagtagcaaaagttagtgtaatggaattgttccagcacatctaataacagaagggtggttgtatttattgaacacctagtatgtgactggcccttggcctacaatggctaacatttcccagctatgtagatgtgcactgtttcagacacttgatgtggattaagccattcaatcttccaaacaatctattagtaggtgacttatcatctctccatatttacacaagcacaaagaggtgaagtcacttgttccagggcacacagctagtaggcagcaaagtcagtcacccaaacttaggtcaccaggctccggagtgatgccaacgtgccacaccaacagatactacctaagttgtctcactgcaccttcactagagacctttcgagtcacatactattagtcagggttctctagagggacaggactaataggatagatgtatatataaaggggagtttattaaggagaaggccaggcacggtggctcatgcctgtaat

SEQ ID NO: 51560 - DNA, 731 bp, Homo sapiens
gccagcccaatgtcacagctaaaacactgcaagctggaactgcttacaaccctcataactctaagcccaggtttgtttcctaagtcatgtgcccgatcacaaagaagaatcaacatccctcactgattatgagatttgataggcaggctctctaagaacaccaggtcaagggcaaaaggaatgtcgtcaaatcagactccaggcatccagctggagggaccctccagaaagagatagagttgatctctgtaccttcagggtgaacatattagttcagcaaatacacaaaccactttctctgagcagaagtgacaccttggcagcttcctgcccactggcataagagctgttttcctgctgattggcagcaggctagaatttgccctgtgccaagttcctggttaggactttattgaaaccattatggggacgttttcagtaacacagtggctggacagtcccatggatgagggccagcaagccccagtccttctctggattctgctgttccaagctatgtgaccttgagcaagtccctgtccctttactcctctaagctttagtccctgccttgaataaaggtgctggggaagagcccaccaaactggtggataactcacccagtcttgcacttttttatttttttattttattattttttttgagacagagtctcactctctcacccaggctggagtgcagtggtgcaatctcagttcactgcaacctct

SEQ ID NO: 51561 - DNA, 836 bp, Homo sapiens
aacaaggaaacaaataagttattaacatcttgaggacatagctctcatcttattctgttttacctccagtgctcagccaagtgccagtgagctggaaggcactcagtaagtatttactaaatgactgaatgaacaagaagaaaggaaaaacagcctgaatgagaagctcccccgctcttcatttcactcacgccacttggatccatcctcaaaatcaccctctacacattaatccgctaatccttctctccccatcagcctttcagatactccagagtgctcccaagtctcctctcccctcccaccccaaacaacccctgtttctgccactgctgctcttaaaggttatcagcaacggaaattccaacagctcctcgctgctgcccatcggaatattgaacgactgccaggttgtcctcttatctagtcagagtgccctggcctgcattcggtctctgggccagctgataacacatttttgttgttggaggaaatgctttagctccaacggggagtgtccacccatgtgacactgcccagaaggaaaacaggcctggttctctgaggggaaatgacagcagccacagccccctgaagaagactgaatcagtccctgtgtatcctttgatcaacagcccctgctctccttctcacctccctatttgctctttcctgtccgtcatgtgactttgttctagaaacatttcctggaagagacactccttgaccaccacacccatgctatgccctgccctgggaccccctgcccctgcccacaccatatatatatatacagacatatatatatatagacatatatatatatatagacatat

SEQ ID NO: 51562 - DNA, 723 bp, Homo sapiens
atgttgattccaccactgaggtgaggagagtagaagatgaggctagaataccttgctatgacaacaaggcagcaagtgctcaaatgacgatggagaaatgttagagacacaggagccaggccctagtggacagatttggggcaacgtaaatgtcaaaataactaatgatcacaaaagactgcaacctattgaataaagttaaaatctgtgagtccacactgatataaagaaaggaagggctgggcatggtggcttacgcctgtattcccagaactttgggaggccaaggcaggcagatcacttgaggtcaagagctggagaccagcctggccaacatgatgaaaccccatctctactaaaagtacaaaaattagctgggcatggtcgtacatgcccataatcccagatactcaggaggctgaggcaggaaaactgcttgaacctgggagacagaggttgcagtgggcaaagatcaagattgcaccactgcattccagcctgggtgaaagtaactcctccatctcaaaaaaaaaaaaaaaaaaaaaagatgaacagaggaagaaaatttcttctttatagtaggaaaccaactaataaatgaaaaagaaccagcaaaatttaaaaaatcaccatttggcaactatgataataataaatctattcaggcaagaatcatcaaaagatgctaaaactaatgactgatagactgaggactaatcagaa

SEQ ID NO: 51563 - DNA, 868 bp, Homo sapiens
atatcttccacatcctccatggaacataatcaatggaaaacaaaacaaaacagaaaagacagcacatctcacttgtgctgcggacagattagtcactttacctccataggctgagtgaccgtccatctctggtccccaaatggaattgtcctgacccaagctcaatgcatttgctcactgcagctcttgggggtgttaatttcctctcattgacatttccagtttaggaagatgaaatctgaaaatggtaccaactgaaagagaagaggagaaaagtttaagtcagttttgacaattagtccatcctctgcctttttaggatgactcaagataatgaaaagatattcacccacttattccactcactcacccaattatttatacagcactatctgttaaacaaacacctattctgttcccggcacagagccacacaccagaacaggaaggtgagtaactcacaactcctctccgcagggagttcagactgggagaaaacagaaaaatacacaaacaattcaggacaatgtaatacaggcggcttgggcgcctgtaatcccagcactttgggagaccaaggcaggcagatcgcttgaggtcaggagttcatcaccagcctgaccaacgtggtgaaaccccatctgtactaaaaatacagaaattagctgggcatggtggcgcacacctgtagtctcagctacttgggaggctgaggcaggagaattgcttgaacctgggaggtgaaggttacagtgagcccagatcgtgccactgcactccagccagggacagagagagactccgtcaaaaaaaaaaaaaaaaaaaggacaaatgaccaactccatctagaagaagaatttgaacagga

SEQ ID NO: 51564 - DNA, 984 bp, Homo sapiens
gtccagataatttttgtatttttagtagagatggggtttcgccatgttggccaggatggtctcgatctcttgatctcgtgatctggccacctcagcctcccaaagtgctgggattacaggtatgagccacagggcctggcctgaatccacatctttatctgcaaaatcaggaggaccgtcagaagagttgaactgagggccaactcgggtcagggctgtagttgctggtgtctgtgaatgtcgctgggttgttccgggtgtttgagctcttgaccactggcagttctttgcccttgttagggctccagcacactaaaggcagggaaggagaatagagtcctttaatacttggccaattcaggggatttattttgggctccagtcgagtcttctaaggatctaagaaaagggtttctttctttctttctttccttccttccttccttccttccttccttccttccttccttccttcctttctttctttttttttttttttttcccactgggccttttatttccaaaaaggtaaatgtccaattagatagatttttgtttttttatgtggagttgttttaggctttttgagcttgaaacaatattttggagtcattccaccctctcagctagagaagtagctggatttgctttggttggggtttattggttgggtctttctcaagagctctctgctaagtaaatatgcatgaagggactttttagccactctggtgttttagttcactgtgtattcaaatggattttttttaatgtagcaaaatctattacagtgctatctattgcatttgatcttttctttttttaatgtagctaatgaaattcagagaaagtactttatttgtacaccccaatgtgtactttccaaaagtcacttgtaaccctctttttaattctgccaaataatttggagctaatgttcttttcttctcaacttttctgaattattgcaagtaatttttaagt

SEQ ID NO: 51565 - DNA, 7915 bp, Homo sapiens
ctctgtcgccgagactggagtgccatggcacgatctcagctcactgcaatctccacctcccgggtccaagtgattctcctgcctcagcctcctgagtagctgggtactacaggagcccaccactatgcccggctaatttttgtattttcagtagaggcagggtttcaccacattggccagctggtctcaaactcctgacctcaaatgatccacccacctcggcctcccaaagtgctgggattacaggcctgagccactgtgcccagccaagcctcttattttgagagtgaaactgagacccagagcctggaatagtttgggagccaagttgcaaagtaactgagcgctgccactgggactcaaatgcaggctctcacagggccccggtctgggctcctgtgaccaaattagagcagaagagagctctcagctcctcaggtgtgccagcagggatgctgaagtttccacaaagtctacacaacggaacgaagctgcatctaagtcttattctagaattctttgtgaccgggccagctcttccatcagcctgtggagtgtatgcacacaggcatgcagaactcactggaaagcttttacaagatggctggtggattttattttttgctttcctggtcgcttttggtggtgtgggaggggcctagagtgagggttaatgtttagatccctggccaaagctctacccaaatataaaccctttgagtcagcaaccttctacacaggaactgactcaagcaaggttacctgaccagaagcctcagagtcacacatgggagagggcccttccttgggtaatgtcaactgcctgcctttgggtggtgtcctggctcgggggctgcttggtggggaggggagacagagatctacctcacccccaaagacccaggacctagaaggactccttcctgtcaagctcacagacgacttcatccccataagaagggcttccagatcagcgacagccaatgctgtgagcgccaccagggaaggggggcagtacagccctgattacaatcagcaagaaggctgctcagaaggcagtttccgcctgctgctgcagagcttcgaggaacagactccacactccctaagaaaccctcctctgccatcacttctagcaacgcttcctgtttttctctctcaccctgggtggggtgctgtggcctcccagccagggaggtaggcaacaaaggccctgctcaagcccaggtcctggccttgtccaatcagactctaaacagcaaatgccggcccagaaaaatgcagggaaagcaaacttcagggtttgtgggattttgaaaaggcaagaggagaaggagccctctattcattctttatttagcaaaaagtgtacgatggaacttttttccctagacctgaagtcaaggtatacacatacacacatgtagagtatgaactacctatacatacacacattcacttaattatatgtattatcgccactcgcaattatgcagaacgtattttggagaatgtattattggcctcattttgcagatatagaaactgagacgccgagaggttaagtctggcgaccaaagagagacagagacagagagacgggagactagaagaggccccacgctgtacccagatattggcagaggctgaggggcacggagtggtgaactctagtcagtcatttcagccaaccatgggatttcagaaaacagccggcaggggtcctaatgtttggggcaggaaggggaggtgcgggaaggcactgagggacccccgcactgggcgccccttccccaccgcagagacaagcggcagtttccacagcagccggcagggggcagtgcaccttgccttttcgaagcctctgggcgcttgggcagcgcggggtaaagaaaatcaggaggctccgcccgcagcttctacgaacaggccaggagtagagcccccgcacgtagtaggtgctccaggcacgtctagaagcctaaagggcttggtcgatacatttgaactccattttagagactggaagggaagaagggggcgtccgggcccctgccagcaccttccaccttggggccttgtcaatgaacactgcgttagcacctacgacgtgccaggcgccctggcgactattggaaaacccggctcccctctcaccccgttttcctcgttggcgagtcggcctcgcctcctcctcccgtctcttcctctcaccacacacacccagccgcagagcgggggtgggcgctcgctgtctccctggagaaccagctcgtcgcaaacttgcggggcttggggacccgcgagggggagaagtcgggagaggccaggggtgcccggaaacaatcacgagaaagccgggcgaatgcctgatgcagggacgcggcgagccagtcactgccctcagggtcacggctgactccctctgcgggactcgcccagcccgcgagacgcagtgacctgcccaacccccacccccttgcgcgcttctgggtgcgcacgtgtcccctcgcccaacacaccaccgagccccgcgcatggtacggccgccgaggaccctagcgtaggagggaggagcgagtcagggctccagctgacgagcagagccagacgatccccacacgcttcctgggagacccggctgcaaggccaggctaatgcgcgctccgacgtctctgtgccaagccggggcgcaagctcaacccccatctcaagttcagccgcgcttcctcccgcaaggtcacgcttaaacactcgcgcagagaaaggaggagcggaaagttgcgccaccgtcccgattccaaactaactgtaccctcaccagagcgcctcgccccagggtcaccgctgtccgtccccgtgcgctcccagaaggggtggccctgcccccacgcaggtcacacacacgagagacacaggcaagttgctaacttttgtcagattatttcttgggagctgcgacgcctcacggggttggggcggattcagagtttcgagttgccactaacacgactccggccgtgctctccttggcccacccgcgtcccccactgtccgccacgccgcgttcagctctcttgtcccgggtgtcaacttcacccccagatccggagcagcgcgctctgacggcgtccccggggccgatagccacctcccggatctgcgcctgcttgcagcggattgggggactcgatccggatactgtcccacggccgctcgtccagaacactggcggcctccgcggtgtcccagcctgtgaccccaaatccgctcgagagcgcctgagcccggccacccagcgaggtctcctcccacgggcggccccagcggaggagatcccagcccggcgccgggtgcaatgtcactggggctgctttcgggaaccgctgcccgggacttggcgtaggttccccacagagctccaggcagctcctccagtgtcggccgaagacccctaagcccgaacctccaccccgaccttcttcctctcccaaagccctgggtggtcgccgctgccaaggaaggggtctcccttcgaatgtcttccactagaatcccggggtcttcagtcccagctccactgtcacaccctcctagtcccctccccaccccttcagttcccgggtccagacaatcaaccttccactccgagaatccacaggaaactgcccgagccccaactcaggcggacgcagcccccgcgcaccccgagcagggttcgcctccgcgcgcgcactcaccacggctggagacacgctggagtttccgggatttgggcatgaaggggttcggaggagaatacaggggtgtgggtgtcccggacacttgcccccttcccagctcacatcgcctcttccttctctctccgctcttcttcctcctcctcctccctccggtctagggctctttgtctttgcaaagtgtcgaaactgtctggcatagtgggctccgccggcggaggctggagccgaggaagcgaggaggcgggatgagggtgggagagggctcgggaacaccttcccccgggtgtaacgggagtgaaaggcggggcgaccgaggaggggccgccttccctggccggccggggccgggtgccagggcgcgccagagcccagccaccgcctcccctgcgcgcggccctccccttcctccgcccagtgcccgcccctcccgactctgcgcctccgttcggccccgcccaccccaacttggctcggctttcccttggctccgggcttcctgcaagccgaatttagctctgccaagccacgtggaccgcagcgggctcggcagaggccgagcctgggagacgccggaggcggcggctgcggcgcggggacctgatcggcgccccgagaggagctccccgctctctggacgcggccctcaagctggcggggctaaggaagagcgcccgggaggcccgggagccactggggtccgtttcagcaggaagacgggcacgcaccgagaggatggcagtgcccagaagaactcgagtcgggggcacggtggggagaaggggccgatcccctgctggcgaccgggcagagccacccacttcctctaagggcgcgggactcgaggtgggatttagggagggggaagggaggagcgtgggctggacgactcttgcggccagaaccgcgttcagagccacagagccgggcactgcggccggccctggtcccggccccggccctggcccagcccttgccctggctcgcctgccgccgctttttccttccagatgcggaggctgcggctggagcttggggtttgcggattaggcttgcagttattcagccctccctcttttacagggaagcgggggcggtggagacttcttttgctgaaaggcagagtgcagcgctttgatgctaaatgcagtacacaagtcatgtaaatctggttttacggttcttaaccccttactgagactacctctttcgcaacttttcggaggaatgttagaggaaagaggcacagtttgcctttggggtcattgcatccttccagcgccccttgctccagctggagagagatcaaccttttgcagtggaaggggagagtcccccagcctttgtttcatcagacggctgctgtagtacagggattcaggccagggcccgcatggccggacttcttggttcaaatcctgcactgccactcaacggatgtgtgagcttgggctagtgactgaacctcccagcctaggtgactctgtgcctcggtgtcctcatctgtgagaaccgacctaagaagtgtctgtctgataaagctgttgtgatgagttagtgaattcgtacacatagaacctttagaactgtctttgacatgtagtaagtcagctgtgtagatggtgggtttctccagtgtcaggtccctgcccacagcaggaagatgacctgtgctagaagatgggggctagggtgttggggaagacttcagggacttgggagagaaaaggagaaatattcagagatgagaaaagtagaagaaaaaccagcttttaaaagggggaggagagagaatgagaaaaataactactagaaagggaaggaaaagatgaatagccttttaggtacttcgggacctgctctgagacctcttgcctgacgcccttggtttttgatagaattctagagaaggggtgagcccttttgtctgcctggacacatcctgtgggctttcctctttctgaaactcaggtcaaggtgttcactgcatctccagattgcttgtgtgcatgggaggaggggggcagagagttctgcttacatcggctactgtcccctccaccagcagcgtcttccagcaaagaagagcttctaacatgcaccagacttttagctttggctgggaatatcgtctgggccaataaagagtttttggatgaaataacaaaagtgttgtttattgtatggatcaaataatgtatgggaacatattcgaaaaatagaaaatgctatactcatataagactatgctactatatcctagtagattctgtggaaagaggatcagatttggcaagtaaggagccccaggtcatccagctgttgcactttgcagccaagaaccaaaagcagctcagttttagctgagttcttactgtatgtattccacgtgcaatactggcagtgcagtagttttgtttataccagcatcaccacaaacatgtgagtaatgcattgagttgatgttctgatcactaggcacaggagtttttcagctacattaatatattgtgagaccactgtcttacatgcatgtggtccatcattgaccaaaatgttatccaatgcatgactatatatgtgaatagtgtagattgtatgggttctgccaaacagttctgctaacgcaaatcccaccaagattctcagggttggagggaggcttcaggaccatgtcttggaagttcccctggatgactccatagtgagatggaaattccttattaattgacattgtggtgaaacacacataaatcaccaccttatttgaataaaacattgtacatcagatgcatctttagttcatctctgaagggttaacctgggcaaggccttttctgaaagccccactttctttctgttaagtttcttcccaggtaacagggacagcctctccctctccctttttttccagagttttgacattccatgcaagtagctctcttaacacccccttttaggacccttgccaggggctgtgtgtcagaagtgtgtgcatgcattcctctttgtcaccctgagtgtatgtcccatcacatcctgccagagaacaaggatcatagtcattactgggagtgtcttcacagtgggtctccagggagcgctgacattgatttactgcatgctgccacctcctaccttttggagcaccagcaaagctctcagtaatgatggttaaggaaattgatttcatcctttccctacccccgtttcttggcacagcagagtggaaagatcctaatgggttctggtcccatttgggtgattgtgcagaaaagaaaagggctgcaccacttgtcagagatgagttcagaggtgctgggcacagcacatggtgttttgtgttttagacagtgttttccttagggctcttgggactgtgaggaactcactcaagtttctttagaaaaaagagttttaatgtagagatgtgcagactgaagctgaaaacaagctgcaaggagagagagcccatctctgtgtttctgtctccctcccgacccccaccgctgccccccctccccctctccgctctgttctctctctgcccacaggctttctctgttaaatcctggggtctgttctaaagttttctgcatgtttatggcctcagcctttctgcatcctggcaattgtggaaataatcttttcagcttcacttcccactgtggttccaccaggtgttttagtttttccaggagaggaatctgactgacaggcctcatctacagagtcatgaatcaccaatccaatactggatggactgcccaggcagcctgagctcatcccatgaatgactgtgcagaaggacagtcctccaggagatgatgcattagagggagtgtaggagacatggtcctgactctgagaatcttggcaggcatttgagttagtaaactatttggcagaacccagccacacttctcacatgtacagtcgttcactgagtaatgacgttttggtcaaaaaaggaatgcgtatatgagagtggtcccctctgatgacactgataaattcctgtcacctagtggtgtagctggcataacatcaactccgtgcattactcatgtgtttgtggcgatgctggtataaacaaacttactgcactaccagtatggcacatacaatatgtacagtatataatacttgataatgataataaacagctatgtaac

SEQ ID NO: 51566 - DNA, 2488 bp, Homo sapiens
gtgatccacccacctcagcctcccaaagtgctaggattacaggcatgaaccactgcacccagcctaaaaatattttctttatatccctatttcacaagttttttctatttacaaattatttattcatttacttttccaacttttttggtaaaattaagacacaaacactcacatcagcttgggcccacacagcgtcagtcatcaatatcactgtctttcactgcatatcttgaaacacaggaaggtctttaagggcaataacctgcatggagttgccatcccctaaggtaacagtgcctttccctggaacacatcctgaaggtcctgcctgaggctgtattacagtgaactctgtgaggtttgcatagccattaaattgcctaatgacgcttttcttggaatgtgtctctgtcattaagccactcctgatggtcttagacccgaaatctatgctaagccatctggttagtctcagtccatcctgcccaccctaatctctttgtcaaaaatcagctcatgaatgaatagctttaatccctacttggaccaccaagataaagagataaatatattgagtcttctaggaaaaaagtttctaagagtaagccctgaatatagcttatttctaactggacatgaacaaaagagcatttttaacacagttgctctgggaggcatctttgtgcccatgaagaaagccaaataaagacattaggttcagagtcgtaatcacactaatgcatgaagtctgttctggactttctgtttcatgagtcaataaaattcttttgcttactccactttaggtcatagttctgttacttgcaacaaaacccttgataacgacagttagattgattgtcccgaagcccctctccttccctcaagtcatttccaagctctaaccctttaaaacatttgtggcttcccattgcctaggggtgtaagtccagatttctgagtctagcagttaagaccctcggtgtggtcccaacgtgtgtttctcacttgtttccttctaatactcctctttacaaaccctctactagcaggcatagcttggcccagaagctctggttaacttatatgttatgttcttaaaatcaacatagatctctatcttgctgggctggtgaagcccccaagatatacagaagtccagagggctaatgcagggcctggtgtgaggaaactctgactcctggcaatcctcactgcttctgcagagcctcccactgtcctgggctgcgagatccataaggatcatggttcctaagcttccttgccataaggtccagctggcccagatatatgcatttcctaggatagccataaccaactactacaaactgtgtggccagaaacagcagaaatttattttctcacagttcaggaggctgcaatgaaggtgttgcaaaagttagttcctgctggagactcagagagaaactgtcccgtgcctttctatatgacctcatctcaacttgtttaaccaattacatttgcaaataccctatttccaaataaggtcaaattctgaggatcctggtaagcatgaacatttcaggaacattattcaacccactaaaccagggacaccaacatctccatgcccacctctggagcagatggcttccattctctgtagctccagctgacgggcagccctggaaacccttttcatccttttctttatggtgttctcagaagcagactcctgtccccttttttcatgtaaatggatttaagtttgatttccaaaaagctagaccttcagcaacttctaattttccctaaggtagctagtccttgaggcaaggaaacattaagggcctgacttcaggcttgaaatgggggaaatgggaatctataagggatgaaaaccacaaatgaatatttgaagtgtcctgccatacctattgcacctgcattccacacacatcagttaatggaatacccatcgttccttctagaagagccaccacctggctttgcgtatgaaccatgagttccctggaaggctctccaccacctgaatcccctcctgtctaatgtgcacagctcttcctgaggcagcgggggcagtgggggtgggtagtggaagggctgcccccacatgaggcctttgctattggccctgtacagtcctcatcccttccgcttatccctactgggtctcccttaaaatccatcaccactttgcacctttgcagttacgggcttattaggctctatttcctgttcaatggacagatcctgaaggagaggtgcaatcctcccttctttcattcattcattcattcattcattcagcagaaattttttgagcatctactgtgcgccagacactgtgctaagtgctgaagacgtgcaggtggacatgacgtagttccttgcctcagggaatccacagtttggtgggggcctgactaatttccagttatttctccacatttgggcagaagtgggtgtagtgagacctcctctg

SEQ ID NO: 51567 - DNA, 1558 bp, Homo sapiens
gacactcagtggatggtgacaatctgcagaatggggcatctgccaagacggaggagaggaggcagtgtcgtttttatttgtcacggtactttctgtgcaccatttagttgctgctggttctagttaataatcctgcctgacaaaccatcccaaaatttagagacataaaactgatatttcattatggtcatggaatctgtgggtcataagtttggatgatactcagcagggataacatgtctctgccccaccgtgtctgggaagacttgaaactgagggtaactcacaggagtcacctagaggcttcttcactcatgtacgtaggataaggaatgagctgacttgagggctggatgcagcagggactgcccactggagcacatccatgtggcctctccacatgccttgggctttttgcagcaagggggctagatcgtgagagtgagatttcccggggaactgggggaagccacgtgcctcttgtggtctagctccagaagtaaggtagctttacttctttgaactgtattctttttgatgggggagaaaggcaaagagtctgtggccatgttttagaaagtcatgcagccacaggcagctgcattttcaggagctgggggccagactcaattcacagccaacagagggaggtgaagccagatgtggaggagattgcctgggaatattgcagaaaatgaaaagagggccaaggatggggccctgccgacatggtgattcacaggaaaggctaatggaatgaataactcattcaataacatgactttgtatagctaattctccaggtcagtgattgtttagtcaggcccaagtaagaggttctcagttggctgagcctctagtgaccttttggggtcagacagggaaccttagaattctgcttctcaaaccttaatgtgcacaagaaccacttcaggaggcttattctaaatataaactcctgaaccccttttccaagaaattctcattcagtagacgttgagatctgaatgttttcgtcccactccaattcatatgtttagacctaattcccagtgcaataatattaatgtggagcttttaggagttgaggaaatcgtgaaggcggaatggaattacttcccttataaatgaggcccaaggaagttcatttaccccttcccggtgtgaggacacagctagaaggtgccatctatgaagcagagaacaggtattcaccagacaccaaataagttggcctcttgacctgggacttcccagcctccagaactgttggcagtacatttctgttgtttagaaattacccagtctaaggtattttgttagagaagcacaaacagactgaaacagtagacctgcagtgcagtccaggaatctgcctgtttaaaacaagtccctcctatcatgactgtagaggctgggccgaccacactcacagacagtcccgtcctcagccacccatgcataaatcccaaagagacaaggcagtctttttgctaagatgttctggcttcaggtccttgctctgctgctttgcagccacctgacttctgacggtttc

SEQ ID NO: 51568 - DNA, 639 bp, Homo sapiens
gtgtggaagagactgtactcactgtactgtctccttgaaatgctcttcgctggctattcagagggcagactccatctcaacctctgggtctggaaacttcccttccacctccccaatacctgaagttctctgctccctgccctctctttccctctatctcatcaacccacttattgtctggaccttaactagagttgctaccccaattcacaaattatatcctcagggtttgtagaaacccatctggataaaacttgtatttttttttaaattgtggaaaaatacatacaacataaaaacataaaatttaccatcttatttttaagtgcccaggtcagtagcattacgaacatttacattattgtgcaaccaatctctagaatgttttcctcttgcaacactgaaattccatgcacattaaacaacttcccctttcccctccctccagcccctggcagccactcttctactttttctttctataattttgactactctaggtacctcatataagtggggtcatagagcatttgtccttttatgtccggcttatttcacttagcataatgtcctcgtggttcatccatgtcatagcatgtgccagaatttcctttctttttaaggctgagtaatacccca

SEQ ID NO: 51569 - DNA, 569 bp, Homo sapiens
caatgtttaaatttccccaattacctcactttttaggtttgttcaaatcaaatctaaatgaggttcacacattagaactgattaatatgtctcataagacttaaaatccatatgctctccctccatttctggcttttctccccttgtagtttatttgttgaagacagcagggtgtttgccttagagagctgtcagcaatctaagtttcgctgattgcatcaccatggaattgaccaatgttcctccatccatggtgttttctgtaaattggtcactggatacaaatacaaaagcttaattagattcagattcctttttgcaaagaatgcttcatgggttatattgggcagttctttcaggagacacgctttggatggtggtctcttttatgtaatgttagcagtaactgatgatcattgctaaacccatgacatcattagaaggttgcaacatggtaatattctaatttttcatgtgttagttgaaatatttcaaaagaaaaaacttcccctcatcgaatgtttggttatgtttacatagggttttgttttgttctgttttgttttgtt

SEQ ID NO: 51570 - DNA, 550 bp, Homo sapiens
cagtcttgggtcagattagcaattagcctcggggatgaagaaataagagaaaataaacagtatccatgtgtgtgacttttccaccaactaccagcaaatgtggcccaattgcttaagagatgaccacgcctcttccttctcctcctctttctcctcctcctctctaataagtgcaaacatctacaaactttaggggacatcaaacatgggagtggcaaaggcacagacgttgaatcaggagactgagtttggcttggccacttgcttgcttggtgtgacctgaggtcagtcattagcactcccttcatttctttatttcacaataggaacgattatgccaagctcacagggccattgtgagagataaattaacacataaaataacaatcaataacacagcattatatcacatcactagaagcatgtgccaagaacttattgaatctgggccctaataaaaacaattttaaaattaagatgtctaaaaatcaaatacatcacctgtgggttacctcacagtttctggatttcctgctatgctattttccct

SEQ ID NO: 51571 - DNA, 567 bp, Homo sapiens
cactctccgaaccatcctcctccacctagaccctagaggaactgttttaaaaatccaaatctaatcctgtcacttgcctgcttaaaacccttcatcaggcttccttcccatctccattaggagaaagtgctaggtaaagtcctccaagaattgccataaatcctctcccactatccctgtaccatcaaggccatgacttgcaagcacacaccctcatgtacttatctcctacccctttgggctccaacaatgctgaaccacaagttgactgacacccggtcctgtttacagcccctggaccttggcacacagacatgcattgcacaacgtcctgatccacacacctctgcttgtctgagtgacaagccaaaaggcagctcagatttcccctcctctgtgatactctgtacccttcaccttcttacctcctccattctccttacacacacacagagcaccgaaccaacggttggactttcccacactgcttacaattatctgttgacatgccttatccatattgtgacctcttggaggttgggtccatgacttcttgggattttatga

SEQ ID NO: 51572 - DNA, 1678 bp, Homo sapiens
aaatcatcatgaagattacaggtggatcttaagaccataaaatgaatgccttgtctttgacaggaagaatttaatgagaataagaggaaattttcacaactctccttgcctaagatgaccccagaaataacaagcttagaaaagttcagaagtcacttttataaatttgacatattgatttctgtaggctgcaaaacattttcaaaacaccagctgttctacataactacaggaaaaaaaaatctcttttcctggtttctgctaccattcaaatgcagaataaaataaataaatgttgaaaacatatcaaaagagttattttaacttgccatggttcagggtaagaaaaagtttattttgttttcttctaattgttttaacaagctatagagccaaggtcagttgtttgaaatgtcactagactgctcttgacagagcacatattaaaacaattactcgagaattttccaaattgtgatattgtgcttggcaaactagagaacacggtgcaatcacatggatgccagccacaaggcagctgggcataaggtcatttctgcatattttagagcttcaaccgtggctggaaaggaaaaaacacccagagcgtctatctttccatttggtatttgttaaattaaagtcaatttaggtcattcaaatcaatggaataggaggccattttctctactgctattcctggaggaagccgataatctgattagaaaggaccctgtctgtctgccattgctgaagagactgcctaattattacagagtagaaaataagcatcaggaatccacacagggtgccacttccatcgcttataaggttagacaaaaatatgacagagacatgctgaactggagaaaatctccatccatgaggtagaaatgagagtggtcttaaggcacagacgtgatagagcaaactggtaacggggcaggagtcgggagacacgggccccaaccagccccaaatgagtcatgtgacctgatcatcatcgcttctgcatctcaaattcttcagtcataaaattagaacttaggtctaaaaggggagttctttaagccaaccacaaaaggtcacatactgtgtgagtccatttacacagtgttcccaaaatgacaaaatcacacagttggagaacaggctggcagctgctaggcgagggtgacaattgagggacagggtgcctggccctgtgacaacagagcagttctgcctcctggtggtgagcacaggccatacttgtgagtggcaaattggcagcaagccacgcgcactcaaaggccaaagtcctgattctgatactgcgctagagttgtgtagggtgtagccactgggggagaccagatgaggaacacatgggactcttctgtattatctttgtagcttcctgtgaattcataattatttcaaaacacaaagttttattttttaaggggtttttgagactttgaactgccagatctgtattttctccgtggaccctatctatgacttcaaatattttatctactgaattatatttattaagataattcctttccctagatttattggtcaaatatatacagttgacccttgaacaacatgggtttgaactgcaaggggaaacttatactgaaatttcttccatctctctgacctctccagaaagaccaacccctcctct

SEQ ID NO: 51573 - DNA, 509 bp, Homo sapiens
cagatcctcaagaccaattagctagctaaaaatgaaatattcatgaatgaacttgaataatttaagctctgaaaatgagttgctgctgtcaactactcgcattttatggcagagctgagaatcttgggactgggcaaggaaaatcatgtaacctctaaatcaaaacatttcaatggagttagctttaattcctcttcctccctctgaattcctttatttaatctgtcactaaactctatggactttgccctaaagatgtctctccagtaaatcccctctctgttcacacagcaacctcaccacccagatgcctgcacacggtgtccagattccagcctcctgctctgggctttctctgcctccatccctcatctgtcattccctcactctagaaccttccattgttctggatgattttgcccacaactctcaggcctggccttcaaggtcctttagcacgtgatccaaccctgcacatatgcacacacagacacacacacctgcacaca

SEQ ID NO: 51574 - DNA, 1054 bp, Homo sapiens
cctttttacagaggagaaacctggggctcaggttagtgagctgccaaagagcccccagtcagataaattaaaaagccagaacttaaccaagacccaccaagtcgaccaccacatctgcccacccacctggtacctagccctgctacaggaaatcgcttgttatttcctgtaatgctcacagtgagcaatactgtgaggaatgcaagtcttggtctccccagcccacagccagcgtcatggttagagggacatttcaaatgattaattacaactaagaaaagtagctacgtggagaaggggactctgctgtgtttgttataatttactacagcaattcatttcggggagcaacagctggaaaataacagtatgccagatataagtgataccaacccaccccaaaccacatacttaatgagcatgcccactgcacaggttggcagcaggtccagaaccagggaacagcagaccaccaggtaagaggcagacagtcttttagcaaaacaacaccgggagttactgtcaagcagaaagcacagaccttcatcaacgggagggcgacatatacgtgctaacatcaccctccagtggcccaccagggcactacatctgactaggccataattttaaaaaacatggctagtatttactgattgcctaactcttggctggtgccttccccgtcaccccacttaaccttcacattaacccagtaagtgaggggctgctgttcccatcttaagacgagttaagtgggccaggtaggggattacaaggtgatacagcaggtgggcacacagcagggctacaacccaaacacacatccttggcccaggaccagaccccgctgcccttcctaggtggagtcactgctgctgctggtccccagagggggtgcagctgccctgacagctcaggtgccctggccagccccagcaggtaactcagaccaactctgaccacagattggccgccacctggccaattctcaacctgagtaagttattttcaactcttatggggctttcccgtgtatgcccacatttctatgtga

SEQ ID NO: 51575 - DNA, 2208 bp, Homo sapiens
gggttagaggtaggacacgctacttccttcagcatggggacacacactacagatgtttcagtagatgaactggtaggctcggaagataaagctggtgagaggcagctgtgcggggcatctccaaaaggtcacttggactccagcaaaaaaagccagactgatgggcaggcgtgatcagttagcgcgttcgttctttcattcactaagtatatagtgaacacttacatgagccaagccctattctaagaagatggaggtacaagtcaggcgagcacgcaggagtttggattttagcccaagttggaggaagttaatttttaaagccccagctctgtcgtttttaaactgtgtaaagttgacctctctgaacttctgttcctcataataaatgacctacaaattagagttctcaagagagctgagcagcaaaacgtgttaagtcagtgcccaaatgtggaagcttgtggtaattacaggtgaaggaccccaagctcaaggttaaatgacttgcaccgggtgtcaagtggaagatctgtcactctattaggtccagccggcggccgggaagcctgcaggaggtactcatttcgccaaggaggaatccgaggccaggcaagaaggaagccccgccaaggtccagtcaaagagctggcatcgccgggattcgaacctcgcgcccactgcgttccgtcgctggcccgcgccccaacgccacccattgccgtggaaacggccgggcgcatgctctcccactcgctcccgccttgctttttttttttttttgcggcgggataccccagcgactgaacgtgagccgcagaacgcaactacgttcgctctcctccccagacccggatccctccgcggccggcggccggcggccggcggccggcgcactgcttcccgactcgacgctcgaaacggctttccgcgcgccgcgccgcgccccacccccaccccgtctcaccccaacccccagcccggctcacctgccgcccgcgtctccatggcaacgccccaccgcggaggaaaaaaaagcctcgggctcttccgggccccctcccgtgccgaccgagggggcggggcgccctgctgacgcttcgctttttatttttatttttttaagaaaagagccggcgaggttatggcgaatctgcggcatccaacatggcggatggagtcttcgccctcctccccacggggcgcagacgcctgcgtagcggacgtccgcttcgggtgaccctcccccggcgccgagcgcggcccggcagggccgagctaacgcgcatgctcgcagtcggaggccgtgctttttatcccacttcacggattccgctgcgccgcgttttgagccacgcccagggaggggccctcgggaggtccggagcgcggatctcggggtcaggagtctggcggttgtgccaggcctctgctagcgcgaccctagacccgcggcatgtggggccgccgagctgggcgtgcaaggagagttctgggtgcgcttcgtgtcccagctctacctctcactacctaacttggggcagcgaattaacttttcttgctctcagtttactgatgtgtccatcggggtgctcccaacctgcatcccgctcaaagctgcggcgtttcccgaagcgtggggtgctttcctttgggccacccggctgggttttaggggctacagagcactgagcggcctacgatcacacgtgacaaggcgacttcctcctctctcgtctctttttgtcccacaacaagtctgcactggatgtgcgcgcctccaacacccgctcattcatttctctgcttgtggcacagccttcggcaggcagctgagtctggtggaaatttaatgactttgtttttggttttgatgttaaggtgtttagctccaacactgtagtcctcggctcaaatgatatcttccagcccctaaccctcaccccccgaaacccatctaaagtaaccctccaagacacttcatattttctacgtagcatccattcctatctgtcattatctccctcccttacctctgtcaatggtcaccccgttagcctcagaaacaaactgagcctgacagttatttatttcatgagtaatgagttgatgtggtccatgttctaaggtcattttctgttcatgacaaataacgtttttcacttacagtagtcatataaagtttttaaattgttcgtttacattttc

SEQ ID NO: 51576 - DNA, 1128 bp, Homo sapiens
tagacagtctgtacaatggtggcccccaatgaactatgcctccttgtaatcatgtcctagtgtaatcccctctgacactgactttgggattgaccatgtgacttgctttcgccatggaacacaaacagcacaagcacaaacttgataagcacttggacactgggtctttggaacgccgcctctggaagccagcatccatgctgtaaggaagctcaagctaaactaccagatgatgagaggacatggagagaaaacccagaggacaggagtcctcatggacattcaatcttagctgttccccagccaatgcagccacatgggtgacctcggcaaccctgcactgtgcaaaagaactacccagctgaaccagtcaacccataggattgcaaaacatgataaccagttgttgatttaagccactaagtgtgggagtagttttttgggcagcaaaagataacttagtattgtgggaagctaaaatttcagtttcagggagggttttgagagttgatgagtccatttgggggaaggatgtagtcttaagcttacttccccagaagcaaaaggggaatgagataaacagacctttggctggactccaagagtctttcaaccaaagaaagtttactgaagaaaaaaagagaaacttggccgagatctgaagtgtgatgagaatttggaacacggaagacaagccaggaggcccttctgaaagtaggaagccacagaagcaaacggtgccaaggaggacgatccagggcgggcctggccgcaagagggcaccttgcagaaagcaccgcagttggcagtaagcaggcattttccagaagaatcccgaaggcaaatactctgttctgctctcagttaacctgtgctactgtcagaccacatacactgtagagttcagaggtagctgctatgggagtgaatcttcttgctgctgccaaagtgagtaaaaatcaaacggaataaaataataatggtggtatgggcccagtcttctagagttttccatgcccttcatttcacatagccttcacaccatcctgtagggtcgggagggcatgaataagaaccctcctcccaaagatgaaagaacagagaacaaaaggggctgagggacttttg

SEQ ID NO: 51577 - DNA, 809 bp, Homo sapiens
gcgtggtcctggaacaaatgctggtccctaaacaatgaattactggtttaattactcaaactttctgtttgagtaagcattggcctgcaacagattagaaattaaacaaaacaagcaaagctttattacagatagtttgaccacagtttagaacacctagttcccttcttacgcatgtttttttttctgttgtcatgtccacaagcaaaataagtggtgctttgtcccaagtcttttccaggataggtcaacctagagaaaaaacaaagcacaagggccgctcacatggaatttagccttaggcttccagaaccatggaatgttctggcctttggaaggacctctggcctccagcttgccaaagactcagagctcatgtgcttctccctcagcagggctaggcacagcctattcattactctggtacagccaaccaacaagctcaagaagctaatcagtaagacaatgtctagaagactgagccccataacataagatgaaaggggctgtggcatttcatctaccagatccagcttgtcaacaccactttgaatatgtttttgagagcaggtaggaaagtcattaaacttgatgtgcgccctttctccctcccttttccctctaccataaccaacagaacccaagccctacaaagggtaagtgctcaagaaagttctgaagtgaatcaataaaaatcatactatgatttgtgttttaaattcagagcccctccacctatattgactccttcccatcagaattcaaacatacccaagttctcacctctcaaaaaacataaccccacttat

SEQ ID NO: 51578 - DNA, 788 bp, Homo sapiens
aaaaacagacaacactagaagtaaatatagattaaaatgacaacagactatttgttacggtggcgtaattatgtgccactaagatattatgcttaaaaagacactgcctttttgaaaatgaaaaaacaaccagtcccgcacaaggtaatctggctggcctgtctgcagcacagcctcacaaagtagcctttgtttgtcccagcctgaatcaacacttggctttcagtaacacaagtgaattgatgaaatatttggggtcaatatagtggaaagaagtatttgttttataatgaagcccagaacaatggtgactggggaagcagggtgaaaaaggaagaggatttaaactgctaaatgaactacacgctccaggccaaagcatccattatcgcctacaggcaggatgagaaacagagtccttgtgaataaataaaccaaagggaacctaaaccatcagatgatgcccgagcagaactatgtttaccctcacttagaacaaatactgaggagaaagagaagcagatatttggcaacagttatgacattactggatttatagctcatctagtaataagtttcctcaaaggagagttgtcaaatttcagagctggataaggggaccaaggtcaaaaggggtaggtgattaggccaaggtcgtccagtcagtatacagcatgggaatataaacatgggctgccggtcacacagactgcatgtccaactccaggactgccccttcccagctatgtcttaatcaagcattccctcaaacagatattaagacaacg

SEQ ID NO: 51579 - DNA, 1245 bp, Homo sapiens
ctagactgaaccatcatcttggcttctggggtcactgaggcctactgtatctccctggtggacatcccacctcatggtgtgctgctgctgccattctctgctggttctgtgttcagggatgtcctgttggtagcttgaaagaggccatggtgggaataattacactatggaaattagcaaaccctattttggctaaccctgacagctaattgttaaacatttaccagttcactggagactagtattactcccctttacaaatgagaaaaatgtggctcagacagcgtatgaaacttgccaagaaccacacaacttgtgactggtgcaaattggattcagacccaagcctgtctcagaccttgtactttactttgatgaaaattggaagtgagttataacgtttagactataaaattcccaatactttaccaccaacattgcacttatgtttttgtttaaaaaaaaaaaagtctatggctgcctgcacctgagtacagtgtgaaatcaagaaacggcacagtttttagaaacatctgcttactgattgagcttcattaactcctcatgtgagatcccagtcctgaaccacaggtgctgttgcttacagtgcgtaagaaaaataaatgagttcagcttccaggttagtgctgtgaggttacataaactaatcattaaacatgacagctaagatattttagctactgtttaactttaaaagatttgttaataaataatgctattgcacactggaggccttgaccctgtctctacctgagtcacaaacctttgtgtttgtatagaagttacactatttcctacatttgacttgaaatttagtcacattttcttctcattgtcaattatctactttctctctcattcattcagtcatcaataaacattgaaaatgatgaatgcaacttgagaccaaaagagttgggaaaaatcctttctaacatgactgaatgaaaatatttcatgaatcaaatgctctctaaaatgtgaatatgaggcaaacaacctcctggacgactaaatggtcagatgcaaaggtgaactgacatgagctcctaattggattttgtaggccaacatttttttaaaaagtatttttaataaggaaaatttcaagtgtttacaaaagtagagaaaacagtacaacaaatctccctgtacctattgtcgaggttcaaccatcattaactcatggtcaatcatctgtcatgcccatcttgtttgatgcgt

SEQ ID NO: 51580 - DNA, 3833 bp, Homo sapiens
aaaaaaaatgcctaatggtgttctggacatagtagatgctatttaaatgcaagttctgttctctgcctcatataggggaattgctgcccttataaatttaattttgtcaactgtgtattgagaattcatttagacccttcaataaaattatatgtagaaaggaaaatttaggtagaaaacctccatagaactttctgcttctatgacattgtctgagtgcactaatatgacaattaggctataaggaaaaggaagctttaatattatctaaatgattttgaaacctgtgttatacaatcaatatatatttagtgcagcttccagttcattccattccacatttcagtgactctgaccatctcgtatcactcaaatgcaaaacactcttctttccaaggagctatttcactgtttaaaagaaaaaaatgtagacaaacaagtatcactggccttcttcctgccagctttcaaattacccccatttaacctcagaagaacaatccaaagagctgcatcctgtaggtgaaatttcagctaaaatgtttctataacttcccagctgaattgtcatttgtaagccttttaaaaattaattaaaaccacttccattagtcttttgtttggccttcatgcaatcatttttcttttgctgtttaacaagagaaaacccaccagcattagctataaatatatggcaccagatatggagagaaggcatatgactcatgctggactgttccctagggctaactcagcgatgactgcattctgggaagtatgtcaggtctactcttagcccacagacaaatcccaatccagccggctatatgaagagaattctcttttttcagttccttctatttcctttctcagtttaaggcactgggacacttcactcacttggtctgctggaatattccttcatccatccatctgctcgtcagtctatccgttcatcaaacatacctgattaccaaccatggcctggccctggaggcagaatatcgaataagcacatgttccaaaaagaacactattgcagtgtgggagagtctgactaataaattacctattacagtgtagcaaagtctatgatagaggaatgaaaagaatgcaaaggaagcacagacaagggtatcagggcagatttctaggaaaagattatatcaaggacaactaaatatcaaagtggcaggaggatgatgaagcattcacaatggaagaactggatatacgaaggcacaggattacaaaacaggacatggtggggaagtaaacgtggtttacaatggctatattggagagtctgttcaggctagtggccagagatgaggataacaacgaaggtgggcttaactcagtggtcttggaattgtgtgcctcaggtgctaaaaggggtaaccagggaatcagcttagcaggtgggttcacgttcatgtgctttacatggtgggctttggtgaatgatttctttttaaagagcaggttccactataagaaatatttgaaaactcctggcttagataattaagtgtctgtgcttaagccagggaatctgaacctaattctcaaatagatgttcaacagattgagtgacagagaaagtgtcttgtttttttcctcattccccgcaggacagtgagtctcaacaggaggaggagaatgagtttgaaaaataataaaattaacaatttagatcatgaaaaaactgcatactgttttaacaatacagactacacaaaacaaaaccctataaaactggttggtggattatgggttaaaatgttgcaaaactgccaaacaggtaaccacaatgtgggacagacacgctgaagatgcagaaacgtacttatttcgcagctcatgtaccctcctgaccctggtaaacagcaaagaatacacacttagtgggaattcaccgtctatactttttaaatgtgttattaaaaacacgacaactgggcagttgcaacactcatgcttgtgagtgtcttatatcctaagtgaggttcccttggcttgttttctttcatttgcaaagtctggctacaagaatgatttagttctccctaaaaatcattgccaaaagacaaaaaatgtataagtatctatcttaaaaacctttcaaagttagaaaaaaagcctttaaaaccatattacagcatgttatgataaactccctattatacttttacagtagcaatgtcaatgctgcttgaacataaaacctgtcatctacatcaatctttatatcttccaagtatttttatattgatcgttttatacccgcaaccctgaaggtaggataaatgtggtgactgaggctcaatacattcttataaatacatataatcaggaattgccttcagggaaaaggtatagaatcctggtccactgaattctacctccactgtttctccaacccccatctccctccctccaatacctggtactctgaaatgagttttaaacaatcagctgctgtccaaaacatctttaagtagttatctgatgtggtgtgtttacaaaattatgtatgttacattacaggctttacccagaccttgggactgttcttgagttctgaaaatgactagaatcttccattattttcaggtttcttcaattctacatgctttcttaatgactctcccattcacccgcccctatttcttgtcctgggaccaaatggttgctagaggcaaccagtgtgaatgttctaatcttccaagacacacacactggctcacctaggcaggtaactcagtaaatggtaactctagctatcactctcccttgctagcaatgcctattttcctatacctaccaaattcctatccttggggcttctttcaagttccacctgctgcaggaagcctcccctacctgctccttgtccacatgaatgtattctttccttgtctcctacaataattgtgtctctttactatttaacacttggatcctagttttcttattgttatgtgaaacacatgtttagaagccagaaatcggggttcaaatgctagttcaggacctattatgttttaagctacttaacttctctgaatctcaactttcacatgagaaacaaggataatcctttttcaggcaaacaaggacaatagttaatatatttaagtacttagctttcctccacctgacagatagtagatgctcaataaatgctgaattgaaaaaaatgcaggacccaggtcttattcttctctcatcccttaataaacctggcatgagctacaaggaaagacctacatgattattagttatttttccttatatagctcacctcttgtctcaggaaaccaaagtgagtaatgcttttttccctttgcaattataattacccgcatgagtgtcatcacagtcagggtactagtaatacttttcatatgactaattggcatagtattttatcatttttaaagataaggttttgtggggttttttttggatgttgtttcattttatttttctagtaactcttggaatgcaggtagggaaggtatcattaaactttatatactagaaatcttcttattatttacttatttttgagacagggtcttgctctgttgcccaggctagagtgcagtcgcatgactgtggctcactgcagtctcaatctcctgtgctcaagcaatcttcccacctcagcctccagagtaactcggactactgagatgtgccaccatgcttaattttttaatttttttttgtagagaccaggtctcactatgtcacccaagctggtatatactagaaatctaagctcagttgagagtggttaacatcaggaataccacttttatctt

SEQ ID NO: 51581 - DNA, 1872 bp, Homo sapiens
atgtgtaaggaattaaaggttacatagtaaagatagagatatctcatttcttctatttaaggcctgttgtatgatcgctttttcctaaaaatagttttctcttcctggttttgcctttaactccttcaaacaatccattagcacttagagctatctcaaatcacatgccaacttaccaaagaatgaggtcattaaatgactgcagcacaaggacacacaatttaatagggttagctaatatttaatataagatatttactgtaaatatcagtgttttataagtactgatctgaaaagactgagaaacaagtaaaacaagtttgccaccttttatgaacactgcttcttgcatgttcaacctgttacacatggacatacatacacggtataagttcaaatcccaggctagccaacacaattttagaagagacttctctaatataacctgctctattctacctatctcgaacgcttcataccttgtaatgttttgtttgttttactgttccaacatccctgtacaacctggaccgcataaagctttttaggcactctgattagtgttttctaatgttactccttgataatcttttacctgctttgcctgaactgcctgaggcaggcttaatcattttttaatacataatgaaataatacagactatttatctgttcagtttgaagctaaacagttgaatgcttgtgtaaaaaatttaacttccataggatcaaaacaaaaaccctaacgttcttataatgcagttttaaaaacacacgttaattaacttaaagattcaaggtggatgacctttaagatttgactgggatacacatcatgtgatttggtggtacacactgagggagctcacatgagcttggaagcaaaataaattgaaatagcacttactaaacaactttgttgctagcactgtgcagggtccttcacatagttctcttatctagtcctcctaacaacctgatagccaccatttttttattttaatttttttaacagagaactatccagaaaagatgaacaacttgttcaaggtcacaaaaatggcaagtgagggagcctagattagatcagaggtctaattcccaagggtatgtttgtgatattgtgaaatatatatttgctcttcatctccatttcctaaagcccttggaatctctgaaattgtaagaatgtcatttgtatgataacgaaatgaatgttgctggggacccgtagatagcttcagggtggggtctggtcatcggaaagatcaaagcatgatgagatggttggagctttcagtgccaccctccaacctccagggacacgacagggcttggagactgagttaatcaccggcgaccaatgatgtaatcaatcatgcctacagactgcaggggcagaaatggagtaatccctttcctccccatcatatataatcatggtggatacccctataatgaaaaaaagttaacaagtataacagttattacatgcatgtgtgtgcacaggagtcatacaaaatgtgaaaactcaaagagccgatagatggctgacacttaagtatcattttcattggggaaagagggggagctgtaaataaatgggccggaagatcagacaatggtttgtaaatgattccctttgggaactaaatgggactggagaacagataatagattgggacaggtcatctgggctccaggtgtggtgtttaatttttagtctcttcctctgtgatataagttttaatctctggttaataaaattacagggatggaatcgcaggcaactgtgttcctctttaaggtccagtttctaggtaaataagggaactttggtgaacagcctcatcttgtgctttgggagagacag

SEQ ID NO: 51582 - DNA, 1257 bp, Homo sapiens
aatacatgtttttaagttaaggatttttctgttttacttcatgtattaattgggcataatatctagcaggaaaagaatgtaagatgagctctgtgattctgaaagcatgggcctagaggagcagcatcagcagtacttgggaactgtggggggaaaagcacattcttatgttccaccccagacctactgaatcagaaactttttttgcagggcccagcaatctgtgttttaatcaataagccctccaagtaattctgatgcaagctgatattgaacagcaatggactgtttcaccaaacctgttggaaagctaaagcaaagacagcagtgaatgtcaaattactaggaagtttgtaatatggtacagataagaaaaaggcaatgccaaaacatgtagcatgggtccacccacaattaaccaggctaggcaaagtgtggcagagactatctgaaacagccttattttaaaaagtaactaagcccaaactgatattcaaactaaaaaaaagaaacaaaaatattacctgagcacacacagcaaataatgcacattgatccaatgaataaagctgtaacaagagtagaagggaatcacagaacatgctcgacgcaataccacatgcatgctggggtttataggttcacagtccatttctgggtaacctcaagcccatgactcatgtagaaggaactgaggtgtggagatcaatgagaacaagtccaacagtgtatttatatgactatttctaaccaagaatatttgtacaaaagcatctaatttgaaataaattggaagacccaattttgtaattagttatttgctttaaaaagttgtccctaagtcatttcagaccatatactcaggataaaatactgtcatttacagaatggtgttcagtaactaaaaatgttttactttaaatatcaattggtagaacaaatcttaaataataagtaatttctgtgctttctaagtcctatcaatgaataccacaatttttttcttcaacactaagttaagggctagggaaacaagttattacaggcttattgacaaatactgatgatctaacatttcaagccatttgctataaataatcaattgctaaccttataggccaatgggaagttagtggttcttcaatataaaaacataaagaagccatctgaaaactactaaaaaaggctgtacctatgtattatactatactgaagcaagggcatccagaattaaaactgacatcgtctttgattcac

SEQ ID NO: 51583 - DNA, 3121 bp, Homo sapiens
tgcttaggtaaggagcaagtgagtatatgccgagactgctggttaacaccaaattcacaggttgttctcttattctctaccaaaaattctctctggcatttcctcagctatcatcacaatcctgcacctttcacaaaccaggaagttttcttagatgagatttaaattttaaaacacatccacttgggataatgtttatgctagacttaagttcaaaaaatccctatcagcttgaaaccattatatcggtaatttccaggtaacattcaaatatatatatttttaaagacatgccacagctagtacctgatttagtgatttagtggagagtttaactatggataattcattctaacgtttggtaaacaggtagcatacacatacatgatgacagtgtaaaattaaacaggaaaaaaatcagcaaaagcactggttattcacaatcagcacaggactgtctcgtaaattactttcagagaagctccaaactggtgggtggcaccgggtcaatgcgattacttaaccctggcagttacaactaaactccactttgatggtatccaaagcttattacaaaaagatgactgcttgggcatatcaagtacttcggtgtcctcctattttgttcccacggaacacggagcctgacacctgaaactcttcagacacacatcaccttgcttcggggctttagaattttgtgtatattatttgtaaagtccactggacataaattcagttgtgtgtgtacaggattaatgtatttcctgcatgcacaagtgaagaactcatgtcaaatcaagcagttccctctctcccaagtaacttttttatcatttagtcctaaaataaccataagcaacaaacattaaacactggcatagcaacgtgcacacatcatgccctggtgctacacacaggcggattcgttcatctctggtccccatccagacgggtgctcccggcctctctcactcccggccggtccagcctggcttcacccgagttttgctgtgaaatccgccactttcgctggccccggcaaaaagcaaggcgcctcgtcccgagggcagagtttcttgcaactgccggataaacatttcccgaaagcttcccgcggcccccacgcccggtccccccacttcacgagccccggggaggggcccacctgcctcccgccgcccgccccataccctgtcgccgcggctgcactccagggccgcaccgcagcgcccacttcccggccccgagccccccacgactcggacgcccgaccctgagggacgggggcgccaaaaaagcaccccccgacacaagtgaccccacgacgccccccagaggccgtgtcccgagagcctgtcagcgccccggaagggggtcaggcggggggctgagcgcccggtgtcctctccgctccggacgccctctcccgccccaaggcactcacctggcccggggtcgggggtcgggcgaggaggccgccggcccgccgcggcccccaccctcccgctcccagcgccccgcgccccgagcccgaggcgcgcctggagcggccgggggagagggcgcggggacgcgccagcgccagggtgaggggcgcgcgaggggcggggggcagggggcgcggcgagagctggggatcggcggcgtccgcactgagaaagcagcctccgccgcgtccgtcatggcgcgcggcggcggcagcggctccctccggtctctctgctccctcgcctttagtttgacctttccctccagtgtgtctgagggagagcggctgtgcgcgcgcgtgtacatgtctctgtgtgtgtgtgcgcgcgcgcgtggggaaggggccgggttcgctccccgacgcctgacgtcactgccatggcaacggcaacccccgcccctcgcttcccatttcctgtccccgcccactgtgcacgttctggggccctcacgtgctcactcacacgcacgcacgcaggcacgcactctcggggcgcgcgcgcccagagcgctggggtttgggaggtaatttggacctccgcctgcctcccttccctcgctgcctcccggaatttgaccaatcccgtgaggaggagccgtgggcggggcgggctcggctcccggagtggcgtgaaaaatttcccgaggcagagcgaaaagtcttcatgcgttactgagcatgtccggtgcccgaaggggcgctttggacgccagtgaagcgaggagaggcggagaaggaaccgagcgggcagttgagggaaatctcggaggaggttacctgcgatcaaactggggctgcgtagtgttagggtcaggcagctttgaagtggaatccggatccgccactctcgctgcgtgatattgggcatgccatcaaagcgctctcaaccgaacgtctcgggtaaaatgggattagtgaagtctaccaaggtagttgtgaggatcaaaagagataacgcggaaaacgcctcacctggcacgttatagatcctaaatgcctagctattattatggagcccacaacctccatattttacaactgggaacacgggactcaaagagattaaaaaactaaatgactcactcaaggtcaggtagtggtggagacccaggcttcaagttcaatactctttgtcctacaaagccttcccttaagcaggggtaataaaacatttcagaaaaaccaccttaaagagcatcgcttgtgatctgtggatcacttggtagtccccacctccctcccatccccgcaaaggtttagagctggacataagggccttggtgcaacttttggagggcagttgttcagcttctgaatttgcatctgaacgagcaataaggtggggtgctttcctcaattcccttggggcccctacattttggttaaggtgtaaacagcaaggagctccaggtcctccacgtctctaactagctgaagaaagattaactcaattaaccagcatttacccagcatccatcaagtagtaaggttttcccagcaggcaaggagcctgtgacctcagggctgtgcaggcaggcaccttgggattcagacacacttagacttccagcccattcctctaatttagctcttaatcacttactgccaggcagtatttcttgaatgttg

SEQ ID NO: 51584 - DNA, 1078 bp, Homo sapiens
tggcaaggtattaggtaaaactgtcacctttaatccctaggaagacagataatgcactaaatgagtttatggctttaggcaaagttgtgaaatggaatgttactctcatgcctaagttgctgtgggctgcacgtagtgaaatgatatgaaagttgagcttaggtaggaattgtccatttcggggagatcaaagggagtagaaagggtccagaaatttcagaactcagaggactagagggtgtaattgattttgatttccaaacaacaaaagataaaactggaaatgtctttaagtgacaaagactgactaaaattgagccttgtggcaaggaccaatcaaaggtattgttcctctattaaaacctctcaactgattacagtggcaccaattaaatccttccagttggacaaaatgacttagggaaaagagattctaagtgtagttctttcattggagccagataaatttaagttacctgcaattaagtctagagggaaagtcgcaactaggaaagaattacggatgtggccattggcacatgaggctgtttggaatcaaatagataagaatgtgagaaagttatgttgccaaaagagtcaccggctcatactaaaatagattataactgtttgagacttgaaatgacctttggatttccaactttctgtgggaagaagacagagaagcctggccagcttccaaagaggacatattgtcctttacaaaaaatgctttaggagaacaattgaaaaggaaaaacctcccggaggacagtgccaagcaccgtgcagaacaatagattgagtgttattgttctaggtccagaatcaagtcctaatcaaagaacgtttccagtctcggtggaaggtagtctgcaacttctgcccaagggactttcagaattgccatggacaggtgacttctgcgttcctcttctcctctcactttctgaatgggagtgtttgttttaggtatcctgtttcaccatgatacactgggcatatgaggggcagataacttgtctttttgatccataggttttgctctcaagagaatgaacatctgggcctggtgtag

SEQ ID NO: 51585 - DNA, 3385 bp, Homo sapiens
gtatttcattatgagttaacatatttattctcatgaacttcttatgaaataagtttggttgtcatctccacttgacggatgaggaccctgaggtgaagaaacttgcccaaggtcacagctagtgagcagcagatccatgattccaaatccaggctgtttaaccccagaggctttgcttttaactgtgccatttttctgcttcttgcaagttgagactgaagagagccatgaagaagactcttactggggactctgaaatgacaccttagccgggggaggagtggagccttgagagtgagggcagttgagtactcgggtctgggacttagagcttccaagatttctaccacctcccactcccctcgggtttgtaaagctgcctccatttgcattgggagtgcgggggggctgcctgggggactgtggcgattgtcctcaggctattggctgagagtggtatgccactgacttattcctccaagagacatttccagtaccctccatccctgccccctgtactacacactggtgaccttccccctcaaaaacaaaactcaaactctgtccctgatgctcatggtctactgaaaacagaattacagctgtctgtgaatgacctctgaccaagctggggggacacagagaagggacttgtgacttgctttgccagggaggtcctgagaggctgtccagggaaggtgacattgaggccgggacttgagctggctgtttgaaggcaggaaaaatggcagggcaaggactggagtccttcgccttcctgggggacgtttattccacatgcctcgggaaatctgaaatggccttggagagcatttgctgggggttgggggtgggcggaaggggacagagagcattgccaccgacaggcggggcgtcccagggcctctccccaggagcggatgagctcagacgcggctcactcagctgtgtccaggcacagccggtttatgacctaagagaatgacaacccaggagcaagtcgggatgacaaagacgcccagaagggcacgcgcttttatgtaaccgacctctgagctggcggatctcaggaggttggcgctctgagctcaggcgcggagaaaggacggcgcccctgccttactctcttataagtacgaggggacagcaacgcgacataacttagagaagtccaggaagctttagagagcagggcggtcccgctgctattcctcagagcgcgactggggcgaactggggcgcccttcccagctccagctcggcccttgtcccctcttcccaggatcactcgctgggtgaccttgggcgagccacttgacttctctgagccccagtttcccagtccgtgcatctgaaaggctgtaatagcgtcgtggggctccccactcggccctcagggccaaaggtgggcgccggacacgcgggaggggcccttggacgcaccccctctcgcaaacgcccggttagtcccggcggactcgcagtggagagcggccccaggaggcggcgggcggcggggcggtgggcgccagtgcgcaggcgcggcgcggcagggcggggcggcgggcgcggggcggggcggggcggagccgggcggggcggggccggcggcaggcgctgggcgctcggcgcggtggctcagagtgcgcggggcggcgcgcggcgtgcaggtcgcagctgtggctcgggtgctggcaggtgctggcgggactggcggggatcgccgtggactgcctcaggggcgccgcagcccgctcggcccgagggcccgcctaaccgcgccgcccgcgcccgctcctcctcggcccgcgcccggagcgcgggggccgccggcgctgggtactcggcggccaccggggatcggggctgagcggtcggttcccgcccccgtgccgccgccgccgccttccggccgaccgcccggcttggccgctgctgccgcgtctggcccccgggtccccgccgctgggggcgcgggcggggtcgggggttgccgggcgccgccccccgtgcgcctggagtccacatcccgggcccggcggccggcgagcatggaggagaagtacctgcccgagctgatggcggagaaggactccctggacccctccttcacgcacgccctgcgcctggtgaaccaaggtgaggcgccggccgttaactgccggccggcggcggttgggggccgggtggaaacgcgggggcccagggggcccctccgtgccctctgctgtcagcggacgcggcggagacggaggcccgggtggcccccggggtcgtttgcacggggacctgggaggctgtgggacacctaggggaagaccctgatgtgaattttggggacttggaaggagaaggctggggcgcatgggtgagacttgaaggaaatctttggggactcgggcacacccaggggaaacttctgggtgggggacagcgaccatctgggggcttcgttgggaacgaggttgaattatgtcatggaaggggagcgtgttggactcggggaagtagggcgtttggtttgtctaaggtactggagaaaaagctggaggaaaatggaaggacttgagggactcaaatgcagaagaggtgaagggaacaggtgcttgcattgttagcgaagtttggggaccttggaagagggttggggtcagaccccagcacctgagaggagaggagctccgtggtcccaggggaggagcccagttccccctcccagccctttgtctctcctgtgtccaggctccaacagccctggcggggcagtcagccctcccaggggatgggcagcccatgccaagccttgcaggctggcccttggagaagtcagtaggggagaagaggccggcaaaagagcaccgttccggagggcgttgggttgggtgaccctcattggtggctggcttgaggttcggaatagtggtgaagggagtccttgccattttcacacgactccagccagctcagggtgtgaaagatcctaggaagtactgcgggtcagggatacagagatttctggaggcacgcctacccgggacagtgttcccctggctttttcctcctgtggcttcctgaatcatctgctggcatgcacggtaaattaagccttccttcctgggagcagtctcctacttttcctggaatatgtgtttcagatgaagatgggtgtgggtgccactggtctgtcttttctctgggaaatggcagcaacatgatctggtcagatctgttaccttttgcaggaattactgtgcactgacagtctgtggttccctagatgaatcggatctgctgctcttagtgctcgccctggcttttttattgttggaagtgaaagatgaggcagacatattctatttgtatatagatacctatattttaaaac

SEQ ID NO: 51586 - DNA, 1254 bp, Homo sapiens
ccttactctgaattggtaagctgtaaatttccataattttttacatttccataatttttcgtcaatcagcccctgctgctattttaagaattttaaaaggtgctcctagcatattattgatgttcttcgttgatatgataaagggcaagagtatgtgagggcacccttttaaatgtctgttttcgatatatatcttacacttggggtcactgttgattcgtgctcccatgggagaaaatatagaaattatgatgaagataaggggcagttttcattttcaacatttttccttgttctttctctgcttcaatgtttgtgccgtttgtgctctgcttttcttccactagatggcgctccacatagctaggttaccttctttctttcgcattggtagctatttctgaactgagtcttgatcaataaacgtgcattgcttttgattttcatgcattggtatttttcatattattgatctcttaagaggcatacttgctaatcaatatttgcagaaagccatgcctttttttgtagccaccattgctcaagcgcctgaggtatgcctggcactgtagctaggttcttcacacatttcttcatttaatccatgactttcacgtgaatttagttttgttgttctcattttacaggtaagaagtggaggttagagggatttataacttgttcgaggtcacaaagctaacttatattatagggattagtgtgccctaaagaaaagtatactccaaaaacattaaattgaaagcttttgtcaaataacttgttaggatagtctgacttacggttactggccatggtaatatgtttattttgggggaaaattatactcctcacagttaatttgctttggaatatataaatcaaattcccaaatctgatttgtataagaaagcacacaacagtaacaaaagatttgtcagttggtgtgcaaatttctgcttcctcttgccttctgtttactgacttgagtgggctgagacttgatgagtactagctataaaatgtgggaggaattttggacaaagccaggcttcctgttttagtaacttttagcagggctgaatgctgttaacaagtccccaggacttaaaaaatttatcctttcattttattcatttattcgacacatatttgttgaattgctgagttgacctgtgtgttctggaccatgactttacctcactgagcctctattccctcatctgcacatggcaggcaggatgccacctcagtggt

SEQ ID NO: 51587 - DNA, 593 bp, Homo sapiens
gacatgaaaaatacattaagagaataaggtgttaccatggtgatcctatcatggtggaagcgtgccccaagcatggggagagcccttggagaacacaagtcatggatatgtttggagggagttttcacaggaatggtacatttgagattgtgttgaaagtgtaaatgggatggaaggagaaaagggagacaggataatagcacatacaaagtcctggagcctcgatagtccatggtggatttcacaatggtgaagagttatgggtggatggctgctgtaaggaagggagagaggatgagcgagaacgttcaatgtgactaattccacctgggtatctgtactgattaatggaatgtggacattgctctaaaagcaagcagagtaatctttgtaactctgttggatttaagggattgttcataagatgattagatcttgttacacagaagtgcttcaaaaattatatcaaatcattgttaaaaattttaattttaatgtgttttattgttttcacaaattggtgctgtgtgtgcatgtgcataggtgcatatgtctatatacatgtgtatgtataagtgtgtatgtgggacatc

SEQ ID NO: 51588 - DNA, 1411 bp, Homo sapiens
gggcgacagagcgagactccgtcttaaaaaaaaaaaaaaaaaaaaaaaaaaaaaaaaaaaaagattccctgtgtttgctaaagatgaggggttggagttttattgttgtcgttgttgatttttttttgtttttgccttatcaggtcctctttccacccttcctactctgctctgtgcccagaggctgatatgcatggtacaagacctgtatcatagatatatttaccctctggctttgagctgggttaagagctatccactagtggtcaatagcagaagcttggcaggagagagaagtgagctcaaagtgtatatttgctttggcccttgctgctgtgtcaccacaaattaactgctttcctgtgtgcagtctgtagccccatcaggctaccatattagtctgtttttcttttcctttcctggcccctgcatgccattttagatgggtaaaatattcacgtggttaagagatttaaagcagtgcaaaaagagatacagtgaaaagtatttctgtaccctatctactttgtcctctccatgccaaatagataactagtttcttatactgtcttttgttgcttaaccacaggaatgtgtgttctgaggaatgcatccttagatgattttgttgttgtggaccatgatagattgcacttaaacatacctggatggtgcagccggcttgctgtacacataggctaggtgatatagcctgttgctgctaggctacaaacctagacagcatgttgcaaagccagagtacatgttaccatactgagtactgtaggcagttgtaacacaatggtaagtattttgtgtatttaaacatagaaaaagcacaataaaaatacagtgcaaaagacaaaacatggaatacttgcataggacacttaccatgagtggagcctgtggaactggaagttgctctgggtgagtcagtggttgagtggtgagtgaatatgaaggactgggtcattactgcacacttttatacatctggcagcatggaaggtttgtttacactatcattgccacaaacatgtaatgctttgtgctgcaaggttaccacagctaagccattactaggcagtaggaatttttcagcttcattataatcttacaagaccactgtcatatatgttgactgtaatgtcgctacatgatgtaaaactgtatatcaatagggagatgttttctgtgtgtatataagtaaacatttgtttcttacattgtgtgtgtgtgtgtgtgtgtgtgtgtgagtaaacagtgcatttggtaccgatctttgactatcagaacatgaagtttcctcattttgtgcagtagccacatgctattttattccagggtgtgctctagcctacttacccagctcctgttgataagacatttaggtggttcccagtgtttt

SEQ ID NO: 51589 - DNA, 2020 bp, Homo sapiens
gatgggacagtgatcagagaacactaccctgagcttggcctgttttccaaaggggcttttgggtggagcttgtctgctggttcagattgaagatgggtcaaagttcaggggtctggacaaaggagagaagtggaaccaaagtttaactaactcaggacatatgtctttttctgattgaccagtggaaacaaacagttcagctactttttaaggggcaaaataatgggaattttgagggtttgtgtctgtccttgctgtaggtaaataaaggatcctctgtgagtcttatctaagttatgtgggtaagagtgggcctttgcaacaagcactttccagaaacacaaaagggtggggagattttgtaatcatcactgtttttaggtgcacagggctgctcaggtaaaattcaacattgtcaccgtgcttaacactttatctgatattttattcttcataatgaccctgaaatgtaatgacttttataagccacacctggtaaatgtgaaactgaaaactagaaatgctgagaaacctctgtgttcacattgctgataagatgagggcactgtatgatgacaccccttcagaacccatagcaagtgggacatcaggaggtgttatgggactaatggcaaagaagacaactatgccgctttcgttgtttattatttatatcatccagaaagtccaaaatacatactcagtccatctattagttaggccttttcttgttgcgaataccgactatgactagcttgaaggattttttctttaaaaaaaggaaaacaacaaaaaacaacaacaaaaaaaacctaccttagggtgtcctatagaatgcatggaggaattgaacttgcaaactgaaaagacagtaataagagctttaagcctaagaaattgtctctggcttttccctctagcagtattttttacctgggccacaattgacattttaaacaggacactttggtgaagggcaggaccatctgtttctgatgcctgacataggcctttgcccctgagtcccagtagtgaccctagtcattgtgacaaccaaataaacatgctaaatatttccaagtgtcccacagggaggtgatgcaacatctgcagtttgagaacctgccggagcagccaagcacattaccattattgtgactcagctctcaggacattcagtatccacataatcagttctaaatttcagaatctcttgatttccagtcaaaggccaattcctcggccgatctgggtggcctgggccaggtcatgccattttcagtgtggtggctcccttggtagccttctcccacttgccataggttctgaaggggatgcagttccacagtaggtgggtcttgttcagataaaattgtatatatccacaacagttaaattcatctatttattacttactaatttggcatcaagtatacgcaatctgctggctgctctcttaggtgattttcgtatactttcttacttaattcatgcgacctgcacccacagtaggtaatatggtctgtgttttgtggatgaaaagtctgagactcaggagggttaatttgactcaggagatagaagtaacttgactagggagatacatggttgaacagagttgagaggaaaaagaagggaaaataaaagtgtttctggttgtcacagtattcatttatgtactttttgtgaacaaaacactaacagaagttaagtggaaaaaagaaacccctaaaggtatataaaagtcaataaaatgctttttctttttacctggaatgctgtcaagtgacctttaatcaatcatgtctttctatggacttcagattcttctgtataaaattagatgtttggattggatgatttctaaagcctcttaatttttatcacttgggaactatttgacctaacttaagatgcaagataaatatgactatttgactatcaaaatttatttttgctccatttttgaaacctattaaaataaatataaatgaaataaaaaggcataaatttatgaaga

SEQ ID NO: 51590 - DNA, 818 bp, Homo sapiens
acacttgtgtaagcacttcctgaaggccccagaagagagattccatcagacattttcattagtatattttcattagtatatttcccctatgtttaattattgaaatgtactatttccagaagtatggaataactccagtttgggtattatacatcttttctgagcatgtagcaccccgtgctatactttgctgttactaggaccatatggcaaagcaattactaagtgtgttaatctccagactagcttgggctcatagtagagagggaatgtgccttttgccctttgtattgttgggtccaagcatggtgttgaaattcagtgtgtgctcaataactattcactgaaatagtaagtggagatcaggtttttaaaagcctgagaaatccgtaactgcttctatgtcaggattacatttaccaccaccccaacaccacagattatatattccatgtggccttcccattacccaaaagactaagagcaaagtactatgaatttagccttggactgaatacatgtttaaccatttaatttgcaggcctattgcctgctggaattaaaaaatttctttctttgcccctgaagggtagcacatagaaaagaaagctttagaatcagacctaaattcaagtgtcaccaccactgctacttaaggggcacaggaaggctccttctctacactttagtcagatgggggcagcactgccaatattacaagtttcccctgaggagtcaaagcatgccctgtgtaatgcggttactgccttacttgccacacacacagccccaaacaaaagctgcttcccgtcttccgc

SEQ ID NO: 51591 - DNA, 2761 bp, Homo sapiens
gcgtgtatcaccacgcctggctaatttttgtcttttttcagtagagacggggtttcaccatgttggccatgctggtttcgaactcctgatctcaagtgatccacccatgttggcctcacaaagttctgggattacaggtgtgagccaccattcctgcccgatgttctttttcaacttgaggaaatttactgaaagttgttatgaatgaatgtcgccattggccgcatgctttttctgctctatttatatgatcacatgattttcctactttggccttgttgatgtggtgggttacattgattttctaatattaaatcaaccttatgtacctggaataaatcctacttggttatggtgtataattcttttagcacattatggaatggagtttgctaatagttttgaggatttttgtacctgtgttcatgagagatgctgatttctagttcttcactttagactgtctttatccacattggttatgaggaggccttgttcttgttccccctcagaccacatctcattctaaggaggtcacagagcatttgggctggtcacaaatctggcacctgttaatgcttttcctccccatctctggccagttgtagcctctgagggtgatttagtattttgagagatacttcctttgtcaggtcccaaccagtgctcaagaataggctggggacagtcacctctggcctccctggctggcccagactggtcccagcctctgatgagtaatgtagaaatactttgaacgaggcacttccaatgaccagccccacagattgggttaggaagtgttccctctgcttttattttttggacaagattatagagaactggtatcatttcattctttaatatttgacaaaattcattgaaaccatatggagttgatgctttcttttttggaagatcattaactattgattaaatttatttaatagacataagcccattcagattatttaattctctttgtgttggtcattatgaatcagaatcagtcacattcatgtaagttaaaaaatgtgtgagcttggagttgttcatagtatttcttcattattcttaaatgtccttgaggtcaaaaataatgaaatcctcttcctctctctctctctcttttttttttttttttttaatttttctgagacagagtcactctgtcacccaggctggagtgcagtggtgtgatcctggctcactgcaacctcagcctcttgggttcaagtgattgttgttgctcagcctcccaagtagctgggactataggcacacaccaccgtgcccagctaatttttgtatttttagtagagatggagttttgccatgttgaccaggctggtcttgaactcttggcctcaggtgatccacctgccttggcctcccaaagtgctgggattacaggcctgagccgtcacacccggccaaaaccctcttcatttctgatattggtgtttgggctttttttttctctttagcctgtctagaggtttatcaatttcatcagtcttttcaaagtccagctttgggttttgataatttgctatttttggaaaatgagtctttagctgcgtatttgctatcccagacacactgaagaaggaggaagctgatctgtaggcagccagcctgccagctgcagttcttcctggagggccttatccagatgaggtcatcatgctgtgtctgtattctctggggtagccacacttttctgtccttatgttttctcaggtttttgcttctgtggagccattcttgatagagccatctccttccttcctgacttgaagtcttatgatttacattagaaatacatgaatatgttgaattctacctcagaaaatgcctgtgtttacttaacctaagaatgttgttttattaccatgtggttgacacattattcaggaaagtatattttattgtctctctggtggaattttggcatatattttggcctctggctttgctcacagctgttctgagacagttttaaaatctctctgagcctcagtttccttgtcctgagataagcaagaaaaggcacacctcatagtgtgggagtgaagtttgggtgtaatcctggcatggcattatatagaagtcttgggtgcatgtggcttctccaaatatcacagtttcctactctgtgtattgaccagagattaactccagacttctatattgttgctagacgaactgcctaaatgccttaatttccttttgacagacacctgtttcatgtttgctttagttctttgcttgtgacttccttcttcctttttacaaaaatatagaacattgattttgtttctgaggtataaatatatgtgaataacagaatgttagagactatgatagatactgctaatttgactctcttggttacaggggaaggggaggagttacagcccggccagttggagttgtagtaccacgagggacgccaactcccagaggagtcctgtccacccgagggccagtgagtcggggaagaggacttctcactcccagagcaagaggagtccccccaactgggtacagacctccaccgccacccccgacacaagagacttatggagaatatgtaagtgaaggtgtcagacaacagccttgttcatcagattgacttaatccagacttagcactggatattgtacccgcgtacgcttcctcaccttgttttggttcttgagtattctactttgtttcagcaaatatttattgagtgctaaagaagtacttaatacta

SEQ ID NO: 51592 - DNA, 1760 bp, Homo sapiens
gctaacctgttgagcattactacagttcttacatttctctctcccacctagcttgtgaacctctggaagggcaggaatggatagcttttatctctttatacttgggagagagtgcatactgggagcccactgaattatattttaacaaatcccgtaatagttttacaagtttgttattcagctgaggaaggatgtgtttcctctctttgaattcgttacagttaaatgtgttcctacttcctaataatcttaccagatgacaataataattatgcctcagctcttccataaatgctgagtctcctgaaagtatcagggactctaaaggagagtaaatcttaaattccttttaggtaggcccagtgtctgttcatttccactttggcttacattgatttcttaggtttagatttaatacagatgtggttggatgatgtagtagaaattgccaggcaggttgtgtgggaaacctggatcctataccccattttaccataaattttaatatcgggcaagatatttaactttttgggcttcataatccacttatttcagaaagaactattgccttcattacatgtattcatctttccattcaataaagattggatttctaccgtgtgagccagacacacatgttgtctgtctcagcatgtatactctaattattagagtctggaaataaattatatagattaataaaactgaaaaattcttgaaaggttaaagtccaaaggaggaaaagcaaaagcaagagacattcaagacatttgggtttgctgcttgtacttttgattgttttatttattttttatttttgtaaatgataggaaaggcattaaaacaattgaattgagaagtattctgtaggattaatttactcccttttccatctgctaccaaagataatgggataatggccctgtagaagattacctgcgtttttccagaaccagacaaaggtttaagagctctaaaggaaaaagtcaaccttcattgtttgattcccacactcactcatgcctggcactcttccaggcactgactgttactgcagctgtgatttcaacacagagccagtgctctttctgtcacatggtagcgttgccttcaaataactgacggtcatatccgccagtgttgtaatttggctggaatgcagtatttgcaattttatcagcttcatacaattacaagtcttgcatacataaaacagctgtgtgctttccaggtgtgctttgggtggtatagtgggacaccaaaggaaaagaaataccatcatgagtgcacctccttccccgagttgaattatcatcatgaagggttcagattacaaacgttatagctttcccacttaatttagcatctattattcctggcagtgccttttaagattactagtcaagagaaaagattttcctcatttagcttagcattttgtgagctgccttggcacagttatagtaaaagcttcagtggctttttcagtatagtaaaagcttcactgtatataacaaactttgctggtacttggtataaggagtagataaagcccttcagcttgcttacagtggcttgccatcagtagcactgccttgcagatacccgtttgacctcatcttcctccactgacccagttttctacttccaacttttctaatacagcttgcaacctctggcataacttcagaccttggccattggtctcaactgtttgaaaacctaaagattactcacccatcacgcttagttttgcagca

SEQ ID NO: 51593 - DNA, 773 bp, Homo sapiens
agctttttaagagtagattctaagcttagatgtttgcttgatctaaatctttgacatccccttctatactttgattccactcaattatctgttgcgttatagcaaataatacattcactattttttaaatttctatcttagcctcagaaacatctactgaagaattttataatataaaactatgtaaatgagaaaaaacgagcaaccagtgattcagaacactagaagataagagcatgagggaaaaaagggaggcctgctaaacgctcagatcacccagtcctcagataaaaaaatcttaaggtttggaggctcttactcagctccactactctctccttttcctcgttttaatcatttgctgagtcatttgtttattggttaatcccccttcactgttgttctcagccagtgacctcatcccctaccttgtgataaaaatagtagatgttcaacaagaattccctgtgctccctacctggaaccttagacactgatttgcagtcacactcagcttttcctccttttctcctattgcaccctgcttcatgcttccctatatgtttcaagcgttgtccactgaacaaataatactcgtcataatggaagtacaaaatattcaccaccatggccaaatcgaactgtgaaattgaaatcctcctgaatgaaatcttgtgaaaattgcaaatttaatctcttaaaatcttcagtataaaaatatcgaagtcaataactcaaagacctaaacaatttgaaaattcagataaattgct

SEQ ID NO: 51594 - DNA, 962 bp, Homo sapiens
agaacaaattagtgggtttaaatattttattgtatttgctaattatgttgataatgtgttgaacaggagcggaaaatgcatgagtattcaaaaagaaaaaaatgataattgtgaatctatgtatgcaattggagatttgctaaatttcaaacttcaccactggcgttagtgtcagtaacaagttcaaatcaattcagctcatgcacaactgctgaaagaatgagtcatactgctgggtttaatggagagacaatgacgtgcacttggtggtgcaattttgaaatcaaatgtgaagacagacatcgtttgtcctttgcagtttggctggagtgtggagtcataggtcatcacaatttgttctctttgctctgttggtttaatcagcattttacaacagtgtcaactaacttattttagtattaattcatagtctctttgaaacaagcatttggatttttaagatggtgtgttctcttttattctttcaataagcatattctgagtacctaacgtgttttatcaactataaatccaacagtgcaaacatgagtaacatggccctgctctggagactactgggaacacaaacacaggtaagtgcatcaaacagagataaggactgttaagagggggtatgaaagaaattccatgtgagaacagggaggtgtgcccaattatcactgtgagcattagggacaggtacatactaaagcccttgaaatgtgctagtaagaatataaaatacgtctttaagacagaggttttcattatctccatcttcacatagaaactgagctgagagtttaaataatatagtccatgtcacagattgttatgatctggtagagttaggtcatgaacagcagtctagttatcatttatgtgtcatcactgcaaaactgagagcacaaagactctctatcatgctgcccatatttgcccaaaagctgggacagtgtcca

SEQ ID NO: 51595 - DNA, 960 bp, Homo sapiens
ggccagagtgggcgcaaaggccgaggaggcgccgagagcgagcgaaggctgtgagggctgccagcaacgctgtcacttctcaataatatttcacctgtgaatactacagtatgtatcgcaatcaactagattttttttctgtttttagtcactttctaatttcaaggtattgctaaaagtcctggtgataaaggttgaaaatgaaggaagcttacatcagcccacagttggtgtactcaaaatcacttctgacccattgtcttcaggccaagtcctcgctttcgttaagtgaagtgagattttccctaggaggttgatctcagtgtctcatataaaacctgtgttggactgaccctatttttctatattttccagtcttcattgaatctttgaagaaatctacctcatatttttatgtgtcatatgggtttaatggaatgaaatagcaattagagctactgtgatcaatactggggacgtggtagactcacgagttcttaaagtggcaggggcgaatccaatcttgttatccattgatgtctactaaatatttacgtttaataaatatctcacttgaacctgtggggtgaagctgaggggctattctagggaatcatttgaaagaatcagtgaagactcctgcctgcccagtggttctgacccatggcaagcagtgacaatctgatgtggcataaataccagatggtgacaaataacactgacattttgtcagaagcaaagacatgactcagaaccaaaaactttgcctagatgagtgtcagtgtttggtgacaaatagctcaagtctgacagcatgcttcactgcatagactttcatccatcacggagagtttttttttaaatctcagaacacaaaacacccaactcccaatattgggtgacatgagaaggaaggtaagaaaaaggcaagtgagaagcagcgacaaagacagagagcct

SEQ ID NO: 51596 - DNA, 537 bp, Homo sapiens
tccatagcatttttttccatgaaagagaacataaatgaaagaatgaataaatgaatgaatggaaaacattaaattcaagtcacacaactagtgaggaacagaactaagaagaaagcccatggcagttggctaatattagcccagttagttgaccgccagtcaggttcatataggaattcagaaattttcttaactaatcctcccctagaatcatcccccaccagagttcattcggttactggtgaactatttacactagtttcacaccaggttgcagaagaatcagatcgatgactgatcacgtgtaggtgattgcataaaccttgttcttggatcagacagaggttcctgatccctgactgtttactcacaatggagacatgggctaggtaatgtaggaactataaaaacaacaacataaaataattacttttaccacaggtaatgacattgtgattaacatttgcccaaaataatcttcttcacttcccataaccacactgtgaagtaatggattgaagttcttgactccaggat

SEQ ID NO: 51597 - DNA, 1247 bp, Homo sapiens
caaaatgtcttcctgtatcttcctacatttattgtccagagtataagttctcctaggcagagagttttcaaaattataacgttcactgaacattaaatgctaataattttattcttcctttcctaacactttgcagttccagctgggccgagaactcaaagtgtgaagctaaagtacaaaagctggtatgagaggtatttcaggaaaggagtacaggctgaagtattgcaaatgtctttgaagaatactggtgctttgctgttcccagcttcatttagcagccttgagaaattagaggagatttttattagcatcttatccctctatgttcaccagcactatttggtaggaataaaatttaaatcttgctagctattttctttgttagaatcattaaatacttccgcttgggaggaattattaaagagaaaagggagtatctcttcctgacagcctgcttggtgtcactgtattgcttaatcctcacaatgttgtaatagtttgtgttgtccccatttgcaaatagaaaatgaatgcacaagaggtaaaactgctaaaaacagacagcaccaggatactagtacttctcacacattaaaggccaactttaaagacatcaccatggatcagcttaggctgatcattaaatagacgtgctttactgctaacaaattcggtgcatcataatcatggacaaatgcactgacagataatgaacaaaggacactcatacattactttcctttttgtacacattatgtcaccatgtgaaacaggatttggagttacatgctttaaaaatcacatgcatttttgaaaaataaaaggatacacatgctaaactatgttttttaaataaagaattgtagcacgggatgagaaataaatcaattcaacacctaaagcaatggaaaagcacagcataaactatttcagaaagtctggtaattaatgtaaagaagcaaattgcattatatcactcattacttaataaaaaattgagcatttattttccagggaagacaaatgtggttggggttcctactttataacatttggtgtggatttttacaagattattatgcaatccgtcaatggactgtgggcggtgcggggcagcacggattccaaatatttacaaatcacatgcattaccttgaattgtgttattacggcctccacaaccattgtgccatcaactcaaaggaagaaatatcttcctcaagctctatttgaaggctaaatat

SEQ ID NO: 51598 - DNA, 549 bp, Homo sapiens
aagttggacaagctgtataaactctctcagttaacgtgttcttacctttaaaatatctacccataggtttgtgcaaagatcaatgaaggttactcacctgaggtactcaacgtcatatatagcaaattcaataagtgaagccctccctaccctatcctcagatattacctgccagccattaaaagtccctgaattaaaatgtttatactcttggaagacagattactatacaatcaagttattacaaggcagcaccattgacctttactcattcattcaacaaatatgtagaacttgctctgagtcatgccttattttaggtgctagaagtacagtgttgagcaaaatagctaaaattagaagtgcagatgagtggttaggaaaacactgcagaggcaatgatttgttctgcctaaaggcggaatgtaaagaaagattcagagaaagtgccatttaaggcaaccgaagaactgaggaactttgatgaggcaatgcattcgctgcagtcctccttgcctgaagctgtctaagtgcttgcttactccagtg

SEQ ID NO: 51599 - DNA, 975 bp, Homo sapiens
attgtgtagattcatcctcacatctacctctttagtaagagagaaaatgaagtctccagtgaaagaataaaatgcatctatttcctagcaaagggtggggactctataaaacagtactgaaagaattagtttgactgaaatgggagccaagaaaaaaaaaaaaaaaacagcccaactagcaaagaaaaatcctaagtaccttgtacactgtctctggatgagtcaaagagttctttgaaacagggacacaggatcacagtcacctcccaatgcagtcacatctaaacaaacacctaccttgtagcttctgagcaaggaatacaaaatatgtaaaatgccaggttgtttccaaggctactcagatgtgcctgctctaatttgcactttgtcatgaaggcaataaaattactggcctaatgcagttctatttagacctgctgtattcaaattgatgcggctattaaataaaaatgattcatgtgtgcagatgcctctctgtttttacttgctacactagctctttctctatcactgtctaggccccactgatctataagccagaatgacaatgtggcagcgggtggatggggtgaataccctgaaggtcagagcagccctgagccgtctgccaccaggagggtcagccagcaaaacagttcaatcacttgctgtcttgggcaagtgacatcacctcttgtaacagcagctttccatgtgagaaatggacacagccacactgaccttgtgggatcactgtggacacaaagaggataaaatagatcaagctcctaagaccaggcacgctctgggcatacaatatacagtatgatgattttttaattgtgtttgcagagaaacttctgagtactttctgttgaatatattatcattggccacatttttatgggagattaagcgcctctgaatttgagcagattggcaaacagaccacagggcttaatgggtatttactga

SEQ ID NO: 51600 - DNA, 823 bp, Homo sapiens
cattagaaaacagtttctggtagtgaacctttaaaatctaccttcttttcactttcagtcttagttctggacttaagagaaactaagagtgaatccaattgatcttcctgggaaaccatttgtgatcacaaaattgtgcttgcacagctctgactcatctccaattcatttaattacttcttttaggacatggttggggcataattggccaggcttagagtgcccaggtttgtcaacacgtgcccagtgtcctggactttaaacatggatggggaagcccagagatctgtctggagcagagagttgtggccagggcccaggcccctctggcaccagactagatgaggccagccaaaatgggcaggcaggaggtcatccaaaagtcatcattcaccatgtaaccctagggtgaccaactcattgcagtttgcctgggactttcgtggtcttagcactgaaagtcttacattccaggaaacccccttcagttcacctgggctaatgccccttgtgaagtagcagcaacaaaagcaaaggatgtacctctgtgcctcctcacttcttcactgttcaataaggttgggagctgtttgggaatagggacccagaacatgtgttttggaagggaaactccatgcctttggagaaagaatgtagacttggaagtgagacagacttggaacaggatcctgcacccttcacagagtaccctgcatggcttcaagtaagttattttgctttactctgttgaaggctgtttactcatgtgtaaaacagaacagatagtatctgcttctccaggataattaaacgaaatgatgta

SEQ ID NO: 51601 - DNA, 1196 bp, Homo sapiens
gtcgtgagtgtgagaacgcgtccgccttccacaggctcttcagaagaaaaaaaagaaaaaaaagtcttttcccctcttgttttttggagaaatgaaatgtaaagaaaggctttctgagtataacgccaaggcaattcattatgggaaaatctgttcccttgtcacctccagcgacaaatttggctcctggcaaattggcacttcgggagccgagcccgtctcggcgggcattcgcacacggggagaaagaaatctgtcaatgtctcccaaggcttgcctttgaatctctaattgtgatgattttagtccttaaaatgataaccaaaaagaaaaaaaggaaaaacataataataacatcaagtacaaacaatactgggaggaaaagaacctccctttgtggggctggtgatcatccaggaaaaagtgaacaaaatcactacaggcggcatgatccaggcgggtgtttactaactgccttggacaaaggccaggctcaacatcctgtggccactgtgcaaaggtcgcgttcggcgtgttcaaggtgcctgtgctctccactcaccctttctcctttgaatccaggctctccaggcttcccagggaccccctgcaaggagaaagaaaggacagtcattgccccgggccctctgcactggtgtccttgccttgctggatattcttcacagtcctgcatgctgaggacaagggaccctcaaaagataaggtcccccgagggctcctttctgatttatgcctacatggtgggggtgggggcggcacactgtgccttctctcctttcctcctggcactgtccacctttgactgatggcaccagccctgggttggcccctccagattcctcccctacctcttgtgggataaaccccactccctttaacatgtccaggaggccctgcacgaattgttgtcttcaacaggctgtcactgccctggatgactctagtgcaggggacagatagttctgcggtctcatggcctctgttccttgtcttgccctgtgcctgcagcatgctccccacctctctgtccggatacctacttcccacctggcctgcaggtctcctcttcaggaagccccccgatcacccaacatttagagaagtggccctcttctatgttcccacagtccccactcccttctggagggcagtcacgtcagggaacaagggacacg

SEQ ID NO: 51602 - DNA, 786 bp, Homo sapiens
ctagaagatcatgtttgaaagaaaataatttcactgcacttccttgagctacagagagtattttttagacaactggctgatctttcacacctgttttgtgcttgctaaaagagctacaacagatcactcgagaaacagaaaatccccaacgcgaccctcatggaacatgtgcctatcaccttagcattcatggagcattgctgcctccactgaacctacacgcaccctgtcacagcaacaatttctcaacctctgtaccgttgcaggcactatcatggaaagggggcaagggactcacccaagatcactcacaatatagtgagagcgtcacctctccatcctccttaacagactccaagttcaatgacatctcaaatggatgaactgcattttaactcccattctataacttattaactatgtgtccacagcgagttgcttcatctctcaaacacggtttggttatttattaaccaggggtgatagaaagcattgctacgcttcatgttcacaaccaaatgaagcagatattactatcattggatgttgataggtaacttatgtataataccttaccacgaagtaatataaatgtgtgtgctggctaattaaagcaatggcccaaggggagatcattaccttaaggactttacattccagatggtcaagtagcattccaaccaggaatcacacctccagtgtgggtacttggtaaccctttagtcaatactaaatgttatgcaaattaacattggatatgggaaatggaccctcttttatgaaatt

SEQ ID NO: 51603 - DNA, 544 bp, Homo sapiens
gctcggcaagtgagcctggctgccgggtgagtcaccgcgagcgggcgacaaggattcccagcagctggtaattaattgcgccgtggctcagcccacgacggaaccccagtcaggcctcccgccgccctggcagcggcgccacccctgagtcacagccgtcgggcctccgcgcggtccggaagccgcctgcccgcctcggcgccaccagggggcactggactccgacccacgcggcggccgcgcagccggcctcgctgcggggaagtccaggctgtccccgcggcagcgcgggcgggggaggggcgcgccggcagacgccgcgctctgcagagccacttcgatttggtttacggaactccatttgcatacagcctttcaggaaagcgcaaccgctgtatgagtactggaaggacctctgagatgaattactccaaaccccttgttttacagatgggaaaacttccagcaagacaggatcacgtgcccaggatcccacagtgattccgatgtggagccagccctggaagcctctccgtggcttaag

SEQ ID NO: 51604 - DNA, 975 bp, Homo sapiens
aataagctcaggaaagagggtgccaaacaggcactgaggccagcgctggtttccctacgacctgcctgggaagcacactggcctgctcatgccccctaaaatcacccaacctggctacccccttcctggcttgaagcgagggctgatggggtaccgagccttggcatgggctggctccttcccttcctatcaatcgtcttcattcaaagctggcacggtctcctgaggcagatgcgtcaatgattaaaccattatttgttcatgtctctgagaggcgggagacgctgcctcctccacaaacatccctggaagccaatcgggcctacctggtctccttgtaacccagagctgggctgcagatcaaaagacaagtaaataaaataggcccaaagattctgcatctagactatcaaaccaaaataggtatgggaagtgaagaggcagcagctaaatatttgttttcctcggtaatcaggtgagcaggcctgggctttccagacctcctgtttagaatcccacgctgctcccacgcagccctagggtcagtgcagtgcctggcgctcagctccaggccctagcaggcaggggtaccttgccatgtcacttccttctctgaacttcagattcaataccttcaaatgacaacggcatcatcaacatggcaggtccacgtggagacccgagaggataaaaagaaattcccaggcagctcaccacagctgtgcaagtgcttacacgacgcgtcatctcggctccgctcctgaccttctagataagattccctggaaggtgagggagtgggaagtcccctgtttacgctcttcaggggagtcttatgcggtcagcccaggccctggcgcctctctctgggaacctctaatgaaaagccctaccaaggtgggaggatgtccaggagcggcatgtggggcatgtcctgtcttctgccgcaagcccgctcgaccccagcacctcagg

SEQ ID NO: 51605 - DNA, 1383 bp, Homo sapiens
ccagctctgccgcctgacgctggcgcccgcagcatctctgggcgtcacagccctctgctgggaactgcagaactcggtccccagtgctgttcacagcctcagtggcatgtcacatgagagaagatgtgaaagtcttagaaattagggagcccaggacatgagaggcatttgaggactcaagaatgggcaggaaggagaggatcaaggggagggagggtacaagggaaggcaggagggcagatctgggctgggagaagcgggagccagtagcctgagatccctctggcaccccagagagaggccccttcatacagcctgtcccagagacctcagacacacggaggggcgcggcttccctccgcctttcccagggtctcactcacaagagggaagaaaaagggtcaccttttccaggtgccttacagggttataatcagctctacttctacctcctcatgggacccagcagaggcccagcttgctggactggacctaagtgtcaagggccaaattcagggagcagggctgtggcaggggtagagtcacgtgccaggcctgcaatgcgcagcccagtgccctttgtccaggatcacagtacaacctttctggtgtggccagaagccagctgaacctgaaaggatgggggccacgtggctagacaacctctgccccctgtcgaaccccctccaccccagctgtgactcctgccctccccgagtgagtgaacggcaaccccacctgccctgtggcccaaacccttcccctccttctccataccccacacccctaaaccctgccaaattctcctcctacccacacatcccggaatccacctcttttctctgcaccaatggcacccccaggcccagccactgcaacccaccccgagatcagcacctaggctcccgccagtcgtcactcaccccttccaggcacttcccaaaaggccaatctgatggcacactctcctgccttctcatgaccgtcccttccctcacaagagacctgacttcgaccttggctcatgggccctgctgcccctccagcctcaccctggactatcgtctctgccctcactcccaccctgaacagcttcagcctcgggaacccagtgtgctcccctgcccccaacctcctggcctggcacaggcagtcctcactggtaagcaatccccacccagctgccctctgcctgcccagctcctcctggctggtgaatctcccctgaaggcctcttccaccagaaagctgtccccaacacctgcacccaggctggctggaggatgagcccctcctcagcagtctctgggcctgcccctgccttcataccttgcagaggtgggtgctctatcccctcgagcccagtgctctctgcacaaagaa

SEQ ID NO: 51606 - DNA, 1152 bp, Homo sapiens
ctttgtttcacagcatttaacacagcacctgcgtatagtatattacatatggcattgttgaatgaatgaatgaataaatgaatgactcatcaaatcaatccttcacttgaccagcacagtgatttttctaaagtgcaaatttgattataacattcaattgctaaaaacctttcaatagccgcagatacatttcaggatcaagtccaaatttcttcacagggtatcaaagattctccaggatctgccctgagcccacctctctccattcgcatcttttgtaacataccccatgctctaactggcacccagagctcattcaagccttctacgtttgcttatgtgacaccgtctgcctcagagtgccttgaacacccttccctactatttacctggaaaccacccaatcattttctcaagagtcagctcaaacatcacctttgagctctagatttgtttatacagctgtcgactttgcttggatgttttaaaggcaccctaaactcgccagatctaggactaaactcatgatcgcctctaccttacctctgccaataaaaagagaacacctttcctttcccacgtgccctagctcaagcacgattccactccccatccaacgcccaggccagaaatctgtgagccattactgatttcatcacctctctccatgtccttttcttcttcccaagtgtctctgaaatccacccatttctctctggctccacatccactttattccaagttatcaccatgttttccctcatcttgtacaacagtctcttcactgaccccctccgcctccacactggcctccccatccagcagctggggtgcaaatctcattgtcttgctcctcctcaagcgcagtcctgaaaaggctcccgttgctctgatgatcaataatacccaaccccactgtggcctctaaaactgtgtgttcaattcttcccccaccactgctcccacctcctagccctctgccacctctgctttgagcattctccctctcttcctttcaactcactaacgattactcatccttctgatctcagcttgcacttcatctccccagaaaaacctggtcttacacccttgtctaggcctgcctatgaaatcacatcccttttcttcacagcttttatctcagtttga

SEQ ID NO: 51607 - DNA, 2097 bp, Homo sapiens
attcctctctctatagaaacatttgaagacagacaacgcatcctaacacgggaaaactttcggttaacagacattcacgttgggaaggtctgcaggggtggaggggattggggtgggctgacagggagaagaccacaggccagtagcctgacttcctctccccagggttccctgggataagttggagttgacagcgcgcttatcccagagagcaccgcctgatgccgcccagctagatcgcaggcactttgaatccaggagacaggagggaaagggctaggggagaagtccgggaactcagggcggggaaagcgccgggggcgtgggctgtgctgggccccaggccccagccgcgcgtcccagaccccgcgggctccagtgggcttagccaggcccaggggcggggggctccagcgccgcggacggcccgggaggggaagccaggcggagacagctcggaggcacagaggggaaggggacccccgccgcgagctcgggagagcagagccggcccgggcagcaggtgtgggccgggtcccggacaggtgtccgccgagtcttcagcgggtgtgggacacggccttggacagatgtaagcagagcgccaacaggagcaagggcgcctcgagcaggtgcacgctgaaccccggcccggcagcggacccggacaggtgtggcgggctccgcccggacaggtgagggccgggcgagcccctccgcgggacgcgccgactccacggccagccgcgcagccctccccgcagccggtccgaattgcctgaccgggagcccccccgctttgcacttacacagccggtggccccgggcccggagcgggagcccacgacctggcgggcagcggggccgagcagcctctgcggccacttcccaggctctgggctggcgcttcctactggcggccgagccggcgctgctcctgcgcgtgcgcggaggccaggcctgggcccccgatccgtcccgggttttgcaagagacgcgagggaagcaagggggtaggagcgagggagaaaagaggaaggaggagcgagggagagaagaggggacagggagggaggggacatggggagggaggaggaggagggaggagggagagaaaaaggtggggtgaaagaaggagggaggaggagcgagggagagaagcggggacggggagggaggaggaggagagtaggaggaggaggggtgaaagaaggagggaggggcagcgagagagagaagcgggggacagggagagggtggaggagggaggagggagggaaaaaggaggggtgaaaggagggaggaagaggaggagggaaggagggagatggagggagatggagcgaggagggagggagggaccggagcaagagaacagagactaggaggaaagcttctgcacctggggcggcgcagctggaaggaggcccagttctgtccccgccgcttaccagtccttcagggcgcgcagctcaaatttcacttcctctgtgaagctcaggggtggaggccccgcggaagcccactgtggatccctgcggcaccccctgtgaccctcacggtaccccccgtgactcccacggtcgtgccccccacgtgggtgggtgaccgtggcgcgcgcggcctgggagcgcctccaggatcgcagggcccgggaggcacgtgaggtgcgagccccagcctgggccggcttccccctgtgtggcgcgcggtcttgatccccagctggcaccatggcactcccgactttgagggccccaacaatccatccacataaaaggttccaaagaggcgacaggggctaggacagctgtcgttagttcagtgccaaggcgccaagcttgctaagtgcgggcagaagccatttaaggatttaaacccctctgggttcaaaaataaaataaaataaagcaggagatgggggaggcttacagacttaagatgcccagcacatgaattaacagtggcatccgcagggaaaattgaaaacagagagccgctctccgttatgtatgtttaatgttctgtttgaatcttttaacatgtacatgtatttctttttcaattaaaaaatcctggccaggagaaatggctcac

SEQ ID NO: 51608 - DNA, 1590 bp, Homo sapiens
ttccgtgttcaacagctgctttcagaagtgtggaagcctcggagagggtccctgaggtaagatgggctgagcgtcgccgccttctgcaaggacaccagccttgagagaagagaggagataaggtgcaaacgaagaaaggcagggacgccgcggtttcagtcgaagcgtgggctccttaaggacaggggctgtgtccgactcggctctgaatccccagcgcctacacaagctctgacacagcgtatactcagtaaacatggagtgaatcagttcattcaatgaatgaacgaatgaatgaaacgccagagcccgccacaggggtccgctgccgctccacgcccgggcctctcaccggccaatcaacactgtgactcgtacgccctgccccctgatgccacgcccatcactcgcccctctggattccctccggctgcgtggaaatcccggagcactggatttcccagaggcgcctccggtagcagtgcgcatgctccagcgccggtagctgaggcatcaatttcccgcagcgcctaggggacggattggaaagcgattggcttaggggacggaagccaagctccacctgcctgacacccggctcttcacgcagaaccgaagattcattttggacagcccttccccagtaccactcccaccccgacgttggtcccaatcggaacctatcctacacaaggctgaaaaaaagaggggagcgaccggaagtgacgcacgagcgcgagcggaaaaacaggggcccagcgcctgttgccgtggaaaccgagccctcggcttgcgtcccgggtgcgtcacagctccggctgaccacgccccgcgcgcggccccgaggccctgaggcccagggcggggaccaaaagccgcgcgcttgtgacgatgtcgctgcggggcacgctaaggggcggagaggaaatttagggcctgccttttgtacattcggttattcagcccagaaatatgtattcaaccccaggcgcgtgcctggcattgtggaaggcgacacgtgaggagaattgtgactggcccagatgtcacccccccccagcccagtagtcattcttctctggaagtccttacccatctcacctgttcattcttcaacccccagtttcccgacctttttcctcaagccacgcccttccacgctttcttgtcttttctgtggtgttccttcagtctagaatattctccacctagtacaatcctgctcctcccctgacattctgctgaaattgcactcttcagccttcccaggtagctgtgggctgtgacatgtgtcagagactgatgagttttctttttacttttctatattgtctcattttttttctttaagcatacatacattgattttataatgaaacataaatcatttttaaagagatcagttattctcaaagagcttgttactttcgggaacactttttggggtgtttatatttatatgtattactatatatgtactttatatgtatacttttaaattcacaaaattgacacgcattgtaataagaatcgtgattatatcctttatccataatcaccaatttttacatttttgcctcattttcacat

SEQ ID NO: 51609 - DNA, 2692 bp, Homo sapiens
ggatcacgaggtcaggagatcgagaccatcctggccaacatggtgaaaacccgtctctactaaaaatacaaaaaattagctgggtggcgcgtgcctataatcccagctactcaggaggctgaggcaggagaattgcttgaatcggggtgttggaggttgcagtgagccgagatcgcactgcactccagcctggcgacagagcgagactctgtgtcaaaaaaaaaaaaaaaaaaaaaagttaagttggaccccttactcttccaagggcctccccactcattcagagcgaattctgcggtctccgcggccttccctggtctggcccctgaccatctcctgcctctctcctcccagctgctgtccccttggtactgccggcctcctgagggccacgttcctgggttctcgtaatcatcttctacctggtctctgtgattccggccttacgcgcacccacgccctcccagccggcagctgcagggatccttttaaaactgcccgggactccactgctcaaaccctaccaccacttcccattttccttagaaaaaaaaatccaacaggacctagccccgggctgcctgtcagacctcggcgagcacgccaggctctgcacaccgtctctcggagcagtcccgaagaggccgttcccaccagactccgggacctcctcagggcagctcttcgtcctccaccccgcaggaaggctcttctcccaatcaccccgcggcgcagcaagcctggccccgccgcatcgcccgcgctggactctgctcttccaccggtcgcctggctaccggcgcaggacgcatccgctgtccgcttggtcgtcccccctggactttgtgcttcaagaaagcgtcactttttgccgacggcggcacgcccggtcctagtacagcgcaggcgcttaacacacagcacccagccacgaggcccggagtcagagggctttgcttgcccattcacagagccctcacccgcggatcaaagtcgtattccgcgaccgcagcccggagactcccgggagcggcgcggtgcgccccgcccccgccaggctctcggctgccggttccgcgccgggcctcgcactcgggggcggtgtccgagcgtcggcgcatgcgcagatcgggggcgcgaggcctcacggagctcgtagtttcccggacgggccgctcccggcctcgcggcctcgcctccccacactacaactcccacggggcagcgggcgcggctccccgtacccaccagctggccgggcagggcagccacttcgcggtcgggcccgccggctgcgggcacccgcgcgacgggcgggaagatggcggacgtggtcgtgggtaaagacaagggcggggagcagcggctcatctcgctgcctctatcccgcatccgggtcatcatgaagagctcccccgaggtgtccagcatcaaccaggaggcgttggtgctcacggccaaggccacggtgagggggcagggcgggggtgtgggccgcccttacccctcgcgccccgccccgccgggctctgggcactgcccagtccccttaggcccgcgcgccgccggctgctcttgccgggctcgcgcgcgccccgctgtccccgtcccacgccggcgcgcgcttcggtgcccgcgcgcccccacactttctcgcgcgtcttcgccccgcccacccctcgccgctccctcacgttctccagtttcttcgcctcgcctaccgcgcgcctctcccgccctttgtcgccttccttcgctccgcccgccccttccttccgtgcgcaccttcgccccgcccaccccactgtcctcccgccgtttctctcgcgcttccattcggcaaacccgtaagctcccgcgttcctctgcgcgcctttcgtccctcccacctgtgcgctcacgtcctccctcgcgtgcggcgctcagtttccggccctacccgtgggcgtcggcgcctagtggcgctcttctcatttgggttctttgggggctctttcacccgcgactccctactcccggcctgcctttttcttgtcactggactgcttcgtgctttgagggccctaactcctccagtgtcccgtgggaggggcagccgggcgcttcacccgcgactcgaggctcttttcccgcgcgtgcggtgccagctccagcggtccgaggctttcgagccctcccgcccgccacagctggggcccctcgtctaagaggcagcacattccccaaccagaatttaaggaagtccggggaacttaagttttacagcctgcttagcatcctcctgggtgcaaaatagataattttgtctttttttaaaaaaattgcgtctcgatagtgttaggccagatgttttcctgttctgacactgggccatgtttcagctacacagttaaatgctttagcttgtcttggattctattttccagtccctacttgtagttaagtatatgatgtccctgcagtgttggactagaactaagggaagtgggaaattacaggtttcttgcccgctttatgtcagagccatgttttcctagagcccagggaaataattgcatattcagcatttcatctggggacatttgtattttcctatacaatttcattctattggtattaaggaatgaggatttatgcaggcacttctgacccgttattttattttttgagatggagtttcccaggctggagt

SEQ ID NO: 51610 - DNA, 919 bp, Homo sapiens
ttggggaaataatttctatcatatccattaggtaccacatgcactggaatatctgtgtcggccaaaccaaaccagagcagaaaggaaaaaataaatagcaatatttgcatttaacagcaataaaagtaacaaataacaacaacaataaaaccccccacctactaaccccactacaggaactgaactgacatgatctgttctaatgggcactccgtcacgggggtaaacattagtgatagcagtttaggtcagcctcaaacaaacagcgtggaggtcactgcctgcttccaacagttccctcttgggcaagctgtacaatggtcacgcatcgtttgtggttctagagtgcaaacattcattcaaaggagtgtgagaccaccaccgaaaagcaacatcatctggaaaagaaaagggagaccctgatgtgcaatcaaaaggctgcatgtaaagactgcttgaaccagagaaaaccaaaacttaaggaaaacgatccctttctaaaagtacagctatgcccagttttacaaaatttatccaaaccaggaaaatctgagcttaggacacacaaaacaacaggacggtggctttgcgtcaccgaagggctcacacacgagggcagctttccaccgctcccctggtgttcgttaattgcgtcgtcattacagcaagaacttgtcaaatgtgatagggtagtggtaaaaggatgggagtacatcaatgtttttaaaaagtgaacatgtaaaaacacaccaggaagagtcccagtacagaaatcgaattgggagacctcttttaaagagatgagataaaatcccagtttttcttttaaacaaacccagacttctacacataattttcacattcagtttgcttaaagcaaggcacaccttacttaacagtgggatggggacaaagccag

SEQ ID NO: 51611 - DNA, 2657 bp, Homo sapiens
tggagtgaattaagtaacacgcaaaacacaacacagaaagcttgaccttccttaaagcctcttcactttttctgggcctccaacttttaaaaccgataacctgaaaaaatgtagtgctgtcagtcccataagctgggttcctctacaaagaggagctggaaggtcccaactcacaaggggatgcccggtcctttcccaagagggggcctggccacccaaggcctctagaggccagcacctgctccaggactgcggcccctcccaggtggagggggaaaatcattcttcaaactgctgatggccctcaggggttgaaaagttggtcagactccgccttgttgaagctttctaaatgacatcagaaaaaagacgcgacattcgcaaggcacagagccaacagctccagcagtgggggccaccatcaacggaccaaggtgggccagggggccttccggaccccacaatttggggccggtctgcagcaacgagggcagcatcgggaatgcgagcctcctcgcccggccgggtaaacataagcccagagcccggcggggcctgcgccgcctgcggcccggctggggcccagcggacaaaggggagcaggcggtgccccgtcccagcggccaggccggccgagagagccaggagccacgtgcccggtgggagcacgccaaaagcaggagaacacctgaccgtttttttggcccaccaaggagaccgccttctactctgcatttaaaaagaaaaacaacgcgttaccgctttaagttttttagaacttttccagagaaaggccgactagcaacaaggggtgctacaggaatccacctcgcctcacctctcctaggaaattgtaaaaggaattagcacttgaatggggaggccggcgtgtctggaatgagaacgagccgcgcacgcagtttgagggttccggggagccgcgtcctcccctttccaggcgacagccctaactacaggaattggccaaaattcagcatttccagactttccttgggaaaaggggccgaagaagtgccggcaacaagaagggccacaacggagcgcgccacagactcaccgcggctggggtcgggaccggcgcagccccctcccctcccgcccgtgcgcgccccgagccgggcgccccgacccggcctccacccgctcaggcgctcagggtcaggccgggccgggctgcggcgcccccatccccgcccgggcagcgaggccgggccaagcggggcgctccgggcctcgggcctacacgcggcggccgcctcggccccggccccagcccgcgggccccgggcgggggatgcgaggacgctgggacgcgggcccgaggcgcgggaggggcccaggccgcgcggggcgccccgacgactcgcgggggccgaggaggccggggctgcgcgtccaacgcggggccgagaaaacggccggctcggccccgccgccgccgctcctcgagcccccaagcgcggccccggctcgcccgcccccggcccccgccgccccgaccccgcggccccccgatccccggcccctgccgcccgcgccgggcccgccaaccacgggcaggagcgcgcgaacggccgggcgggcgccccgagcgccaggactcaccggggccggctcccgagtacatggtggcgccgccgaggggctccggggccgaggggcggccgcgcgcgcgccacgggccccgacgccgcgagccgcgagggagccgccggccgcacgatccgccccggcgcggccgcctcgccaaacaggtttacccgacgcggccggggcggcgggcggaggcggcggcgggagcgggagcgggaggggcgggggaggaaggaggagggagggggaggggaggcgaggccggcggcgggagcgcgctcgcggggggagcggggctgggcgcgcgggcggggtccgcggcggcggcggcggcggcgccgggtctggcggggcctggggcggggacccggggaggggcccggagacctcgccgggcggtgggaaccgcgggcgggagcggggacgagggccgagggcggcgcggcccgtgtggcgcgggggcgggcgcggccccggggacccttcactgccacccagagaagccgcgtcttcccgacggggaggagccgggccccccggctgtgccgccggagccggaggggaggccacgcgcccccgctttccccgccgccccccggtggggggcgcagaaccctcccaccctcagcccctcggcccccagcctggctctttaagttactacagaaacacggaggtcgggaagctccctcccagcccggagcttgaacttgaacgcggccggccgctcgcgcaggaccacaccgccacctcccggcgcggccccagaacccagataatccgtttaaagcactgagaaaatctaagaagtttttagtaaactgtagctggtatcagggatcagatcagcggacacgcccattccagcagtcaggggcctgctcggaccgtcgtgcacctccgagcgtttctgtccggtccctctgggtccgtctggttttcggaggctttcctggaaaagccagcctgtggctacctcctttctcccctaagtgatggaggattagaaggcagaggttgacccacaatctaaagtgcctggt

SEQ ID NO: 51612 - DNA, 740 bp, Homo sapiens
ggatcctggatttttctgaatatcatgattgaaaaaaacaaaacaaaaaatgaacccaaatcaaagtgtggttaaacttatatgagaaagatttttcaaccagatggtcattcaaaaaagttggagctgtaagtgctggcgactgaggacacagggttaattcctcgctgctggtggaaggctagagaacatcttcaaaagagggtagcaagacgtgctcctaggggaggctcagtgtggtctcgtctgcccaagcattttcagtcttgcttggtcaatgacatcgagtaagtttttggcatccacagccagggcgtgagcagcagtcagcatttgctttttgtactcttgctggaggctggtcatgacatactgctgggccagtttcatcttgttgatgagctcacccaggtcagagttcaatagcttctgtgccatctcaatctgaaagacaagagataggtcaggagaactgttttcagtgatttttttttttcttttttagagagatgttcttactgtgttgtccaagcttgcctcaaactcctgggctcaaggaatcttcctgcctcagccttcccactagctgggaacacaggcacatgccaccaagccctgcaccaatgaacttttcagggaatttttatgagcctttctttcagtgcctccatgagaagaaaactttatttcctgtaaataaatcttccttaggagcaataggatgtaaaaatcaatcttta

SEQ ID NO: 51613 - DNA, 913 bp, Homo sapiens
gatgaagagttgggagtgggaagggggaggtggcactgagatgcactcagtgaggtcccagagtgtctaagacctcttagctcctggtaagggcactggcttttattctaaatgatgtcaagagtcattcagaatattgtttccttttaaaggaaaagagagagttcctacattgtttcacaaattctaggaatgtgaagataatgggtaaggccactagtcaagaaaaaaatgcctttcaacaattgctccgggcccgggtgcaggataggggtgaggagggcatgactgaagccccatactcctgcctctctgggactgataaattttgcagacctcacatacctcaggctgctctgagcagcttttcctttctcaccagtccaactttctatgtgattacgctggttcagatttacctcagtctcaactagcttactgcaatcctacctattcccttttagaaggctcccaggaagcctttgaaaaatgacagacgatgtcactcttctcattctctgctctcttttgtactgagttacttgttctctttggcttttgcggtacagggattactccatactgtgagggagaacttgaactttgtatgtgtggcaatgtgtgatcaattggcaagtcaccagcaaaagctgcagttttggagtggctgacagtggtcacagtgaatggttataactgcagagggctacttacttctctacacatttagataagaaaagcagtttgaacacttggaggctaaggaaacactcaccaccaacgggtaagactcctatggaagatggcagaatgggctgattggtgttgggtcacccatcagcatcacaggagtgtctctccagcatggaacactgtggaacattgtgtagcgtggtcctattatcagaggcat

SEQ ID NO: 51614 - DNA, 1582 bp, Homo sapiens
cacagggaaaaaaggagccacacagtctttagatgtcaaagttacctgatctttttataagagaaaaccttttccagatgaaatattgacatttaaaacagtataggttgaatatctcttatccacaatgcttggaacaagagtgtttccaatgtcagattttttggattttggaatgtctgcatatacaaaatgaggaatctaggggataggacccaagtctaaacgtgaaatctgtttatgtttcatatacaccttatacatgtaacccaaaagtaatttcatacaatattttaaataactttgttcatgaaacaaatatttgactgcaacctgttacacatgaggtcacatgaggtcaggtgtggaagtttccacttgctgcaacatgttggtcctcaaaaagtttccaattttggagcattttgaactttgaagttccagattagaaatgctcaacttgtacatcgtttcgaagcactacaactatttaatgtgaaactgtataatctctataataatcacagcaaacagccatagacttgtgttccttttacagaattctccaaatatttgaaattttatatctttagtataaaaatttaatcaaagttgttttctaacaactcattactttctcttccattgcgctacatgatttatcacaacttatctttgaactatatttattgggcagtcagaggacacacattttaaatcaataaattacatcatttccttccctgttgtgctgccaaaacactggggttttcccttgtctgcgccacaattatgtatgctgttgctaagcaactttctcacgatagcttggatttcagctcttatctgatcaacagcaataatggtgtcctgctgctataaggtttgtggaaattccactcttgtaaagtttgcttcatttatttagtttcctttatctgttaacacttgcaatgtactaccttcctcactcactttcatacctatgttcatgattcctctatgtgtgtgtgtgtctgtgttttaagaaatggggtggagtctcacgaagtcacccagactcgagtgtggttgctattcacaggcatgatcatagtacaccacagcctcaaacccccgggcttcagtgatcctcctgcctcagcctcagaaccacaggaacatgccacattgcccagctttgattttaatccaaaattatcccttaacttcccacaactaaaggtactctaaataaacatcagttcctgccctgatatgaccccaaatgaacctctatcagacactgctgatgctgtagagtgcactgtccaaagctagaggtgcactagccacatgcagaccttgcctgtgtgaggcccacagtactgcatatgaccctggctgtcagcaacttgccaggttggctggggagggtagacaagttaaaagcccatgtttaggactctggtaattaataactagaaactattacaggaaaacatgatggggatgctctcctggcttgggggtgggtcaatgaggtttctacaggaagtgatgtagaatgcgacctagaagatgagttaggcttagcaacgaa

SEQ ID NO: 51615 - DNA, 707 bp, Homo sapiens
aaacacatttctgcaattccactgtcatcaccccccaacctgtcaaagcacaccagctatctttcagttactactttctaaggtccagacccaaggaggggttatactttcaaaaacagggagatcatactgttcaagaccaggctgcaacattcataatcatttttttaaaaaaacatacattcaggaacacacagttaaggctacgtttctggtgacactggaaatacatgaaaagttctttgaattcgggcctaatcagtttattattacttgctctttaaaaattattatgaagcaatcttaaatactcccaaatctaatgcctctaacatgtgttcccttgagttcagagaaggtcacctttgaatgaggtcatcagggaatgttccctagagatggtgaaatttctcctggagcaatggacaggttaagtgttagaactgactcttgccctgtacctacctaggtatgagggccatgagagaatatgttgttaagtgggcagcatgtatggaagactcatttgggaacatgacagaaccatttgctgtcctttacacgagggtatgcaaattacaaccaactgtgaccttctcaatcttttaggtgataagacaagtttttttttaaatgatgctgatattaaaatgaaaaatgtctatgaaagaaaataatcactgctttttaaaattagcaattaattg

SEQ ID NO: 51616 - DNA, 693 bp, Homo sapiens
attcaaatccctgatagaaatgttagaacagatgtcaagtatgacacacttctggagacatcctcacctgtgtgtagaaattctaatttttcagtttcgtggtaaatgttactgtatgtggttacaacatatcttatatctaggagcaataataatttcttgaactccctagtaatgacagaaataataatttgctttgctagggcttatgcagtaaaggattaaccgccttgctcaaagaaaagtttggccctttgcccagatcctgggaggtaatctttaagctcttggaagctcgtccgataaagctgtctttgtttacctggggaccctgacccacagcaaacaccaggcttgacctttggatggggctggagagtaagctcacctatgattctccatcaaatggtcatttgacttttctgggttatttacttactcatctctaaagtaaaagctttggatcctaaatttagatatacccctaaaattctagattacgtaaagcaaagagtaaaaggggcacacatacacacacacgtaaaaaaaaaaagcagcagaaaagtttgctttccaataaaatggtcaaaaaggcaaactcataggatagatgtaaatcaaagacatcagctctttgccaaccacataatcaaccatgtactgtttaaaattaacccacatgttgacaacatg

SEQ ID NO: 51617 - DNA, 3073 bp, Homo sapiens
tgaaatgactcggaaaaaaaaaaaaaaagaaactttaccctcactgaatttagctacaaaattctgcaattaaatgaaaccaattcacacacacacacacacacacacacacacacacacacaccccttcttctaagaaagaacaggatgccgctacacaaggaacccagagagaaattcggcaaacagttgcgcctaagccaccgcggcagagtcgggggctgggggcggggaagaggagaaaacttgggaagcacaatgactccagtgaggacttcagtgagggctccagggctcccgccaagaagcccacggggctctaccaaacttgagggtttgcgttcggggacacggcgggcttggggctcgggcaccggcaggccgctcggagcccacccttggctgcccgcgaggccgcgcccgggggacggaggtcgggccgtcgcgagcctccctctcgcgtccgggcgaaccctgccgacgtccctgcgatttccctcttcctcctcctgcctctccccttttgtttttcaggcattgggtccgctccggcggaggccggcccgtcctccccgcgcctctgtccgccctgcgcgcccccagagccccggcctcctcgtcttcctcaggcccctcggcctctccgcgcgcccggccttttcgaaagccgccccccccttcctcctcacgtctcccggactccccacgtcccccagcctttctgtcttccccgaaccccttggcctccccgcgcgcccccaaaacccccgacctcctcgagctcccggcctccccacgtccctcagcctcccagtcttccccaagcctcccgaccacccagcgccccgaacccccgcctcccagcgcgccccctgacctccttaagcctctcggcctccgcgagggcccccaacctcctcacggccaccggcctcccctcctcccagaacccgggccgggggcgcgggaggggccggtctccgccgcatccgccccgggactggttgggcggccccgctctgcccctccgccctcagggccgcggcccagcccacgaccgctgcacagaaggagcccgcccagcccccgacccgcgccccgcgcccggcgccccgcactcactcggaccgcggctcggcgccgtgaagcgaaggcagacgacgacggggcggcgctgggcgacagcagccgcgcttcctcccacgcctcacgccgcgggctcacagtggtccgggaccggcggcggcggcggcggcgcgggctcgcgccctcgaggccgtgctgcgtcggcgcgggcccgcgcgcgtgcgcggcagccggctgaggcgcgcgtcctctctcggcagcgcacgcccgacccggtctcagtccggagttcccgcctctcggggggactgggcatgcgcgccgcccccgcgcatgcccagcgcgccgctaggctctgctcgcgtaatttgtcctgtagtgaccgcgccggggtttcggggtggcccgaggctgcgcgcgggcgtggcggccggacgaggaaagccctggtctcgggggtggccggggtcgccccgccgagcggacatcctggggtcccacctgcctcgctctccgccagcgggattagacggacttcgggaaagtcctccccatctccttccctgcccccaaatcccgaaggggtcccctctggagaacctccctcctgagcggccctgcggccccgcccccagagttggacgcccgctgtcgggcacccgctgcgggccccgggccttgcagtgcactctccaggcaccacaccgaccctaacgagcggttcctgggccctttttgcagacaaggaaactgaggctcagagattcttttcatggcattatagctaagttgggctgggccattatttgattttggaagatgaaaaatcatgaaagggacttagaagtccactggaggtagacaggttacctaaatgaacgccagcagggaacgagccctgcaatccctcccgagggctacagacctgagacgggctccaggaaaaggagggaaggctcgccccgacaccgacccgggcttccgcggtgtgagccagtttcagcgaggagctagttggttatgaccggaacgtgccgtaggtggggtgggggaaatagcaaaaggcgaggttggagggattgaaaaatgcagacggctgcgtggggcttgcttaggtgcctggagtttattctttaggcaacagggaacctttggagggctttaagcaggaagtgataactgatttgtgttatttaaaaaaaaaaaaaagtcactctggcaaccttgtggtcggaaatgaaaccagaagaaccctcaaggctgcaactttcatttttatggtgtcattttgatgctaaccacaagccaggaagcaggacagacaggcaccgaggccttttgaaaggtgaacaccctgaagcccagagaggtgacacacgtcattgcattaggagcttttataaaagtaaaaatgaagtaaaataaaaagcttttgcttatcaagattttaccatatttaaatgtttgggttgtattgttctttaatgagatgtattaaggttggtgtttttctgggttttgttactttttactacatatgaaattgtaaggaattgcctctccatgccagcctcaggcctttgcgcgtgctatttgctctgcctggaacttcttgctcctcacttcgttcaataccctgcttatatatcacctcattgatacagccgaccacttcatataataggaaccacccactgccctgctatcctcacacacagtccgcacttagtctgctctgttgttctccaaagcacctattgttcaccatagcccaacactgtgttcttgtttatttcttgattgtccgctctctccactagaatcttagattcattagagcacgggctttgttttgttcactaataggtcctggcacacagtaagtatttgtcaagtgaatgaacgaagctttgggtgatgtgaagtgagagcttattattaaaaggataagaaaagcatgggaattaaaagaggagagtggaggcac

SEQ ID NO: 51618 - DNA, 937 bp, Homo sapiens
gcgagtgactcactggggaaaacacacttcaggaaaaggccaggcagacctctgtggaaggaacggaaaagcgtcatccatcccgcctcgcagacgaggagaaaataagctgtgttgtgaagtttaaagttgtttctttttttagtcattaggggaacaaaattgtgtttcaggctcttttaggaggacaactttcttccacatgttcacctagcagttccagtcagcagtgggggacacctttgaggcactcacctgttgggaaagatttcaggagaggcagctgctcttctggatttgtttgggtgttttgtttttgtgttttgtggctggcggtgggatctgcaggaaggagctggcagtgaccctatgcgcctccaccaaacacttgtgtctcccaaagacgctgggcgttaacacatccacgggaccggctgtgtgcctcgctgctttagcgttttgtgtatttgccttgtaaggttttgaggccaagaatgtgtttgcacatatttcatgtagccacctgaactgcactccaaagggcggggcccagaatgagagccggggagtcggggccttccccaggaacctggcattgcattccggggctgttgaagtgcagggctcgggtgcgtgactcagtatttgtgtactctgtcacaggagcctctccaagtcatcatgtgcatatctcaaatattccagggctacgcggtctcttagcccaggcccctgcccatgctctggtgcttggaggggcggagctggctggggagctgagccaacacagtggatgttggaggttggtggtgccctcactggagttctggaatgctccctccaagactcccaaaaagcagtacatgcagtgtttgttccagggtaggagaaaccttgtcaacaacatgtattggaatcttttttttttctttttttt

SEQ ID NO: 51619 - DNA, 496 bp, Homo sapiens
ccgggaccattctgaacgtgctccttcctcactctaggcaccggtcacgttaccttaatgcagactcttcatgtcttttctccatggtgataatttcaagatcttacttgacagtgattgattgattgcgttttaggaaatggtcactcatataaaagagaaaacaggtgaacagaggtgctaaccagggagtaaatgtgctgggcaggcctgggttccatgtttattctgtgttatgcaaacagaatcctggccagtggagtttattgaaatggaaagggcactttgatgccttcgattttttcccctgtgctttggagagattccattaggaatgatttgtcatggaaaggccccaaatgagctggaattcattcaacagactgtgatgccatccctgcctcggctttagaaacctgaattaaattggtgcaaaaaagtatttctcttgaaccagaaaccggtatattttaagagaatttcagttctcctgcag

SEQ ID NO: 51620 - DNA, 729 bp, Homo sapiens
tgccaggcacctcccagcaactcccagggggccactgtttctcctcttcaacaaggaggggcgcctcaacagcctggctagaggcccctggccagacccaagcaggacgctggcgctccagaaagccagcgggaacattccgcagctgctgtcctgtctcagggccgaccctgtgtccagcttgtgggcacctgtcttcactggcaggcacctgtcttcactggccagctcctcgggcaggcactccccgcagctggagcatgggctcctctctgccctatcagcacagccacccattctcggctctttaaaacagatgttgcaacaagcaaacatctttgtgatgacacagtgatgttatcgtagctgtataaacaaccgtatggcctttggcctgagattccggaagcttcctgaagagcacaaaatgcaggtcaggccatgtcctgcagccctggctaagctcaggggtcaatcagttccagaagccaacagctaccccaggccttggaagagagaaaggaaagttctaattcaatacatcccaaacccatctctggatgtgccgcttcatatctagacctcctctggggtcccctaactcagagaaaaggctctgtcacccaccactcatgctgtcaggaccccgggcaccaacaccacccgccccacagcccacctggcgccaggtgccgctgcctcctcggctgcacatccccgccgtacact

SEQ ID NO: 51621 - DNA, 636 bp, Homo sapiens
aaggaatctattttttttaagtgcgtggtgcacatctggctgtgagctcaccacacgtgcaggtatctgaccccaggctcctctccaggactcctcggcaccggcagaaaggccccaagtgccgcagctccaagcccggccctcccactcaggctgggctcagggttgagaattccacccgccactccaacgctgccaagtcttatctctgccacatttctcaatgtgacattgcacaattcttttggacaaccttgactttccgtggtgctcactgctaattttaactacctgatgtttccccacaaagtaaatatgaggtgttcatgccaccaccatggcagcgttccagtcactctgcaaattcggccagtttcggtcatgacaacgacatgaaacacaacaacccaggcgtgaggacagccacccttgggatttatctccactggggatgaaaccaggccgccctcctccagggctgccaaacacagctcccatgaacgaccaggtcaagcacgttgtccttgggtccagagacagaccaggcagcccacgctgcgtgtggtcttaccctacggtccagagactgcagggatgtggcgggggggcctggggaggatctttcctggacacaca

SEQ ID NO: 51622 - DNA, 400 bp, Homo sapiens
acctgcctcctcctccagggcttctctccctggcaggggcagtgatcactcaggctgtgccagggctgggctgagtcctcagtgtggggttggctggagcagggccccctgttgccagcagtgtgactcatcaggtgttgatggggtgagtcatcagggggagctggggaacggtctccagggtctgagatgctggctcagagcagggctgactgacagtgcagcctgggaggccgaccctatgccagcaccgtgcactcatcgtggccccactcccacctcatgcttccggtcccctccccgggctgccctggtgagtcagggcaccctgggtcctggaacctctctagtcctagtgtcaccttgcacaggtgggcagactgaggtccagagagggttc

SEQ ID NO: 51623 - DNA, 573 bp, Homo sapiens
ctgctctgcggcttggcctctgtgtgcctggtttcctcacaggaaaaccagggatgaagcagggggtgggctcggggaccccatgcagaggccggaggagtgacaggtggtgatccctgactttggcagagcccagaaagccccggctaccactgctgttgccacattcaacacatcaccaggtgccgcctcacagttccaaaggctgtaccttaagaggagctggcgtgcccaaagccatgggctgtgtcgggtcaaggaagcccctgctgccggacgctgacccctgctgccggacgctgacccctgctgccggacactgaccccaagtgcattgtcccctggctgcacctaactctgcattcctgggcatggtgactccacacagggcaggatgcggagggacaggcagggaagctgggtggcggaggggccctgggcatcagacagcagggaaccgcccctccctcagggatggctgtgtctctcctgccacatgccctggtctttctctcctacctcccctctgcaaaccaccctcttggaactctcatacctccccagccctgtccg

SEQ ID NO: 51624 - DNA, 739 bp, Homo sapiens
cactgggctcattctgcggccgcctgaagggcctgcaagcccagggaagctggtcccatcctccaggacggcttctcctccgtgagctctgcgggcgcgggtgctgccacagctgctggggactcgctgctttgaatcatcctggctggaggggaggaagcagcctcctcagagctggggctggcgacagatttctcctaattggcttctgagcttagagactgactctcacagcagcggtgaccggtgaccgtgagtcagatgggcagagaacagagagggagggagggaggcatccagcagtgccagagaggggcttgcagcactcaggccaccctcgctgctgcaatgggagccagcagggcaaggtcacaggcgagtaggtgacggcatggagccagaggctgggccagctgcagcgccggccaagaggagtggggccagccctgatctggagccctagagcgaggtcaggcttctgggccagtcctgtccttacgccatgaccaagtcctgatatcccgtggctccgacccttgctcccaccacgtgggctgatcgtgagatgtttctcggtcacctgcctgggatccttgaccttgacgtaggtaaatgaagaccaagtcttacatctcagctttgcatcatccctgcctcctcgagagcccagctccttggaggtccatgtgctccctgccccaatccactaaccctctgctccatgcatttgtgggggccg

SEQ ID NO: 51625 - DNA, 740 bp, Homo sapiens
actcacacgacttcactcacccataatgggcttgtgatggtcgacgggcctggcagggaaacaggccctgtgttcctgagatgacacgcaaatgcctcctgcgcgaggacagatgtttgtcattagccaagatgggactgcacgctaccctcctgcacagctggacagtgtggtccagcggcctcggtgaggtcgggtgtcaggctgttgtctcgggtgtgacccgctctgaggcttctccagggatcagagggcaagggctgaatgccaggaagtgcagggcaggcatggccagggcagaggtgccctctgctgtgccctcctcttcctacatccaaatccttcccttcctggggctttgacctcctcctgcaggcctgacctcctcatcctgggacctgtggagagggcagtgtggcatttgaagtgcttttcaaggatcttttggtttcaagggacagaaacccatctcaactggctcaagcaaaagagggaagtcccgggcaccccaacattatcgtcgctgccttctgtctcttctttcatcttccctttgagaggccgccattctctggcaggctgggccacacctggcttatacccaaggatatagccagcacaaggcgaagaggtttcctctcccctgacacttccagggaaagtccccaaatggagtcccatgatcacctccaaaccaatcactgagtccagaggagaggctctgctgacgggccaggcag

SEQ ID NO: 51626 - DNA, 1543 bp, Homo sapiens
ctgggaggtggagcttgcagtgagccgagatcacaccactgcactccagcctgggcgacagagcaagactctgtctcaaaaaaaatgctaccacctgctgactcacactacaacaaatgctacaggaagtcttgcagtcagaaggaaaatgatgacagatagtaagatgaatccacacagaggaatgaggagtgctgaaaacactgcctacatgtgtaacatacaggatttctttcttagaatttaaacctctttaaagaccctatggtgcggccatgtgtggctgggtgggagccagcctgtggcagcatcagggcgtagcccagggccagcgttccgtggtaagcacaggttgagttagggctggtggttgatatagtagaggattgtttgatgtgtcagtcagcccaggctgccatcacagcacacataggctgggggacttcaacagccgaggtatttttctcacagctctgggaagctggaagtctgagatggagatgttggtagtgttggtttcttcagacgcctcgctccttggcctgtagacggccgccttctccctgtgtccttgtgtggtcttccctctgtgtgtgtctgtctcctaaccttctctcctttaaggacaccaggcagattggttgagggcccacccgaaggacctcattttgacttaatcacctctttgaaggcactatctccaaatacagtcatattctgaggcactgggggtcaggcttcagcaaataaatgttagaggggacacaacttagcccatacagttggtgatcaggacctgaggcaggctcatgagaactcaggaggacctgaggtttgagaggccgcaggaggggaacactctccgtccgcgcatgggaggcaccatggctctgggctggctctgtggaagacagtgactgcctgtacccaggtgggctccggggtcctcctctggctctggggaaggcagtcaagttgccctgaaaccttggcccagcatcctgggaaccaagagccccatctgttcaggtaaatgagtcaacagacggggccaagagcccccgcggctgcccgagaaagccctgcacgtctccagccctcgctgcagccgcccactccgaggaaggctgtgaacctttcctgacctctgcttgccgccagttcctggccctttgtgggaagtcccaggattaaacaccacttggggtttatttactcagctctgacaaccacagaaatcaatgctgccgtgaacttctggccgaatcttttatgactgcttttaatgtctgacttttaagcactgggacttcctctggagggcctgcttctgtctgcaggtgtgagtgcacgcttgtgcatgcgcaggccaaatgtgttcctttttcgaagcatacatggcctgaatgcccgtgtgaggttgggtgtgttcacatgtttgcacgtgtgtttatcatgttggcaggtatgcctgctcaaaaggatctgccaggtgtgtgctcacgggccctgatcacatatgaacacagctgtgtgtatgtgg

SEQ ID NO: 51627 - DNA, 976 bp, Homo sapiens
gggtcctgaacccagcgaccttgcactctagtgcacaggtacgtgcaccctagtgacgggctctgcggaggggggaaggtccttcttgtcgcaccctgcaagcccagtaccccacaagcacaggcagaccagctgctcactgtgactggggccacagcggccctaggccagagagggttgccacacagacactcagtgccaggaacgatggctctgcacccaggaagcactgtgagcagctttttgcagcagaagcaacctttgttctggcttctgggcctctcagaacacctggtgccatttccctctcccctgcccttggaggtccaagaaccgcaggggttctggtagagttccaggcctcggggcagaagaggccctggctcatacccgcatcctggagggatatcggtgccctgagccttggcctgtgctcctgaggatggggtcttctggggtctctagaggggctggctggttagggctgtctagttcttggatgcccttggtaggttggaactgaatgcttgttgaagatgtaacctaggtctcccccaaactccactcctttcccaatcccaacttctcacgttcctctcctccggggctcctcctggtccccaggcagctgggccagaaccagggcaaagagcctggatgccaagtcaccacccaggcatttgatgcgcagttgctcagcacgagtgacagagtagacacctggggccagattcgtcattccccctcccgccagctggccaagagcctcccagctctcccagagccaacacacaagccagctgcctcctctgcaccctggcatgtggtagttgtctttgaagcagcgattgatttcctgtgtttggtgccatccccgctcctttccatggacagggactgaccttcccatctgaccgcaggataccaggagggtgggggccatgagtctccaatccctggtggggctaagcaccac

SEQ ID NO: 51628 - DNA, 884 bp, Homo sapiens
actggaacctcggccctgcctcctggattcaagcaattctcctgcctcagcctcccatgtagctgggatgacaggtgctcgccaccacgcctagctaatttttgtatttttagtagagatgggttgtctccatgttggccaggctgatcttgaacccctgacctcaggtgatccgcccacctcggcctcccacagtgctgggactccaggcgtgagccaccgcgcccggccacgtgtgtgtgtgtgttttcacccaggtttcacagtggctctcagcaggagagctggtctgacctgtgagtcctgcccagcacatggcaccgtccgcagtcattctttgggagctgagcccttgtcaggcactgtgccagggcccaaaggtcaaaatgcccacgttttcaaggctgtgcctcagggcgcccctcagatgacacccctgcccttggccctccccgcccttccatggagcacagatggcagcggattctgggctgtcccctaacagccactgaccatggtcagtactcggcacccacctgtttactgcccctctgcgccatgggaagcagcgctctggacttttctgcaattttctgttgaaaaaaggacaagagaagaaagacaggaagagcaaaaagggtggggaagggagaagaaatggtcagctgagtgcagggctctggacgacggtgcagcaaaacacgcctgccactcccagaagaggctgccggggccggggctgagctctgccagcgactcgctggatggcctctgtccatgccactcccagaagaggctgccagggccggggctgagctctgccagcgagtcgctggatggcctctgtccacgcgtgggagctctctgggccccagtttcctcac

SEQ ID NO: 51629 - DNA, 1169 bp, Homo sapiens
ttgttggtagtgcccttcttctctgccagggaactcagaccaagaaaactcttcctatggaagcttccagatggctccaccatgcagcactaacaggaaggatagtggaataagaacagcacaggctcaagatcagctgtgaaacaacccctcacgtcttcagcaaatccccatcgggcattcactgggccccaggccctgggccacagctggatggacgttcagagacgcacagctccccgcgggtggggtggcagacagggaggtgtggaaaggtacagagtccaccactggcgctggggaccgtgggggcaggaggaatgatgatcttccccagctgcctcaatgcgcccaagagggagaggatgaggatgccctcagtacagagagcagagccaaacataagcatccacactgaacaactgactgtcacctctggagggacagcgccggccatgagctctccaactctctcactcactccttcttgcctttagtcttttggtcaccactgctccacacacagatgccacaaatgtttagacagggctgagcatcccagcagaaagcagaggaatctgagaggagggctgctcaggagtctgctactatggacgatgcacaaatcagactttaaagaacacaatgaatgacagctggactgggccacaaggtcaaagtctacttgtagcaagtaacaccatccaaacaaacccagtagccacagaaacgcccgtgtgcattaaaacaaaaagcctggagccagacgccatgactcacgctgggaatcccagcactccgggaggctgaggccagaggatggcttaaggccaggagttcaagaccagcctgggcaactgggcaacacagtgagacacgcctatctcaaaaaaaaaaaaagaggtggctgggcacggtggctcacacctgggattacagtgtgtggctcaggcaggttgatcacctgaaggtcaggagcttgagtctagcctggccaaaaagaagaagtggctgggcacagtggctcacgcctgtaatcccagcactttgggaggctgaggcaggttgatcacctaaaggtcagtagtttgagtccagcctagccaacatggtgaaaccccgtctctatttaaaatacaaaacattagccaggcgtggtggcaggcccc

SEQ ID NO: 51630 - DNA, 2062 bp, Homo sapiens
gagctcagacataccggaagcggagctgcccccaagccaggagcgagccaggaactaaaagaagaggcaagtgtgcagcagaggaaagaaagggcgccaggtgtggctggaaaggcacctggcaggatgaggggcggagaagcaccggcggagcagcacgcgcgaggcccattttgagccgcaccacaccgctcacagaacttcctgtgataagcagtgttccctacccgcgctgccccacacagccgccaccagacacgtgtggctactgagtgtcggacatgtgaccactggcacggaggacctgaatccttcacgttaaggacaatgtaaacagccacacatgcctaggggctaccacactggacatggcagagcttccagagcaggaggagtgcgccatgaggcaacaaacacgaggtccctggagagtttctgcgggggcagcacagatcaacatcacctgaaagtccctggtggggatgtcgcaggccccagtacccaggaagcaccttcttacaacttggagaagggacagaaaggcatggagaggcaagcacacaggaacggggtccccagctcaggctcgaaggcgggctccgctcgttgagctgcagggcaccaacccttgcacccagcaagtaggcgctggggcgctccccgggacggcactgacctccaggcgcaggcaccggctgcccggcccagagcccaccgacctggggtctgaacagcgcgcgaggacccgccgaggggctcatgtgcccgcgggccggtccccgaaatgcggcgctctcgcggggctgcggctcagggtccctggcgcccctggggtccacccccggcacggtcccgccccctcccctccccaccggcgcggccccgccccccgcccggcctcccgcaagccccataccacgccacgccgcggcccccgccgggctccgggccccgcgctggtccccggccgcctcgccctcgccgccccacgcccggccccggccaggccccagccccaccgccgccgcctcacctgggcctcggtggctcgcggaccgctccgggcgctcacggcgggcgaggcgggcggggcgggcacccaaacatcacgtgacggcccctcccgccgccggcgtgcgcgccccctcccgcaccagccaatggccgccggtcccggacgcgcgcggggactacccgccccagaggccccggcgcggagccggaagcggcgcggacggcggtcggctgggccaagaggcctctgcgggtgcgcgcgcgagtcggctgtcctcacttgcctggtggtgggcctccgtttccccgtttccccgttttgcatatggggatgacggcgaaggtggaggtcacgtggagggcggcggcccggcgctgaggcgcttcgggagcgggctccgcccagcccaggccgagcccggacctcacacgggccaaagctggagcttctgcggggctgcgcaggcggcgggtctcggccagggcagggccgggcacctgcgcgtctcgcgctgcggggacgggcgttgggccccaagtcaggctgcacgggctccgcgtggggccgtgctcggccgggggctggcaggccccgcggggactccggactcccagtgtcaccaacgaggaaactgagtctcaagacatctgagggacctttgcccgaggtcgcagcccctccctggaggagctgaagtgcagagtagggagccccttgcggagaccctcctgggacctccttccgcaggggcctggggcgcctccctttccctgctctgcctgcgggcactgagctcccgaaagactccagcccctcgctctcccggtgacctgctggagaagacacctgggaggaacctgcggacaatgggtgtgtgtccttgggccgccagggtcacctttcagcctgtttccccagaggtgaaccaagagtcacacccaaggcaggagagcaagagtgatgagtccgctgcaccttctccggcaagcggaggttctcccgccgccctcactctgtgatgcttgctgtgcttgcgaggcctacgcc

SEQ ID NO: 51631 - DNA, 2086 bp, Homo sapiens
taaggaatatctgaattttatttttaaaggaagtttttggtcttgcaagtgggacaacagtgtgttctgccagtttgtgtcatcctgccacacctgcacgtcaggcatggagacgtgtccacaaggagcccgtgtctggtgctgagtctcctccaggacgcttttcccggcatcccagtccccagtcagcccctcacaagctactgtgggattccctgtctccccgaaattagggtggtttcttgccttgcgactggagaggaagcactgatccccaaggccacgtgaacacgggatgaaacgtgcaattctcctgtgcccaaggcacagacaagaaacgggaggcctgaggggccagcgctggggctgactccgtcctgtgtgaggctaagaggccctgagaaacgcggggggaaagcgggaaacaaccttcgcaggggcatagtgtgtgtgtgtgtgtgtgtgtgtgtgtgtgtgtgtgcgtgtgtgtgttggggggtatggaggatatgaaggagaaatactcaaaaaacaagtcgcattctggagctgggggaagaggtgagctgggggtcagaaggagagtatgggacagagaaggaggggacagaaagcctggggccgtgcgccccgcagagagcgcccgagagccggcgccgagttccgctaggagccctccacgctgggggatcctggcgcagagacagcgctgggctactggcgaggctcgcttaaaaagcgtccgtaccccagggtccccgtttgtgggtagaaattcagtctgggacaagaacaagaacaaaaacagaaatggagaaaaaaaagtctcggtctggttttttaagggcaagcggacctcgtgaccaagcctctctgagagtggaagcgcaggaagggtccgggctggggcgtcaaggccaggcctggcggcaaggggtgggtgcggctcgggggccgcgcgctcaggccgcgggggtcgcgcgggaagcacagggcttcgggttccgagcgcggctcccgggagggggcgctgccgcccgcggctgggtccggccccgcagcctcgcgaccaaccccgccccgccccgcgcgcccgcctgcccagactgcggctcccgcccgcgccgcccgcgcccaccagggaccggagagcgcccgcacccatccggcccggcccggccgcccagcgcctcaggccaggaccctactcaccctgctcacccggagcagccgccgccggccggaagtgccggccactcggttctcctccagtccgcgcctcgtcgccttcccccagctacttccgggacgctctagacaggctggaggactcagcactcggtggtgtctgggagccagacgcaggctttcaaagagctgggtggccgcggagggcgtgggaggagaggaggcctggaggagaggagtgggggggtcccagggtggggggaggcgtgggaggggagaaggcgcgggcagggaggggagaggggaaacggggcgaaggcggggcgcgcggcctgggccccgggctccgccctgctctctccatctgtagaatgggcgcagggcgtcacattcctttcatgacagtgaaccctgcgctgaaggcgttggggctcctgcagttctggggcagccacaggcgcccagggtttcgtgccgatcagcccaggacggtcttcccggtgcagtttctgatgcggggagggcagtgctgccttccggtcaccaggaccagtgctcagcccgcctgcttgacccccttacttagctggggtccaatccatacccaatttagatgattcagacgatgggatttgaaacttttgaactgggtgcgacttaagtgagtatggacctgagttggtgctgtaatgagttgaggctgtggaggaccttgagatgggtgcgtggattttgcccatgggacctatgcaaattttggaaactggagggtggactgtggtgggcagaataatggccctccaaggatgtccacatcctaacttccaggtcttgtgaatacattacttacatggcaaaagggactgcaaatgcaatgaagttaagattctttaggtgg

SEQ ID NO: 51632 - DNA, 2152 bp, Homo sapiens
acatgttcatgatggccatgatgcccacgctgggaggttgtgggtttaccggaataagggcaaggaacacctggcccacccagggcagaaaaccgcttaaaggcgttcttaaaccacaaacaatagcatgagccatctgtgacttaaggacatgcccctgctgcagataactagccaaacccacccctttattttggcccatccctttgtttccctaaggggtacttttaatctataatctgtagaaactgtgcttatcactggcttgctgtgaataaacacgtgggtaaatctctgttggaggctctcagctctgaaggctgtgagacgcctgatttcccactccacacctctatatttctgtgtgtatctttaattcctctagcaccgctgggttagggtctccaggaccgagctggtctcggcactgggggagctgccctgataggtagtgagctccctgtccctggggctatcaagcagagccaggtgccgccccagggagctccttctttgagggcggtccagaaccctggaaccccagcccaggcccaggcctgaatccggagcttgtttaacccagcaattccgggaccccatccccggtcgctggcatccgctgtcattcgagagcctggggctgacggggagagctggtccggccttctctgggccgcctttcctccccagcctcgtcaggaaggggcacaggacagccgagctgtgcgacagcccgctgggcctgcgccccagggcctccggcgacacttggagtccgcagctgagtcactgactctcacccgggctcccccgcttccgcccggccgtgatttgctccggtttcaaaagggaggaagggcgggaatgctcgggaagagcctggggttggcaggacctttagggggtggaatgaatgtcgtgagggcgagtaaggaggtaccggctggggctgaaaatgcgcacggggaccatgagcgtgattcgccctgagccgctgcgaacgccctgcgagctggggtggccctggaggtcctggagcagaagctaggttcccgcagagtccgctgcagcgccgctggcgatcgggctgggtcccattttccacgaaaagtcccgcggcttcggccgcggaggtgctggagcctttgcgctcagacgaagggccgaacggccagggccaggccgcgtcttcagagcctggcgagggtctcgcgctgctgggaaggcggagacgccggggcgcgcgtgcaccctcgcgcctgcagcgccgcgcacggccgccaggtgccgctgtggcgctcagcgcgccgcccgccccgccccagggaacgcgaaagtggcgcgggcctggacggcgggacggaccacgtagggcgctgagaaggtcgcgccacggtgggcggggctccgggcccctccccctcggccgccctcgcgctgtggttcgctccgggcgcgctgcgctcgtgagttcccaggaggcctggcgggcaccgtaaccagcgccgcggacaccggcaccggcgccacggactccgcaggaccccgcgcccgccgccgccgctatgctggggctgctggtggcgttgctggccctggggctcgctgtctttgcgctgctggacgtctggtacctggtgcgccttccgtgcgccgtgctgcgcgcgcgcctgctgcagccgcgcgtccgtgacctgctagctgagcagcgcttcccgggccgcgtgctgccctcggacttggacctgctgctgcacatgaacaacgcgcgctacctgcgcgaggccgactttgcgcgcgtcgcgcacctgacccgctgcggggtgctcggggcgctgagggagttgcgggcgcacacggtgctggcggcctcgtgcgcgcgccaccgccgctcgctgcgcctgctggagcccttcgaggtgcgcacccgcctgctgggctgggacgaccgcgcgttctacctggaggcgcgctttgtcagcctgcgggacggcttcgtgtgcgcgctgctgcgcttccggcagcacctgctgggcacctcacccgagcgcgtcgtgcagcacctgtgccagcgcagggtgagcggcccccgcccctggccccggagcacggcctttgtgggacctccgggggctcctcctagtccctggcc

SEQ ID NO: 51633 - DNA, 1773 bp, Homo sapiens
actgtgccctctgatggccaggtggacagagtcacgactgctttggtgggtgtccccggggctcaccctaggtcagttgcctgctcagtctcagcatccagccaccgcctctgggctcagtcagctgactggccactgttgtgtcccctcagggcccagggacacagatccccacatctgaggccttgctgagtggagttctactgtgcctggtgtccggaattctgggacagcaggaccatcgcccacctcatggatagggaaacagactagggcagggaattcccagtatggccgccaggggctcaacgaggcaggccaaaggggctgattcgtcccaggcccaggccgccgctccccgcatgacttcccctctggacacctgcgagttgggggcacccttggggaggtggagggtcttgctcctgagggcggggagggacgccctgcggtctgcacacccctctcctttagagatttcttaaagctgcggaagactagcgctggctggtctgacctctccgcggtagtggggttcagaagggcctctgcttcccctccgcgcagtagggcctagcggcacgggtgggcgcccttctccctcccctccaccgccacctcttggcggctggctgcttccccgccagctttacccacgtcctgcgacggtcacggatgcgacgcccactcacctccctagaccccgcgcgcccgggtggtgagcgcctggcctccgcgagccccaccccgtgggcgcgccctcccgaggtccctccctggccgtggcctccccacgcatttcctgggagggtcgcggcgacaggcagggcaggtgggcgtcctccaggccggccgagagggccagggctctctgaactctgtgctgcggacccctacggtccaggcggcccagctgcgcgcgcagtgcaggttccgggcagagcgcacagggtcgccgcgtgctcgcggtgcgcgctctgggacgagtcttcctggcgcgggttccgggactcgggcgcgcgccctctgctggccgtgcgggctcagcatcgggggcccctcgcaggtgccctcccagggataggggcacctgctgagccttcaccactgcgctcccaaagagcctggaggcctcatccccattgtgccgctggggacgctgccagagatgcggcgacttcttgctccgtccccctggtgaggccaaggccctgcccccttggctccaatcgaggcccgggtgaggcccttggaggtccggccatgacccaggggacgggccctaaccggaagccacgccgccggcccggtgctggccaacggggaggcccggggtagcccttcaagggggcctctctggcagctttctctggtcggggctgctccccagggacagcatttaattcctggtatttctgggagggcgtagaggtagggggtgggttctgacatctgggcccttcatagacagaggtgggctctcacaggggtcctaggcgacccccgccactgccctggttactcccgcatgctcctcgggtatgcccagctggtctgaccacagcctgctgcataccgctcccaccccagcaggcacaggtgcccacaagaccccacgggcgtgacccagctgatgtgtggggccttagaacccaagacctagctgggcagcgcttagatggtgtgcagcccaggagacaccaggggactggggcctggagaggggcagtgtccaggggtggctcaggcccacagcagcccgtgctccccgtt

SEQ ID NO: 51634 - DNA, 742 bp, Homo sapiens
tattccggccacttctgagaaatagaactgtacactgcttggcctgttgtgcgcggcttctgtctcacttagcatcgtgttttcaagcaccccccgcgtgttttcaaggctctcccgtgttttggcgtgggtcggggcttcattcctttatgtggctgaataacattctgtggtgtgggtctgtcatctctgtgatccctccatcagttgatgggcatttgggtttttcccgccttttgtctgctatgaataatgccactgtgaatgtttgtgcacaggcttttgtgtggactcgtgtttactcttcttgggccatgcctgggcgtggaatttggcctgggggtggaatttggaccaggtgggggggcgggggtggaattgctgtgtttacagcaactctgtccaatcctttcaggaacgtgtcttgcttttctattctgaattatctagcattaaaaaacctcctctttttacatcgaaacctctcattcagttggcatgcctttggctgtagcgagagaggtgatgatccagccttatcctgttctctccacagtgctccacggcggctgccagtgagccctgtccctctcctgcagatctgagaagtgctccattgtcacctcaattcttgagcttatctgggtatctccagcgcaccctgtttatgtcttcttctgtgcccggggctactctgaaagttgtcctgcacctgagtgtccggcggccctgcctgagacac

SEQ ID NO: 51635 - DNA, 1530 bp, Homo sapiens
ggctgggtctggtgtttggaacgggaatgccctctctggaaagaggtttacagtggggaggtgggggttggattacggctctcctacccctgccgggatactcggccctcggtctccgtcctggaggactaaattaaacttacgccttcccgagaacaacaaatccgtctctcacgacacatttgcccaggccaaccccaggatgccaaaggccagagtcaggcctgcggcttcgagcttcccaaccccctcacggagagccccgccccaaacactgcggtcccaggtcgaggggagggctctcggcgcgagcgggactatcagggtgacctcacctgtgaccttcaccaccgtgaggtaccgccgcgcctgggagtcacccgcggccgctcgccggtaggtgcctgcctgagtctaatcgtaggcgtgtctgtgtgtcccgcagcacccgtgccgcatcgcctgatgctcaccgcaggcccagcccagtcccgcccccggaacagcccgcccagcgcgagctcaccgcaggccccgccccaggcctgccccggccccacctcctgagcaaccccccgagccgagctcaccgcaggccccgccccggacccgcctcctgggctactcaccaagccgcgctcactgcaggccccgcccctgccccgcctcctgggcacccgccgagccgagttcaccgcaggccccgccccggacccgcctcctgggcacccgccgagccgagttcaccgcaggccccgccccggacccgcctcctgggcacccgccgagccgagttcaccgcaggccccgccccggacccgcctcctgggcacccgccgagccgagttcaccgcaggcctcggcccggacccgtccccggaccgccggctcgccgggcaagcgctgggaccccgaggccagtccaggcatctggatctccgacacagaggcagccacgcagtgattccctggcgaccctcagactcacgtgttcagcccggacactccgcaggctatcttcaccgcgtcccgcggcagcccagccttccccgcagccgcctccgcccactcgcccgcgccgcgtcgtttgtcggccggcaccagccttgcggccccagctccgccctcctgcagcccaggcccagcagctccggaactggcgccctttggcgcacccgcctcgctgcccatggcctccgcctgcctcccctgcgctcagctcccgcttctggtccctgtagcaaagctggaaggcaggcctgcaaggcagccccttgctccgtggtccctctcaccatcataatgttcatattaaataattatctttacataactttgaatacttatgttattggttctgtttttggcaaaatgtaataaaatttcatgggtccgaaagttttcattttttccaatgtgagaaagaaaaataaaaccttttcttctaccctaaagctcatttttttctttaaaacatttttgcgggcctgaggtacagaatacaccatgcctgctgggcaagcgggctcc

SEQ ID NO: 51636 - DNA, 955 bp, Homo sapiens
ctggacctccccttttccaggctgggccagcagctgctccatgttcccagcacttggctcagatcatggtgttgcagcatcatgatctgggcaggtttctgcctcctcccctggaccacaggctctggcccagcccatccaaggctctcaggccccacacatgcaccctacgggtgagtgctttcagcctgatgcactggagtcttccaacagcatggccaagcagcgtcagagttttcgtggtggtgatggcaatgcacagccttggcccctgagtcaccccagcggctggtgagtcacagcctctccacagggccagctgggccttgagctcagtagccctggctgcaccctaccttatttctcaggctcccagccatgcacctggctgtgagcacacactcaggggactctggaccctggcgatgccatagaagagtcaggccaggcagtggggccgttgacacgggcagtaggatccgtccctttccctgtggctgagggggtggctgggggtggagagtgagaggcagccatgagacgactgcccaagggccctgaagccgcggcagcacaccccatgcctcagcttctcctgcacagttaggaagctcttctctgtctctcccctgggagccaccatcccccaggttcccctctactcccagtcgcccatccagacacccctgagcttcctagagctctaaccatcttctccacagtccggtcccattgcctagaagtggaagggcatgcagaggctgaaaagcagaatgatggggcaccagccagtgctccagccccggcacaggcactcgctgtctatgtgctttctctgcctctgtttcctcatctgcaaaatgacagcgtctctattttgatgctcgttgtgaggaacaacgagatatttataaagcccttagaacaaagcctggctcagtcagtgctagagacg

SEQ ID NO: 51637 - DNA, 1635 bp, Homo sapiens
gaacccgggaggcagaggttgcggtgagttgagattgcgccactgcactccagcctagataacagagtggggctccatctcaaaaaaaacacacacacacacacacaaatcaactgttcctctggcccccactttcacctgcaacctggagagcagtggacactgatcacagcctcacaagaatatgaccctcccttttttcctttcctccttcccctgcggccacttctttctttaactattgaagccccaaaaccctctttggaaaaggagtgggctgcacaccctactgtgttttctgcctctttttcccgggcatggcttcaaccttggcaaagtgaacctctgaactggttgagacctgtctcagtcactctgtgggaggggcctcccctgaggttggggaagatgtcccaagaggagggacaagcagcaactcagggaggcctggagccaacttcggtttcagggttgagccagggtcaaggtggcagtggaagttacaggaagagcctaaggccccagtggtgggagcagatgctgaaatccccgggagcactttggactgtgccctgggagaggcgggaaccaagcctgagagcagagtactggcagctgcacgttggaatgtgaagcctggacacagggaggtcaggcagcgagctcacctcacggcagcccagccagagagtcagcctgctctccccgcactgagccaaggctgggagacagcctacctcccaccagagccagcaggcaggtcccagcccagcctgccccgtcccgccccagcctgccctgtcctgccatctgcactccccgtcaggcctcctggccagccccacagtccctgccttccaagagacacaggcagcggcagcaggggctggatgggggaggccaagaatcagaggcgctcccccacaggacccctgaatcgtggccagagaaaggtcagggcaggatgaggcctgtggccacgggcagatctcaggtggctgacccgtcctaggagcacacagggcagctgtggctccttccctcttgaacccagaaaacagggcagagctcatcggtggcctcatctgccagccccagcagtaaggccaccggctcattcttcatggggcagcagcatctggctttctggctccagacaccgcctgctgggccaggccttcaaccaggtccctcctgacagcaggcacgcctgagtccagacccgagacagagccgggaggcagcctgcagcaaacgtgccccaaactccacaggcgcctaacccagtcctgccaggggaaagtgctcaaggctctgccctctcgctggaggcccactgctcactctcacccgtgggacttctccccacaggccccagcagcctcctcccgtcatctgagacgctaccaggacaaaagtcttccacaactagggccaaaggcctcttagtcatggaagtctccctgaacctattctggttcggaggttgcctggtttaaaattttaaaaattaaaaaaacaaaagcctccgcatgacagcaggcccgtcccagtcttatgatctctctgctctggtgtgggaggaggagggagtgccgtgtgaggaggagggagtgccgtgtgaggaggaggagg

SEQ ID NO: 51638 - DNA, 548 bp, Homo sapiens
tgtgagaaggagtgctgctacgtaagaaggaggtagatgtgtggggggagagttggcattcggcccggtcaggactccatggcccttgttacagttgtgggtagaaatggaatctctgtgacatctcctgctcccctttcacctgccccaaggcaggtctccagtactccctctcctttctgatcatgggcccaaagaggctcattcagagaggatcagtcccatgccctgggggcaggaatgctgagcacatagaggtttcctggaggggccacgtgggcggcatggaagctccccaccccttccgggagacggcgccctgtgcctctcgcgtgtatccatttataattaactgcaaatgtgtttccctgagttccctgagccactcttgcaaatcaattgaacgcaaaaccgggaggggctgcagtattgctgggaaagagggtcctgatccagaccccaagagcaggttcttggatgttgtgcaggaagtaatttggggtgagccacagagcacagtgagagaagcaggtttatttgaaatggct

SEQ ID NO: 51639 - DNA, 1048 bp, Homo sapiens
cccgaacacaacgaggactgtccaggtgtcagtgacggtcaccccgacctggtcccctgtccggcctcgccaggtcagcacccgccgcgcgcacagcagggccgggtggaaggaggccgggcctggccgtggctcaggcgccacctcactggggaaactgggaggtggtctcagcccccttctgggcctcagcttccccatctatcccaaggagccggggtaggcctgggcggcgcggggacccccaccgcgggctcgccgactccgcccgccggaggcccctcccgcgtcccgcccctgcccccgccccggggccgcgcggctgcctgggaggctccgggccagccgcggtccagagcgcgcgaggttcggggagctcggccaggctgctggtacctgcgtccgcccggcggtgagtccgcgggcccccggccgggacgcccccgccacctgcgcgcacgcgctcagacccggcggcctcggctgcggtgcacgcggccccggctcagccacgcgcggcggaaggcgccctgcgggggccggggcgggagagggtgggagagagcaagaggggcgcacggggaggcgcaggagaggggctggggctgccggtgggttggtccccagagagctgagcttctcctcccatcccccgcaggcctccccgaatgtttccaaagatctggggcgggagcgggcggagactgccgccaggagcctcccggccgccccagggctgcgcagccactggagcccatcacccaactccagacgctcctggctcctctacgtgggccgggagggacagccttgaggactaggggagggggcacgggaccttgcagagctcctggccggaaagggaggattgaccgcccccggcatatcaccccggagcactggaacccgcccccgcttcttgttttggcactggtggtgcttgcggtgaggtccaaggagcccagcctccctgagtggaccgccgggcccctccccgttccgggacacaggagaggctcccgccccttgctggctgggcagcccctag

SEQ ID NO: 51640 - DNA, 2032 bp, Homo sapiens
ggacggctcgccagggcgcgcacgcggtggcggcggcggtggaggcgttgcccgcctagctaggggcccgcggcctggagaggcgtcggttctccttccgcgctgaaggcggagacagcgacttcccgtggaggcaagccgtgggcgccgcggaggcgggggctgggggtcggcggaggcgggagctgggggtcggcgggggctgggggttggcggggagcgtcctcagggacaagtctcccagcacgcggccgcgacctccccgttgggggtctggagccaggagcccacgcgcgtcggatccggagagtctggtgggcgcagcctacgtgacagggtcggctcgggaccgagctgctggggactgggccttgcggggcggggccgctgggggcggggcatgagggtgccggttcggggcggggctttttgggggcgggacatggggcggagcctgggggcggagcatgtggggaggtggctggggaggaactttcgggggcgggacacgagggcggagcctgagggggcggggcatgaggggaagccggctcgggaaggagctttcggaggcggggcccgctcggggagggacctgatttcgggggagccttcgggagggcgcctgccatagacgactgtaaaggggcggggtcagctcggggaggaccctgcgggcgtggcggcagttatgggtgaagcctgagggggcggggcctgatcggggcggggtcttcgggggcggagtcggctggggatggagccgctcgggccgagccctccaccgcccaccatcaccgagtccggcccaggctcctagcgcggccgccggaaggggcgggtcagcgggcgggcatttcctgccggtgcctagggccgacggggacgctggcactggtggggagctgttggggggtcccgcatctagggctctcctttcctgcctccggcccccgcgaggggcgcgcgcctctccccgccctccagcagtcctggtagggcccgggcgcgtccgcgctctgcagcgggaggtcctcgtcgcctctcgtctccagccaggtactcactgggctcctgcctgccgcctccggcccaggacgcgcagcgtcggtatgggccccgccgcctccccgcaccccggcgctccagggatgtggcaagacccggctttgagcacctcccgggcgccggccccgaggccgacctagctctgcacgtgggccgcggggctctgccgttgaaaggagagcctctaactaggagcacgcacgggaccctggcgggcccctccgcctggctcagatgcctggcatctcaggccttggcacagctagcaggcccctggcaggccgtggacccagcaggctgttttagtgcagattgcccctgaatctcaagcccactaatgttccagtctctccatgagacccagatccctgaaagtagtggagggaggcgccagggtgagtgaggttttctaggcagcccttaccgcccacggatacccagagcttcatattacaagtgaagggtcctccgcccagagaggcgacggagctacgctggagttgcacgacagaaccagaaccccagtctttaggggtgtggcaagcgtgggttgcgctgtttgtaactagctaatcactcctgtctacaggcctgtgaggtgaggccaagaaaatcgctatggtccaatccgtttttgttttttgcgtgtggggttttttgttttggtttggtttggtttttttgtttgagacggagtcttgttctgtcgccaggcaggagtgcactggcgcgacctttgctcactgcaacttctatctcctgggttcaggcaattcccctccctcagcctcctgagtagctaggactacaggcacgtgccaccacgcccagctaattttttgtgttttggtagggacagggtttcaccatgttggccaggatggtctcgatctcctgacctcgtgatccgcccacctcggcctcccaaagtgctgggattacaggcatgagccaccgcgcccgg

SEQ ID NO: 51641 - DNA, 2004 bp, Homo sapiens
caagtgtgcagtggcacccaccgcgatgctggccggcccttccctgacagccatcccttcccgagcctattgccatccctgtgccctcttcggtcaaacgtctgttgcggctcttgccaattttctaactggaatgtttgttttcttgcggtagagtttagagatttttacatattatcagcctgggggctcctccacccacacagccctgagcgtccaccctggcagctgttgcccgtctgcaggcccccccgccctctgctccgcgtgcccctccagctcaggggtcccctcgcctcggctctctgcacccctgctcaaaacggtcaaagaaccctccccggccgtttatttttcccagaaagtgacaattttctcttttcaggtcgtaagcacagaactgagggagaaactgtggctgaacaagaggaaaatgaggaaggagtccatgaaggggctttggggaacctgtaacatcctcctcaggctcccggggacgcccctggaaagcaggcagaatcgagggcgctggggcccccgcgaggggagcgggaggtcgcgcgtctcgcagcggttcccggccgccggtgaccatcgctgcggacacatcccgaggagggaacccaagagggcggcgggggggactcgcgagctgaacgtggaagcaactccagccgaggacccccggaggcctggagtgcacggaggggccgcgggcagcgtggggacggcgccgtcatctcccgaagcccggccccgcgctggctccccgggcggtgcagggccggcgtcgggaaggaggctccgaggcgccggcttctgcgccccacgcagcgccgctccccgcgcccgggcgctttgcaggcgcgggcgggatccgggccagcgtgtacgcgaaagccacgcgcgggcgcagcccacgaggggaggggcggggaaaggcctcctcttcgctcccggccccgcccccacacggccaccgaggcgtgcggtcctcccggggcccagagcgtcccggaagtgcgcgccggccgggcggagtggggcggggccggacacttccgtccggcgcgcggcgtcctcctcccgctcggaaggtgagtgggcgcgggcggcggcggcggctccgggtgcctgggaccagcccagtccgagctcgtgcgccgtactccgcggtgcagccctgcccagccgggccgtgcggcccttgcagccgccgctcgccgtgaccttggccttgggccaagcccggggagcggggtgggctcctgggggtcgcggagcagcagcggaccgccccgcccagcggccctggcgatagcgggtgtccgttcgcagggcgcctttcccaggcacccagtgacggcagctgtcgtcatcgccactctgcagatgggaaactgaggcccggaggtcccgccgctccggagcgaggagccgccggaccccagcgccgcaccgccgggcggacgcgctctgtgccgagctcccggcgattgggtccgctcccacggggctgggaacagaggggcagaggatgcttcccccgagccgctggcaggagtgcccttcccccttcagtctggagctcagagtttgtgcgtccctgggggtgaaggggcgtccacgctgtgatggtcgcctctgctcagtcctgggggccaagccagggtcggggtgatcgagcaggcccttttaccaggtgtccccagtaagttaactaagtaacttgagatgtgacttcagggtggaggacctgcacccagtggccacctacctggtgacctgacccttcccatcattaggggatggaggctggcccagaagccgggcactggggtggcggccgtgtgggagctgcctctcccacttcctcgaagcaggcactgtctgctgttcttagatctgagtatccgttaacttttgtcctcttttcccgttcctttcttcactccctgccccagattaggagttcctactctatcacagtatgaaagaaaagtc

SEQ ID NO: 51642 - DNA, 1004 bp, Homo sapiens
gcctgccacgagtgcggcaagcgcttccgcggctggtcgggcttcatccagcaccaccgcatccacacgggcgagaagccctacgagtgcggccagtgcggccgcgccttcagccacagctcgcacttcacgcagcacctgcgcatccacaacggcgagaagccctacaagtgcggcgagtgcggccaggccttcagccagagctccaacctggtgcgccaccagcggctgcacacgggtgagaagccctacgcctgcagccagtgcggcaaggccttcatctggagctccgtgctcatcgagcaccagcgcatccacactggcgagaagccctacgagtgctccgactgcggcaaagccttccgcggccgctcgcacttcttccggcacctgcggacccacacgggcgagaagcccttcgcgtgtggcgcctgcggcaaggccttcggccagagctcccagctcatccagcaccagcgggtgcactaccgcgagtagccgggcgggggctcggggctcggcctcctacctgcccccaacccaccctccaccccgtcccccacggtgggcactgcccagcaccgcatgccacgtgtccggaataaattctttttgattgttggaagtgggagccggcacctgcctgggtgagaccttggggcagcttcctgtccccgaggacccgctgcgggatgggggtgatggggctgctccaccaagacctgccatacagggccacggggtccctggggtctggcgggcggcccgagtgtcgtaggggaggatctgaggcctggaggtgtcctgacttgcccaaagctgataccccaccatcaacacgggaggcggggggggcgcgcccagagcaggggtcgaggacggggccagtctagaagtgctcacaggcctggccaggctgcctgtctgccacctgggtgaggggtctctggcaactcggttcccttatgtatttgggaggcctctgcttctgtaaatgcagcagg

SEQ ID NO: 51643 - DNA, 1816 bp, Homo sapiens
ttacatacatatatgtagcatggtgtattggctaagaaaatcgaccttggaatttcaagcccaactctacagttaactgtgaggttggatgagttattaatgtctctgaatctatttcctgattagtaaatgatgtattatggttctccagagaaacagaaccaatgatgtggggtgggggaggacaagagaaagagggttattatcaggaatgcactcacagggttatgggggctgggcagtcccaagacctgcagctgtcaagcagaagagctgattgaaagccagtagacttgagacccacaaagagctgatgtctccattcaagtctgaaggcaagaaaagacgtaggtcccggttcagtcaggcaggaggtggttcctatgcgggccttgaactaattgaatgaggcccacccacattatgaagggcactctgcttcactcagttcacaaattcaaatgttaattttatccaaaaacacccccacagacacactcagcacacacagtgtcactacttactctcagattgctctccagactgggggaaccaattgacaaggcccccagctcccccagctatgagactacattccccataacttttcagcatgttcacttgattctccaaccttaacagacttgtgatattactttaatggcaaacaaggctctgctgtcccacgcgcttactttgccacatggcacagtatctgtgtcacagacgcactcttcccaaggacaggtccaggcctgtgtcagtcactgcttcatcccagcacctagcacagggcctgactcatggtgagctgtggacaaacgcacatgcaattaacgacttgttcctgcctcagggttctcttttccagatgagtagaacaattcacattttttcactccttacttcagactgggagaaagggcctgagcagaaggatcagagttcaaaggaggggacacagcgccacagaggcaatgcctggagcaacaaagattggggtttgggcatgtactggagtgagagtggaaagggcatggaagtcagggtccagtcagaagacagaggcctcgtcagttatttcaacagagaggatttcgcatcatgaatcactatgtacgaagtgactaccgaaggagctgaaaagagaactctatctcagaagcaaaaactgcagggagcacctgctacgctagggctgtggaaacaaagggaagcgtttggaattactggggtcagaaagcctgggaactaaacccctaaggagagggcttcgcaggtctctggtccctgacctggccccgagggtggggacagatccccgaggcgaggcgtcgatggctgcggtctgaggtctctagcggggggccgatgaagctcttctgcgaagttgggaacccgcgcaccagttttagcagccgcggaaggaagtgctcttgccggggcgaagcagcagagttcggaagacacgcgaccagggcaccaaacagaccggaagcctgaggaaaaaaccggaagcaaaccggaaagagtgtgcccctctctcctccgcagcctcgcgcgctttctctggcgcccctagtgggaaagcctagcatggcaccagctggccaagcagaaaaaggtttgcggagaccgggccagccgcagaggtggagctgagggtcaaaacctcctccctggagcaggagggcagagaggccttccttgtacgttcgagcggattcataagataaatggtgaaggactcagatggctgagatgagattttgtagaaaaacctcgccgagtgccaagtgcagctagggcttcagga

SEQ ID NO: 51644 - DNA, 1569 bp, Homo sapiens
tttaaaaaaaatttttagtcgacacggttctaactatgttgctcaggctggtctgaaactcctggactcaaacaatcctcctgccttggcctcccaaagtgctgggattacattcatgagcctctcgcccacccagtctaagtgttttaatttttatcttttacaacagcttctaatttgttacaaataaacgtgcagcatgtggtgggagtgttcaggtgtttactggtgcagtgcgcaatgaacgcggttccaggcacgagatgtggaggcccagaggcagatgccgggtggcggcggcgcgggactgtcggaggcgcgggcagggacctgggctcccaaggctgtggccctcccgccccagtccagggtccagttccaggggcgcgtctggccctctgttgctgtcttcttagggttctctcatgggaatcggttcttcagcctttcttttctccccagagagggtctgtctactcgttgtaagagggaacaagtccacattgcagctgtacactttgcacccatgatgaaaagcgtcacttttgcagcattccagctggagatgcgtgaccttcggtctgcggcaggcggaagggcgagagacttggacaggaggtgcatcttgcccggggaaggctgaacgaatgagagctcggtccctggtgagaaagagcccagagcccgcgagaggcgggcagcaagggcttctctgcagcggagacgcgagggcggcgtcctgcagggaggcggggggcagcgcctggggcgctccaagctctcggccccaaggaagcccacgctcgggacccgcgtgctgccacagccccgggggcctggagggtcccgtgagccgagcgggacccgggacaagcgcgggacgccgcggggaacggacgggaacgcgcgtggccgccccacagcgggccttcgacacctcctgacacgtcctgcgggtgcccggtcctcagttggctcgagccggatcccggcgcgccaacggctcgaccttgccccccacgaggcagggcttcctgcccggcaggaaggactcggccggcgcctgcgggcaaccgatgagctgaaggcgccgcggctgggccgtcccgctctcccgccgccgagcgcgctgtcctcccgctgcccagagcgtcgccggaagtgccgagggggcgggccaggggtggagactggcgtttccggcgcgcgacggggcggggaccgtagcgggtgcagtccagctgctctggacgctgaggccccggcttctcttgctggggtgtcgattcgggagggctgagggcgcggccgagagaacggggcggtcaccgccgccgtggcccgcgcgtcccgcgctctccttgcagtgcaggccccagccgctctcgggcgcggcgtgggggaggcggccctgcaggtgcgtacccggggtccgacacgtgcggggcttcctgcgagctgagtccccgctgcgcgtcttcaggcctttgtaagttgtcaaatttcccaccggcccagctcatcgagcttcttcccagctgtgaacaggagggcctgttccctaattct

SEQ ID NO: 51645 - DNA, 1994 bp, Homo sapiens
tggcgggaactcctgcaggatctcccacgcaccagtgaggctgtcaactctccagctcttcggaaactccagcatttcatgcgcagagacccatccccatgcggctaccccaggcccagtatgcgccggcagggcttctcacatgtcctccaggaaagcgcctgggaccaccaacggccaccagggccactggatccatgcggcttgtgcctggtgatgtagatatgacagtgagcgcccgccgccatgcagaatcggtcctggagacaacccgggaaccgactccaggaaagagcgggtctcagaagaccatgcacagcaacataagctttttataaagtacctaaccaaaccctacagtgttgaggcccaggcacagctacacaaatgatgaaaccacaagcggaaaaaaagaggggagatttccccaaatagggttggtggggtggtgcctggggaagcaagggcgacgtcatgggggggcctgtacaccccgggcaggaggcgggccggtcacaccgcggcacgcatgctctcctggcccgacttttgggaaaaccggaagcagggcaaggccgtcccacgaggcctgccactcccctttctggacctacccaagcccggtgctcagggccctcgccgcctgctcactgggacaccttacctggctccactgcccttctgcgtcctgcgcgagcccgggacaccccgggaggccgggcggcgggggacctccccgagcagcgtcagagccgcccggagccgcagcagccgcaccacgcgcatctgccagcctccgggaaagagcgacaagctgggccccgccccagcggccagccccgccccgcccccagcggccagccccgcccccgagcgcggcctccgcccccagcggcgctcatcccaaggctgggcggtctaagcctgcacggggctgcggcagcaggaccactgactgtcctgccggcctccccctggtttccctgccttcgtggtccagcgccccttcacgctgggcggggacccagatccaaacccagtcccactgacctctgcagcacagggctggctgtcaggatgccccacaggtcacacgaccaggccagtgaactcctgcccagggcttgcacacagctctctcccagagcctctgagggcaggggcacctagcaggtccttcctaagtacacgctctgctgctctggagaagggaccacacaggctcagatggccccctacctcatcccctacaaacagcagcacttccaggacgcagaaaccggcagaagcacctgctgtccagcccacagcagcccctcagaggtggtgcctctggacaaaggtcacaggaagtcctgcgaaatcatccctgccaaccagcctctcactcccaaggagaccagagaccaggcacagctggagcctccttcctgcgctcagtccccagcgtgactgctgaccctgaccagggtttaaccccagtgtcttcactggggagcatggccaaggggcaaaacctctagatcagcacttggcggtaggccctgagccacaacaggccacaccgctcacctctggcagcaccgcagccttggtcttccccggtaaaaccctgacaccaggaccgtgggaagcagatgaattcacatgcattccgcactttcactgtgaccgttggggggaatgcagtggacacaggcaggaaaggagtccgggctgccaccgcacgccctcagcgaccctcccctgccaccaactgactcagtgtccatgtcatctagctgctggaagccatgggcagaggccgagggctgcaattgctcgctcttagggcccaggcagacctggtaggtgtcccatcatttcagaatgagcagctcagcagctgaaggtacacacacaccaggacacagcagctgactctccaggtgggccacctcctcccaggggctgcggaacagtgatgcatattttttcaggtaaccctttctaca

SEQ ID NO: 51646 - DNA, 1089 bp, Homo sapiens
tatggaaggcccggaaggacacacacagccgggtgagccccgcagggagctgtgcagtctcaggtcgtccagtcctggggctgcaggccagttctccaagcaggtggtcctggaggcaagctggttttgaaagtaggttctgaaaataggtcagtccaggaaacaagctctggaagtaaagagattcggaaagcaggttcgttctggaaacaagttctacaaacaggtagttctgaaagcacgtgggttccagaggcaggtgctagaaggatgtgggttctgtacggaggttctggagggaggcgggttctggacggaggttctggaaggaggcgggttctggaggccggttttggaagcaggacgacaccgacagaggcgcctcggactggggccaggcctggagcctccgctccgcgggcagagagaagaaagcaggcattgtcggaggactcacacaagcacttgtccctaacaaaaccgtttttaaaaaccccattgtgaacatttttggaacaagcctcttagagggtcccgttgccggggtgacaggacgaaacggcgcgagcgggcagactcctggagtccccgcaaagggagccgaggagctaggcgcgccgagtccaggtccgccctgactctcagcttgggacgttccgtatagtttttttctccgtttcccgaacttctcccgcacgctcagcggccgccgcggcgcatgcgcagtacaacctgccagccagccgcgggcgttccggccgcggttgccaggggttaccgtcccgcgggcgggcggagctggccgtccagagcccgccttcctggaactctggttggctgatatagctgtccgtcgaagcggcattgccgcctattgggcaatggccagcttcgcacgccagacccgtgccccgcccagccgcgccgcgggccgcccccactcaggagggacagtcggggaccggcgcgggcactcaggagcccgcggcccaggtggtgcgggcggccctagcccggctgcggagcgctgcgcgagcggcgggctggctgaccccgagggacccccagcgcagcgggtgcggcgatgat

SEQ ID NO: 51647 - DNA, 1898 bp, Homo sapiens
cagaagtggtgagctctgtccacctaagggcaagtgcagcccggctttgggtgggagcccttgcggagggagataggcaggggcccctgtgggtcagcagcccaggctgggcttggggtgggtctcctgggtctgggagcctgagagctgctggggtaggctggacaagaggcctgggcaggcccctctcaaggctgtctcctctggagtcagggctctggcctggccctgtccaccccttctgggagtagggtctccggcttccccctcctcacagggctctgccccagaggctgtgctgtcttgagccagtggcccaggcaccgatgcctgcgccacggagaggccttgcccacaacctggtgggataaccctactgggcacccaccccgtgatagctgggctgcacgcccgggcataactcagtgtttacctggtggggggtattggcggcccccgcggctccagctccccccacacccccttcggcccctagaccgtgcgccagacatgcattaaggcaggagtgacttatcgagctgtcagggggagcgttttaagacagaattataggggagaggaaaaagatttttaccaaattaatgaaaaatcaatgtggcctcaaaaatccattagccttcataatgcgctggttccaggctgagccgcataatccgatgccggctgttaaactcgtggcggtgcccccgcccaccattcatcaccgcacggtgcttactcctgagagtgacacctgcccggtgcccagagcccctgggggcccctgccctggctccctgaccacacacagaggctgcagggagccctggggtgaagcatgtagacggggcagtggcgtggatgggatagagagtgcgccgctggttttggtggtgtccagggtaatcagctgccagggtggcattgccggggtggcagagggcctggtgtgctgttggtgagggtggctaacagtgacggtggcaagtgactgtgaggtgagtgacctggtgtgaatgaccacggggtgagtgaccaggttttagtgaccacggggtgagtgaccaggcttcagtgaccacggggtgagtgaccagattttagtgaccacggggtgaatgaccaggtttcagtgaccacggggtgagcggcctggagtgagtggctgtggggtgagtgaccaagtgaccatgagggtgactgactgtgggtgagtggcctggagtgagtgactgtggagtgagtgactgtgagggtgagtgaccttaagggtgagtgaccatgggatgagtgaccgtgagatgagtgactgtaggttgagtgacctggttttagtgaccgtggggcgagtggcctggttttagtgaccgtgggatgagtgaccataggtttagtgacctggttttagtgactgtgagggtgagtgacatggttttagtgactgtggggtgaatgaccgtgcagtgtgtgacatggttttagtggctgtggggtgagtgacatggttttagtgactgtggggtgagtgacatggctttagtgaccgtgggtgagtggccgtggagtgaatgactctggggtgagtgacctggttttagtgaccgtggggtgagtgacatggttttagtgactgtggggtgagtgacatggctttagtgactgtgggtgagtggccgtggggtgaatgactctggggtgagtgacctggttttagtgactgtgagggtgagtgacatggttttagtgactgtggggtgagtgacatggctttagtgaccgtgggtgagtggccgtggggtgaatgactctggggtgagtgacctggttttagtgactgtgagggtgagtgatttggttttagtgactgtgggtgagtggctgtggggtgagtgacatgg

SEQ ID NO: 51648 - DNA, 538 bp, Homo sapiens
tcactgcactgcaagctccgcctcccgggttcacgccattcttctgcctcagcctcctaagtagctgggactacaggcgcctgccaccatgcccagttaattttttttgtgtgtgtttttagtagagacagggttttaccgtgttagccaggatggtctcgatctcttgacctcatgatccacctgcctcggcctcccaaagtgctgggattacaagcatgagccaccgcgcccagccaacaattcataaatgcttaagtgcatgctattctgagcagtgtgatgaaatcttgcaccgtcatgctctgtcctgcccaggacatgaatcattcctttttccacactgtatacacgacctaacattagtcacttagtagctgtctccctcatcacactgactcttgtggtactgcagcacttgtgtccgggtaacccttattttcataaaaaatggccccaaagtgcaacagtagtgatgctaacaatttggataagagaagctgtaaaatgcttcctttaggtaaaaaggtcaaagttc

SEQ ID NO: 51649 - DNA, 1366 bp, Homo sapiens
ctgccaagacacgtgactggggggatgtgccagccctgggctgggaagagagggacaagaggactacctcaatccattcaacaaaaggagcagcccaagctgtccccagtgtggggacccagggtcctacggtggtatgagttctggctctcctgagaacgccaccctgcctgcgcagcccaggtcttcagcttggcacccacagcacagtgcagcaccaccacggcacacacgcgatcccacgccagttctgtgaagtaattaattagcacagccacaacccacgcaaaactggaggccgccggcatgcctgataatttatgcaagattcaaagatcgctgtggctgcctttcctgaagcctaattcagcattttctttttcccttatgaaagcaggactccagatctaactgctctcatgccctttcacggggttcaccgcagtaaaattgaacagcccagctgcacacagcaagcaatggtggatcacataccccagaggcaccaggcagagcctcccaggtgggcaatgctggccagcagcacagcccagcaggaacatcacaccgggccaaagcacccaaaggcaccgctcagccccacagcaaacattcctgaccccattcacagatagggcaccgagcaccagcaaggagaacgggcagacagggccaaagtctcccgccaggccacgcccacaccacgcctgggggctcataaccctgcctcctgcatccggcaaaggtccaggcctccagcaccggacatggggctgctccccagtacctagcagcatgggacagggtgcctgctcctcactctcgctggggccaggggagagtctccggcccctctggccctggcaccctcccccactgccaagacacagcaagcccaccctggcaaccaccctgcggtgcacctcgggccctgcgtgctcctgcctcctcgggggccgccactcatctctgcgcagggcaggggagccatattgtttctgaccacagcgctccagctccccacaaggctgggacccagacccagccaactcacaacagaagccaggcggcactgccgaggcgctgtggggccagcggccacgcctcggccaggcagcgacagacaccctccacggtcaagcttccatcctcaggctctgtgcagcaggtcagggctccacccatgcctcacattccatccacggccagcctcccggggagatcgccaggctcagaaaggcctcccagcagcctggcacaggaggttacggcgaggatggcacagaaaccagcccctctgctggaggccggggatcgaggctggtggcactctgcccacttgctcactgagcctctgagtgctgct

SEQ ID NO: 51650 - DNA, 1682 bp, Homo sapiens
actttgggaggccgaggcgggtgaatcacctgaggtcgggagttagagaccatcctggccaacatggtgaaaccccgtctctactcaaaatacaaaaattagccaggcgttctggcgcctacctgtaatcccacgtactccggaggctgaggcaggagaatcactcgaacccaggatgaggagattgcagtgagccgtgatcgcgtcaccgcaccccagcctgggtgacagagcaagactctgtctcaaaaaaaaccgggcgtcaaggaaggaacccgcgtgcgcccttagcctgctctgccgaaatgagccatgaactagtcccagccccgcagtggggcgcggggagagagtgggcgccgggggacgcgacagcccgcggtggtggggagggccgccgccccccgcgggttactaagcgacggccctgcctccaccctctgcagccccagcagggccggcaccactccctcgacaaagctggagccggggactgacccgggccctgagccggcccacaagtcctggcggaccctaccgtcccccaccccagccgccacccagaacacgcgggcggtgagcgaccccttcgacaagggggcaggggacccgccgcgaggtgagggggaaagaaggggactcgcgtcccggccccggccggacctaccctgcagtaggcggatctgccgccgtaatatctccttttcctccatctcccgagtccgcgacggccggccaggcccccacgacgtcatcgctacgcgacctttttcccgcgggcggggcggagcgggccagggcggagctgccaggagcaggcccggatgtctgccgaccgccgaggacccgccgtcgcgctgacaacggcagcggagaggcagagccgcgcacgcgcagaacgaggcggggacgtcactagtgagcgccgggaagtggcctggtaacggctgggaagggactgcttgggctctgggaggccgcgcgggcccagcttgtgcagtccgggatcgcgtccccttgggagacttggcgaggggcgagacctggggcccacccagcccataccgcagttccttcccacagtccctgcgtttcatttcgccccagttgagtgttgggggggggggggtctacgcggggacccatgggagaagggccagttaacaattactcttgacccaggagggtctgtgaaacctcttactgtggccagaggagaagacatcggagagcaaggttccctggatagacatgttgaacctctgaaaacatgaaagtttttagttcgtcattggaaacatgtacaagtgtaaacctctgtgcgctgttggtgggaatgtaaatggcgcagcaccgcagaaaactatggagattccacaaaaggttaaaagtagaactaccggatatgagggcgatctggctgcgacacctgtcatcccattgatcgccagggttgattcggctgatctggctggctaggcgggtgtccccttccttcctcactgcttcatgtgcgtccctcccgaagctgcagctcagtcgaagagaacgaccatacccaatagaagagctgggcttccctggtagaacctccaaacaagctctcaaggtccatttgtaggagaaggtagggtagtcaagattccagacacatccaaatgaggcgctgcatgtggcaatct

SEQ ID NO: 51651 - DNA, 611 bp, Homo sapiens
ggaggctgaggcaggaggatggcgtgaacccaggaggcggaggttgcagtgagccgagattggtgccactgcactccagcctgggcgacaaagcgagactccgactcaaaataaataaataaataaataaaaacaggaaaggaataaatgggtggctatcgacagcagagtagcagtgtgggctgcttgactgactcttgttatgatcatttcttgattatgtgctgaaccagcagtggattactcatgagttttccaggaaaggggtggggagttcctggaacggattgtcctccccctttcagaccacatagagtaacttgcggaagatactggcgtttgtaaaccatcatggtgccggcgggaatttcccgtagtatgctaacgtgttgcaatgagggcacagtgagccgtaaggatgaacagaggtcgctttcatcaccatctcggtgttggaatgagaccaccacttctcctgttgtccttcccagcttctcccccacctccccttttccctagtttataagacaggagaaaagggagaaagcaaaaagttggaaagaaacagaagtaagataaatagcgagacgaccttggcgccaccacctggc

SEQ ID NO: 51652 - DNA, 2364 bp, Homo sapiens
gcctcagcctcctgagtaggcgcataccaccatgtctggctaatttttctatttttagtagagatggggtttcaccacgttgctcaggctggtctccaactcctgacctcatgtgatccacccaccttggactcccaaagtgttgggattacaggcatgagccacagcaccaagccaagaaagtgtattttgttggtctcctgttcctgaggtcaggcattgccatcaggctctccgggaccatggtgggtgaagggtgtgaatctctctgtgccaggcttccacgggcattaaacactggccaaagtgcaggagttccccacctgcatggaaaacattccccacccccaaagtaatgcccggatcctggcagtgacggcttcttctagcaaagtgaagagaggcggaggcccagaaagccagaagccaggtggggcatgcctctgtgtcaccctccctcaagcccacctcagacctgcccagggagcaacactccttccagagctggggaggaaaggacaggcctcagggcagggaccccagaaggggacaggatggggggtgcgtgccagggaagagcgctgggaggcaaggcctgggttccctgcaggcagcggctggcccctaaccccatcgccctctgccccaggagcgggtgtaagccgtggggtgcccaggagctgctgggggagttttcctgaggccccctggccttagcagggctcttctgccacctgcctctcctcactcttggggcgcctctgagcccgacacccctcccacagggcccccatcaccacaatccgccccatgtgggctcagacgcccaaagccctggaggtgggggtggggggatagggaggtggggtggggggtgggttgtgtgtagagcagggggcaggaggaccagcaaaagtgaagctgtgaagaggcagggtggggcagagtgggaaaggcggggaggggtagggggcaggggtaggggagtggggggaggggaggggagggtgggggtaggggaggggagggtgcggggaggggaggggagggtgcggggaggggacgggcaaggcagagaagccagcgaggagtgaggctgccaggacatagtggggacttccccggcaccccagaccccctcgggagctgctgccaggccaggacagtgtctggcaggcacctgaagtcccgccctgcgcggggctggttcccgaggccgggttgtccaggtcgcggtctggcgtgagtcctcgtgcccttcccggctcggggattacctctctggctggtcccctcctccgtgctctgcgcgcctccaccctagcgcttgtcttggctcctagaaccaggggcctggacgctgctcagggcagaggcgccccctctgaggggctggcccctcagccgcactccgagacagccgcccccgggaccgcccttccttggagccccgccgcccgccgctcactctgcacacgcagcagaagggacgtggtgttccccaggctctggccccccaggacctgcgcggatctggcccagggcgcctcgccgacttccgtaaactgggcggagggatgaaccccgacccaggggacggaggcgctcgccctctcgctgcagggttctgccctcaacacttctggccccgcctgtgaatgggggccggagcgatggggcggggccggcctccctccctcctcccaggctgacctctgccctccttcgagcacttcccgttcggggtgatgattgaagaactgagtgtggacagagcacctgtcctcgccagcgcccagctggaagctgaggtaacttcgtcactgcccgttgacctgcgggcacggtgggccacaccttgctcagccgtccgggccctcacctgcccctcctgcccgcagacggcgcctgcttggcctcagaccaagtcccacaggggctgccgtgcctgccgcctccaccccattcccccaacaaggcagcgaggccttcccggaaaataagcctgggctcttcacacccctgctggaggcaaggcccgccctgcactctggaggccgccacctcctgccggtgtctgggaggggcctgacgcaccacagacctagaggcagcgaggctgtacagggctttccaggaattttgctgcaaaggaaaggagaaaagcgggaggaggggaggagggaggaggcccagatgggctccccttcctgcagcggacagccacgggcgtggcaccggctgcgcaccgtgacctgcacatgaacacacacagcgacatgtgcacacacaggaacacagaggcccacttacatataaatgcagatgcgtgcctgcatcaacgagcgggagcacattgggcaa

SEQ ID NO: 51653 - DNA, 1632 bp, Homo sapiens
ccatttgcatttccttgatgactaagggtgttgagcatctttgcatttgcttgagggcaatttctacattttgtacatctttggaagatctgcccagacccttcggcacaggcccaaagttgtttgtttgcttgtttgtttttgagacggagtctcactctgtcgcccaggctggagtacaatggcatgatctcggctcactgcaacctacacctcccaggttcaagcgattctcttgcctcagcctcccaggtagctgggatcacaggcatgcgccaccacgccgggctaattttgtatttttagtagagacggggtttcaccatgttggtcagtctggtcttgaactcccgacctcaggtgatccgcccgggcacaggctcagagttttaagaaaaaccacaaagtgctatgaagtttgaggctaccaggatggggcgccaagccaaggttcctccggacgcgcgaggctggtgctccaggcgggctggcgggaagagggggcaggaagggggccggggcgggctctccgggacggttccgggagggcgtcctgggcgggccctgcgtcaggttgcagtttcacttttagctctgggcacctccagctcctgctcgccggacggctcccagggagagcagacgcgccagacgcgccaccctcggggcgccgacggtcacggtgagctgcgccccgccccctcccccggcctggctggagctcccgagtggggccggccgctggctcccgggtgggggatgctggccctgctgccccagcgttcgcccagaaggccccgcgccgcacacgggggcggaagctccaggcttcgggaaaggctgcccctggccagcccaggggcccggcctttggacctgggcttgggcttgactcccaggtccgccatccaggttcccgggccggtgctgttcccgcccccagctgccttctgggcccagcctccactttcagcagacccagcactcagaggcttcctggggcagctgcagcccctccacagtggcccaggtgccccctatcccagcggaggcccgctatggcctctgacccccaaagcctcagccttggacaggtggctcatggagctccaggcacagagaaggccctggaggacgcagctggggtggggcgacactctggctgggttttgcagtgggtccctggtgacactctggctgggttttgcagtgggtccctgcaccacgctcaggaggtgacagcttgtttcctcccagccagaggcagccattctagtggacagagccctctgtgttagagcaggtctgggcgtcaggcctcactgtccctggctggaggtgctcatggtaccgtagacaacagggagaacactgtaattctgtgttggggagggccggggacagaagctttctgctagtgggagcatcccaggatgagctgggcagggctgttctggagggaaggagtcccccatcatgggagacatccaagtactgacccttctcccactccctcccgcccgccccgagagcacaatgcctgacccatttcccctcctcaggagcatggggtcggcctttgagcgggtagtccggagagtggtccaggagctggaccatggtggggagttc

SEQ ID NO: 51654 - DNA, 796 bp, Homo sapiens
aaagggtgagtggggtgggagtagcccgggtcctagaaagcatttggaaaggcaggcacacaaggcacagcctcggggccctgagaccggcagggccatgccatgtgacaggccacacctgagccccatcttgagagctgcaccaccaatgagctctctggcaacatggcccgttagagattgtttgggcatccaggccaagactgtcccggcccactggctggaggtggaaagggaatgagtgtcagggtgcacctgccctcttgccctccaatcttagaccccgttggaatatttgccctggggtgggctctctgcaggtggatctgatggaccctggggacacagcatccccatggagggaccagcccactgtgccacctggagcctcccaggaattccagcagggaagagtcacactctagaggccatgtggactttgcatgaatctcactcctggcagggcaaccaggttctgggcagtgccagagcaaggcggggctggacacactcctaacagggagctgtatggggcaagcccgcctgcgctgcacacagcctgccgcaggacggcgcggactctcccgggcaccatgagggagggggaggagcgcaggggtgctgcctgcccaccacagccagctccccgcctcagcccccatctggggtgagcgtggcatcactgttgggtttgcccaccagactgtccagcgtgctgtggggtgtgggcaagcctgtgctaggtgggcagcacatgcttgccctggggcctggctcctggttgcaaggtgagcaa

SEQ ID NO: 51655 - DNA, 2272 bp, Homo sapiens
gtgggccagggtcccggccaccggcacacctcgcagctggcccgctagcacgttgctgctgctgtcgaagcctggggaggaaggcggtgggattgggggacctcgggccaagatggggctcctccttcccggcccttgccttgccccgcaccagacactcaccgcccaggtagctgtaggtggaggctgtcaggcccccatcggggccctgagcccgcctcaggcccatctctagcagccgcttctctggccctgcgatcaagcgaagccgcgctgcgttggtggccaccaggctgtggggagccaagagtcagggggtcccagggtgaggatcactaggccacccaagacggcggttacctggggcctggaacttccaacctgggagctccaccctcacccagcccctccttacaccctgaagagtgggggcgggaggccagtcctgggacccctgggcagccagccccgccgccacagtccagcacggagccccggcgctgggggcccatcccatgcccacgctccctgccagtggcccgcagcccacctggcgtagctgaccaggcagagcagcggtgtctccagcagctgcaccaccaggagcggcccggacacctgcaggagcggcacctgcggggagagaagtcagctccgcgctcggcccagcaccccgtggccgccgcgccgcccgcttacccctactcactccggggaaggcgagggagccctcgggcagggctcgcaccgtcacctcggagcagtcgagggcccgaaggtgctcgaagaacgcaggatccgtgtctgggggcagcaccgaggccaggaactgcacgtctggaaacgaggtaactgcgctgagaccagcgcggggacagaccggtcgtgggacatggggggttccacggggggacaaggacttccaccggccataggtgggggtttctgccgggcgtggggggctcgtcgcgcggacgggggactaccggcgtcccgcaggcggaaggcgcgcaggaagcgcacacagtcgcgcaagccggcggccaaggcgaaggcgccgccgaacgggcagcggcggaagaagagctcgaactcggcggcgtcccgcgcccggcccgcgcgccaatagcccaacgccatggtggcctggtagaggtcagtgagcagcggccgcgccgccgcgcgcgcctcggggtcctgctccgccgccatcctgctcccgacgtccggactccgccccgccccgaccccgtgacgcgccccggcctatggcgcactccctgtggggcttatcgtgccgtttgggagcggcacgggactcgatggaggacgggtggggctaatagtatcggcgcgccgagaggggctgaaacagctggacccgggatggggtgggggatgtcacccaactcctctcggaccccccaaccccactccaggcccaacggcctctttggagcgcagcccggtcttggtcaccagaggtgcccccagtcgctcgtgtctctgccctttggccgggcaatgaggtgcagctcaggacttgccaggcggcggaaagggtggaggacagaccagccagactccacccccaccgacccagaagacaaccgctggccagcagccagctcctgccctgggcctggggagggaggccagaggctgccttagttagagcttgagcagccaggctaggacgaggcagcccagatggacgcaaatgtcgcttggaaagagcttggcacccaggaaagggcggcgtggggcaggggggcgcatgcccactgtcggctggcaccaaaagaccttttgtggctatgaaggcccagtgtccctcagtggtggcttttatggggtcctgcagtccaagccccacaggaaactttctaaaggtttgagggcaaagtcaggggccactacccagggagaatccattcccctgtggcttggggccccgaggacagagtctgaccagaagtaatcaagtaattacaccccatcctctttcaccccaatgcaaacacgggtggtccaggggagggagtgtggccacccatgctgaccacatacggctgtcaggatgctgaggcacagctccacagagcccaggcagccacgttctggccaccccagaacatcatgggaggggcacagtccctggagcaaggggcagggattccaggaatgaatgaggtgaggggagggccgggacagcacatgacaaagggcatggcagcagggccgggtgctactgggacttctttcctggaca

SEQ ID NO: 51656 - DNA, 2164 bp, Homo sapiens
gagatggcctggcctgcctccctgggaggtgagccgcaggcagtgtcaacttaagaagcaccccgccctgtcgggcagggacaaccccaagtttagctacacagttcttctgctgccaggcggtccttcattctggaaaccaatcctgacgtctcatcaggtccccaacccactccgccccctttgccttcttccttccacttaaagcctctgaaagtactacttcttagcaacagcatccccgcccccttcagagactgcccgaccaccctatccaaatcaagagacagaaattttgacccagtcacagtacaggcttattcctttccgtgctcactagcgtctaagttccaaaagtgttgcgtccgtgcctatcccctccgtgctcagctgatgcgtgcagtaactggtgcttgacaaagacgtggtgtacgaaggtctgcaggccagagaaacagctggggcagatgtctggtctcccacggagacggcagcaaacacaggccttaggccccagcagcctggccgaggggcttccacgaccgggatgcgccgtgagacagtgctcccggcgcccccgtcccgcggacgccctccaagccggccacgtggcctccgtcgccccgcctctctgcgctcgccccaagtgccgcacttggcccacggcccctaagcccgcgctggcgcacttgtgcctcagtccctaacggcgcgagcttctggcgcagcccgggccgcccgccctcccggcccctcgggcgtctctgtcgcgcccgactccttccggcgggggccgcggtactcacacgccagccaaggacgcggcgaccaaggaggaggaatcggcggacgcgggaagactgatgaaagggagggccgcccgggccgcgcacgggaaatgaagcactgggctctaccaagagccacgggccgggggcccgggggggggacgcgacccttgcacacgccccgcctggccgccaggaccctcgacgcgccgtgccccgacacttcaaaggcagaattccgttggagatgaccgcggaggccgctcttccccggaggagtctgcacaagtgctgggaacgggcggcagcgcgcgcgccccccctgcgcttcgcggccagtggtgtcgccggtgggggcgggtccggcagccggcaagcgccgagtgacgcacgaggcggccagcgcgcaggcgcggggcggggccgggccgggctaggtcagcgcgcgtgcgcccgccaagctgcgggacaaaggggagggacccgtgcggccccgcccccgagtgccccgccccgagcggctgggcgtgtggctcccgcgacccgcgcggcccgggtcccccccgccgcagccatgtaccccgcgggccccccggccggcccggtaccgcgccgcggccgccgtcccctgcccgggccccccgcgcccgccccagcccccgtccccgctgcacggccgccgccccccgcgcccgggccgcggccccgcgtggccgtgaagatggccttccgcaaggcctactccatcaaggacaagctgcaggccatcgagcgcgtcaagggcggcgagcggcaggccagtgtgtgccgcgacttcggcgtgccgggcgggacgctgcgcggctggctcaaggacgagcccaagctgcgctggttcctggagcagctgggcggtgaggtgggcactcagcgcaagaagatgcggctggccaacgaggaggagatcgaccgcgccgtgtacgcctggttcctggcgctgcgccagcacggggtgccgctgtctggcccgctcatccaggcgcaggccgaggccttcgcgcgccagatctacgggcccgagtgcaccttcaaggccagccacggctggttctggcgctggcagaagcgccacggcatctccagccagcgcttctacggcgaggccgggcccccagccccgagccccgcgcccggcccgcccgtcaaggaggagcccgcgctgccctccggcgccggccccctgcccgaccgcgccccggccccgccgcccccggccgagggcggctacggggacgagcagatttacagcgccagcgtcaccggcctctactggaagctgcttccggagcaggctgcgcccccgggcgcaggggaccccggggcggggggctgtggcc

SEQ ID NO: 51657 - DNA, 1825 bp, Homo sapiens
gccccaggaacccaaagcgggatgcaccattcactgggcccaggcaatcagatccactgattctacttggcggtcaacgcccctgactgctgctgggtatggaggccaggagcttacctcattggtgaggacacagatccctggggcctctgcctccagggaagggaaggctgcctggagcagaagaggcagtacctctggaggaacaccaggccttgggggaatgtggtgggtacaaaggcagttgattggccacagaaggcccaatcggggcccaggttcttcgagagggagagtctatgctggaatgtctaagaaaaggctaaatgcctacttggtagaaattatctgcttttgtcgggtacggggtggaaagattgggttagattttggtaaggtcgaacaggaaggcacaagtgtacaccacaacctgaacacagcaattaatcatgacagtggcagccaaacacaccagtactaagctcaacactagacatttatgtctcatttaacctgtacagctctgggaggcatgcggtactgccaggtttcacagggaagactcctgagactcatagtaagctatttcccgattgatcttgactcttctggaccctgaagtatggctgaaggcagagagtcaaaagtcacccagctctccctatccacaatctgcagagaggcttctaaatgcctggaggagtatatggtcagcataaatattccgggtataaagcagtgtttctcaacaggggatgattttgcctgtctcctccccccacccaggggacattcggcagtgtctggaggcatttttggctgtcacaacgtgggggtgctgctggcacaggatggatagtctggcccaggtgtccctagagccaaggtgtctgggggagaagccctgctgctccccatgagaggggctggcgcgcaaagagaaaatcagaggctggaagaggtgagcctggccaaggccacgcggccaggaagccggccacggaagcggcacctagccacgtgtgactcaaatcttcccgcagccacgtcaaaaaagtaagagcaaacaggcgtggccccggctgcgcccagcggagcggagacccggttggctgggcccgcgcccccggccccactctcgcggcaggacacctcccacggggctgctcccactccagaccgcaggcctagccccgcgccgccccacctgctctgatgaggccctgcgcgatggcccccgccatgcggcccgcgcccacgaagcccacgcgccgcggagacggctccgcagctgccatcttgttgcctcggacgccgctgcgctcaccgcccatccacaggccgcgccccgcccacagatctaggccccacccccgccctccaataggactcgcctccccgtccccaccctcgccgattggttactgggacggcacactccggccggctttttgtccgcactctacaagttcgcaaggcgcgggaaccccgcctctcgctgcttattggcccgaaagggctatgccgcccctcactgcccattggctgagagaaactgggggcggggccgtaaggggcggggccggcggggtactcgcgctcggagaggccggaggagcggggaggggtcccggtcgcgcgtgcgaggagcacatgttggttttccggaggggaggggtagcgaagcgggttgcggggctggtccagagcgtgcggtcactgaggccccgccgaccacagacggtggagctgcggggaagcactaggggcggagacccaggtcacggagagcaggccagggccaggggcctgagaccgacggagg

SEQ ID NO: 51658 - DNA, 2091 bp, Homo sapiens
ccatctgctaccaccttctggatggctttgcctaccagcccagagccccctgtcactagaatccgcatggatccctggggttcacccatgtcagttgcacctgtaatgtcaaacagtgggaggctgaggtcatcacgctctcatcctttggagccccactcttctgtggcaactggcacagagtgaggccctcagagtggggcatagtccactggcaaccagaaagacccagctggaccgaggcactccctcgtcgcagccctgttcccctgggagctctcagcctacagcgccgcaggggtcctgagctaccacccagcccagagcagctggtcccaacccacgactccccactaggccgagaaaaggtacattctactcccctctgactgacaagaggggaggcagacaaccttgggacgggggctcctggcacaggtcgttaacacggttcgcagctaaagcccgcatgctagggacaggcacgagacggcgcctgtgtgcagcccacgcccactcgaggctggctggtcctggagagccctggcgagccagattcctccagggcaggacaggcctcggggcgcagccaccctcaaggatcccatcctgggagccggaaacctgctcgggctcccccggcagggccccagggccagcccttaggggagggggccctgcgcaggcgtcgcgcggctcccaagcacgcggggagacctcaccgcagccagaccctctaccacagccccaggctgcccccatgcccctcgatcccagacccccacagcgctccctgactctcacggagcatccagggcccagggcgcggctgagtccggtgccacctcacctgcgtccagccccaccgccggctccccgacagcggcttccggccgggtgcgctccggctgcccgcggagccaggtggggggcggggccgggaggctggggcggggcactctgggaaatggagtcccgggggcgcgcagcgtcccgggcacagctgggacttggagtccgcggccgcaaagccgcttgggaagcgcagtctcgtccgccggccgcgcgcgggcgggtccccggacgaagtcccgggccgcaacctctttagcccgcggggcgctgggcccaggccctgcttgggacggcggaaggacacgagacgagggccagccggcagcgccgcgcgggatgcccgcggcgtcggaaggagcctcgccggcgctggggccaggcgggcttacgctgcggcgtctccctttgctccccttccctcccagggttccgcccccgaatacgcagacctcgcgccgcagcctcttggattccggccgcgatgaggagcccgggttgtcgtcccaagcacttgcactgtcacccgcgcccatgggtacgcccaggctcgggcagcaagcagcaaacaacaccagagttacggcgaatcacgttgggtgactgtgggtgacagcgggtcacggcgggttaagaaggatcacatcggatcacgatgggtcacggcgagtcaaggagggtcgcggcggctcacagtggttcccacggtcgcgctgcgagccgccagctgctcctgccctcagctcagagcccagtcctgctgcctggggcgggagggggtggcagcgcggccctgacatcgagaggccaccgtcatcgtcttccatcgaaaggcgtttaaaagcagtcacggccatgcgcggtggctcaggcctgtgatcccagcactttgggaggccgaggcgggcggatcatttgaggtcaggagttcgagaccagcctggcaaaacatggtgaaatccggtatctaataaaaatgaaaaattagtcgggggtagttgcgcgcgcctgtaatcccagctacttgggaggctgaggcaggagaatcgcttgaccccaggaggcagaggttgcagtgagcccaggtggcgccaccgcaccccagcctggacgacagagcgagactccatctcaaataaataaaataaaaacagtcactcaggctgacaagggtaagggaaatgtggtccgcccccaccaccttaacatcttgctatgaaaggacgtttcatgatgata

SEQ ID NO: 51659 - DNA, 1792 bp, Homo sapiens
atcagggagccataggttgcagtgagcagagatcacgccactgcattccagcactccagcctggtgacagagcgagagtccatctcaaaaaataaaaataaaaataaattgagcgtcattgctaaaacaaaattcctcccaatcctatctaacaatttaggtaaacaagtttcctcagtgctagcagaaaaatggaaaaagaaaacccaaaatacgaatataatgtttttttggtggggggggggggcaggggaatgtaattatttcgattatttcggactgtgactcattctagcaatgagtaatgtctaccaagaatcaatgagccggcgcggtggcgcgcgcctctggtcccagcactttgggaggccgagatgggaggaccacctgagcccgggaggtcggggctgcagtgagccgagatcgcgccactgcactgcagcctgggcgacagagcgagaccctgtcttaaaaaaaccaaaacccgaaaaccaaaaaactccacagcgcgccgcttccccacttctctggggcgcagagaggtgaagtttggccctcacggtatttacttcccctggatcctcgcctcctgagaagctggtcttgggctgcggtcggacctcgccgcgagctccagacccgagtttccgagcccgcgcttcccggcccgcaaccctcccaaccgcgtagcaacgccgctcctgccggacacccctggcccctccgggggtcttagtccccgggcccggaagtccgcaccactgagaggggagccgatccctggcgctcctagaacggcgcaggaagtttcccaggcggggcctctcgcgacttccggtcgcggcgggctggcggcggtgcaggctttgtcggctgatctgtggggcccgcgccggcggggtccagtcagcggctgcagggtcgggctcgcgccgtcctctccccgcccgcgccgggtgagtggcgcgttccggacgggggcgggcaacgccttagccgcagccccggctggctccggagcccggccgccttgccagggcacagtccgccgagagggccgggcggggtccgcaggccgctgcccgccccgctagggcgtccaggagcggggccttggctagtcagtctcccggacgcagccacggccgcccccgcgaggctgcggcgtctctccagcgagcccgcctcgggcccgagcctggggtcttgtccctgaggagcgccgtgtgggtacccctggttccctctccttccccccgccctgagcccaggccggagagccgcgggcttgagtgtccgtgtcgcagtcttcaggtccgccaggcctgcgtgaggttgatgccgcagacatgttttacggtgtggcaggactgggtgtgggcgttcccgcggctgtgcctgaaccctgcctccgctccctggggcctcgaggcctctcggtgctggaggagatgcagcgccagcatcttctgtgctgttggggataggggtggggagggaaacatgatgagcagaattagaattaagtacaagacttggacctggagaattcccagatggggagaggtggtgtggctacgctgtcctgctttttcttgaaggtacccttttcccttcgcgtctttaagaatcccagtggcgttctctgtgcttctgtcaaggctgtcttgctcccttcacacacaggctacgtcatggtccagggactctcagggtctgggcagcgcctggatgctggcctcagactcataggtagttggtgtgaagcagctcagggagctgccgagcttgt

SEQ ID NO: 51660 - DNA, 1235 bp, Homo sapiens
caggagagcaagtgacagtctgttcacacctccagttaggttacagttcactttgtaggataaacctttaggccgactttaggttatgagggccgggatcggtggttcacgcctgtaaccccagcactttgggaggccaagtcaggcggatcacctgaggtcaggagttcaaaaccagcctgaccaacatgatgaaacccccgtctctactaaaattacaaaaaaatcagccgggcgtcgtggcgcttggctgtgaccggggcggggcctgccggctgcggcggaaccacaagcggtgcggggcgaggcgggcggcctggacggcctggaaggccagcgcgcaccaccgagacgtgggctcctagaggggccggaagctttcggataacaacttccgctcgggaagtttgtaaaagtctgggctaccggcgcggcgtagtggatgcagcatcctagtggaggacgcccctgtggtgagtgcgcccgtgtcccccgccgcccctccgtccctgggtcgtgggctgtcaaaccttctaattctgcggccgccccagggctgtgagacccagcgtcgcggctgctgggacagaccggggaggctgcccgtgccctcggctattcgggggctgttcttcagcttcttccggctcggcctcctcttctctcctcgctccttacacttgcaggtttgtcaggacccggttgcgtatcctcttgaagctggtttcttcctggccgaccccgtccgcgatcgtgaccttagttatccctcatagacactttccacacctgtgtctccagccctatcgctccgatgagacccgagcgcttagacttgattcataacacccaaagctccccggccccaggctgagctcctgcaacctccacaccccaccctctggtcctcccaggcattccaccgcgaaggggaggaggcagaaacccgagattcgcttcttctcctttcctgcccacgcccagccacacagtcactggtgcgttagctccataactgaaccatttgcctccttgccattcccaccctgtaagtcccaatcctggccgtcttcctctctcacctgaacgcctccctgtcttctccccacccccatcctgttttgctgctttctcatttgttcatcacagaggatcttttataaaatgtagcttagccaggcaaggtggctcccgcctgtaatctcagctcttgggaggccgaggcaggtggatca

SEQ ID NO: 51661 - DNA, 2282 bp, Homo sapiens
ctgtcccaacatttctttgttggggcaccgtcctcatggttgacatatggggctggttagggcacaccgctctggttgtgccaggggcagatcgaggccaaccacatgggggtgaggtgtaggcctgtctggctgggccgaggagcccactcaccattgccagcctgtctgtaggggcggtgtctgaccatacagggcagggggaacaaccctgctgatgttgtttgagggtacttcccgacactggggggacactctagaaaggacccccactgtccctttggatttcagtgtccaggctccaggctgtgtgtaatgggggcagggaccatccagacagtggaagcccccgtggccaggagccctcccagcagacatgcctcgtcctcacagggtgatgcccagacctccaactgcttcattcctcacgtcgtctcctttcatgggtacgtgtctcctgggctatggacggggctgcagccactcccgagcccaagatggagcaccccagtggcctgcatgcccacacatttgcctaccaaacgtctgcccaagggagggagggcgcggaacccacccatgggcaatgactcagcacgaatccactcttctgcttgctgacccctgacctctgactcgaagtcagggccctcagctggccttcaaggaccccatcctctccaccctggcaggaagtggggttcctgagtatctggaaggaggaccccatggaaggatctggagttcctacacaaagtggggtgaacctgtgccaagttccgatgggcgcaggagggcgcggaggctctaggcggcggaaaggtggggtgcggaggacggggctcacagaccggaagtcgctcagtgataacttgcggagtgggcaccccagcccccaacggggtcagtgcaccctacgagctcgcggctgcggccgctgggtgccctatccgcccaccccagcccaggaacgtgggcgcgaggggcagcactcccatcactcgccctgctcgccacgcggggatccaggccgcaccctggccaccccagtccacggcggcccgggcggatgtccccagggaagggtccaggccgtgcccagcacccagactccagctaggccgcgagggcgggagcgagtcgggacggccgggcaggctcgacccggatcccgggccccttccccctcggctcttttcgggccggcgtcgtgcgggggcgctcgcgtccatatccgcacagcggcgccccctgtccgagcagccccgccaccccggccccgcgcacgcggccgcgctccactcccaccgcccctctctgggtcgcgcggccccggcccaggtgtgggcgcaagggtagcccaagtgggaccgcgccaaggggcgcccgccccccgcctcgccccgccccgctcgggccgggggaggggggccctacctggccaggtgcgcggggtctcggcacaggggcagcaggagccgaccgccgcccagcggcctcgcggtccggtcggtccggcagccactccctgccgcggcccgcccggcctgattcacgcgcccgcccccgccccgcccgtcgctcctgcctcctgcctgcccgggcagcacctgggggcggggcagccccacccgcggcgcgcccgcattcctgcgccccgcgcccgccgccagccccagcccgcgcccccggcccgcgccccgacccgcccgtgccctgcggccgcgcgcccggagaccccggcccagcgccgccggagaccgtgaggcccgcacttcaaagaccccgacccccgggagcccaactgttgacccaaggctcaaagttcccagcctgacccctgaccctcgccccggaagtcggggtgactcggaagttccggctcagtcgctaggaaacgagcgagcccgacgccaggggcggagctctggcctcctcgccgagttgggggaggcaggtgcgacaggtgaggacggtggggcggcgtcgagccccgggcggggccgggtctgggagccccgagagcacaggggatcccctcaccacacaccggtctcccaccgcaccagcgccccacacgtagacgaggaccccgcccacacagaggacccccagaccccaacccccaccacacacactgatgcccacaagtacctggggtcccccatctttctccctcaccccctcacaccgatgcccacacttgtaggggactctgccgcagtgacccccccatgcacatgcggaccccgaatgacctgtgcctcatgtacaccaacccc

SEQ ID NO: 51662 - DNA, 2018 bp, Homo sapiens
cagtaccacaggcacagtgctacgcgcgaggcctgcaggtggccacagaggaccgagctgtcactgccacggccagaacagggtcacattctttgggacacccaacccctaggtactgatcacccagcaccccatctccagaaaagaaatactttttaatctgctttctccagcctcctttcttgtagcagccttaggagagcacctgaccacgagaagcaagggtaaagaaagggggacagcgaacagatccgagagcaaagagtacatcaagagggctcccccactcacccctgcacccagcaaaaaaggagaggaggtctggacccacctccagagcggcccaagaagctagtactcatcagccacctgaatccaagttccaccctaaccccatccacctccctgaatccccacgggtttcactctgaggctccgcctccaggctcggtgacaatcgctatccccaggcaagcacctgatgaccgctgccacctgcgccagccagggcggctggaagagaagggtggggctggctggggtggggacctggccagtgcaaaccagcagggccggctggaggctgcggtgactcgcccgggcagattctgccgccggaggaatcacgggctgggggcgcgcctttgggcggcaggtgcgggcggccgctcaccttgggcagctcgcgcagctggttggcgtcgagcagcagctcctccaggctgcggctgtagcggtagatctcctccggcacggcctgcagcgaacagtgccgcttgtccaccgactccacgtgccggttgcagcgccacagcgggatgcacttgagcatggtgcgggtgggcggcgcgggctccggcggcggcgctcggcgggctcggggccggggggcggggctcagtccgcatgggcgccgcgcatggggagggggcgcaggcagggggcgggccgcccgagactggacggggacgcggccgcggccggcgctgggcccggcccgcgctcggaacgctcggactgcgggcctgggcagggggcgcggcccggcgggtctcagactcttaggaagcgcggggagcggcggcggcggcggctccgcatcccgcttggtcctgctcagctcgtcccgcccgctcgtccgcccgctgtgccgcaccggaaccgccgctgcccgccggactgccccgccgacacccacccggccgccgcgcagcccgtcgggaagccgagtccggccctcgccgcctagcacgcccggactgcggcccccagaaggccccgcgcgccgccgcctctgaggacccgtagcggcaccgcgcaaagcgtgccgggaagccgggcccgccccgcgcgcgggatattgggagctacaatccacgagaggcggcgccctccgccctccggtcttcagcccggcccctggccccgcggcatttggccacgaatcttaacgcacagcctcctcccgggaagcgaccatgcccgcccgcccgccttggacggccggctctgcggcacaaaagcactggcagcgcgcgctgtccagcgggtcgcggtgtcccggtgcccagccttctctcagcaccaccctgcggggacggctgcgagcccgcgcgcgagagcctggcgccccaggcagccccgcccacccagccgccgccacccgcgggacggggcccggggcgccaaccccctgcccaggtctcgcccacggcaggcccctcctgccaacaggaagcaggtccagagacccccccaaccctgcctcctcgccctagaccccctaaggacacacgcccaggatcggtgacaggaccgacggcagacacacggacgttcagggccagcagcatccgcacctttatccgcactgtaggctgggctgggcagagcgcgcctggccccggggacaccactgtatcactataaaacccagaggaaacaaggaacaagtgcaagtccggggagagggaccactgtcacgcagagaggtcactgttatcaaaacgctcctggtc

SEQ ID NO: 51663 - DNA, 1211 bp, Homo sapiens
tgagtcccaaccagacctgtgctttgacttgcgcattgcttcactgttttatttaaatgaaaacacagaggtctgaaatgaaatctgtccttctggctcctcaagcactgcgagttctgggaagcttggcccacccttcctgcaagacgctcatgcctaagaacgcgcgagctccaggccccggcgtccccgcccagccagactgtcaacaggccccgcctggtgcttggagcagggcagatgcagagggcaaaggccagctcagtgcctgggtggggagggtgcagggctggtgcggggagagggccgtggtcctgcgggcagttgtctgcccagaggcagagaagggttcccgaggttcctcccgccccgcccccagccagccctctctgggcccagggacgcacaggcaggcgggcgggcgggcgggcaggcgggcgggcctgagggagaggatgcttaaggtcagtacctgtggaggtttccatttgtctcccgctgccaccactgccgccgccgccgccggctcggacccccctccttgctggccattgacctgctgcaggcaggaaggagatgttgtaacgacaggcacaccaccccaccgcccaggcctgctctcctcccgagctaagggctgagctcctcacggataagcaagggaggccaggcagggaggcattcccgacatgaccccccagcccaaactgccctctcttcacacccatcagcacgcccagggacccagtcagaagcagagcggagcatgggctgggccagggctgccagcgagtcccagcggggatggggaggagggtagagagagctgtgctcctgccccaggcaaaagaaagccatcctctcctgccggcaggctggacggccaaaggaaccggctgggtgtcccccatgccctcctgaggcagcagcggtgccttcctggcaacctgtacacaccttggccagcccacaactcagccccagctccagtgccttccacaggctctggcccagcccaggtcccagttctctcctgaagacacttttaagcagcatggtgggcaggggtctggatgcgcaggcctcccttccctggcaacagaaccatccagagctgtctcgcaggaggacggccaagaggttagccctctgcactcagtaagacccacacctaagggggcacaggaaggaggagcagctccacaatggtc

SEQ ID NO: 51664 - DNA, 3350 bp, Homo sapiens
ctaggggagtcaggcatccactctcctcctccaccttcccatgtccagtccttgtctctgagcctcctcctccttcaccatcaactctctgactgctgcctgaagacagtcaccaggtcctcaacccttacatcctttctctctggagtgcccctcaaaggtcacttactcctgtggcttcaagagaaaggacatagtagaaagagtggagttagccagtcctgtgaatcacacactgggctgccctcgcaagctgggtatcttgtgtaaatgcctctctccccctagtaactggtttctgcctcagtgggacatgggaccagcccgcccgctgggggcctggcaatggcagtctaaggacactccctggtcctgccagtccagccttcagccatttgcccaagctgtcttctcaaacagaccttatcccatcccgctgggtgtgggctgggggaagggtgacaagtaatacaggggtaaactgcggctgagaaaggtccaaaaggggattaggtcctataagctaagtggtgagaaggaaagaccagacttcatcgtgcatgtgttgtgtgcatgggtgttctccctctacgttaataacgcctgccctgcccggggaagtgggcactgagcagagcagggggcgactcactcctctggatgcccacgcagctccctagggcgcccagcaaatggcaccctgggtgggaactggcttctggtgcgcactagacctccaactgcctgtctggttccccactgcgtccccagatcctcccgcagagctggggacaatgcgatttctcaaaacacgtaggatgagagcgcacgtccttcctttccacgtggagacaagagaatggagataaccagatccctctccagcaccggagaacgaattcacagctgcaggcgtagtgagccaaggccgccccatgctctgagctgcaggcccctttctacaggtcccgtccccttctgatcccatcaacccgaaggcccacgcgtcacccccagaaccccgcttccgtcgtgaccacggcgcacacccccgtcggcaaagggaggacgacgacccccgcttgccggacctagcggacaggaacgcaaccccgccaggctcgcccgcaagggccacacgccgcgcccaggcccccgccccgccccgccggaagctggggtccgcaggccggaagctgaggccgcgagccggccgccggcgcgcgcccgccccgcccccgcctcacgcgacccggggacacgagggagtccgcgcgggacctgggaagaccgccgcattcttgggaggccctccgcgcccaggctgggtcgacgacccggccccgcaagccgagggccgcccgcgctcatgggggggctcacttacgagagctatggtcgccgtcgccatcttgcgtccgtcgcggcctccgcgcgcgcctcccactcttgctccttccgctgtctcgcgcgatctgggtgccggtgcacggaactctcgcgaggaaggaggtaagaacgcgcttccggggcggggaggaacggtaaacgcccccgggaggggcgacggaaggggcgtgctcttggccgggcgaggggcgtggcccgcgcacctcgggcgtctaggggcgtgcgccgcgggactcgagtcgggcgtatctctccgcgtggccgacgcgggcgtgcgtagtacccttcgccgcccgtcgcccttgcggccactgctacgcttctcttctctgccttttttggagaaaacgctgtcgcgtgcgtcgtccagaggctctcccccaggaggcaggcgaaagagcggggccctcctgggctggaggagtctcgggtgatgaaaggcccgcgtgtttcaggctgacgtcgtgagatgcgtcgtccccgcgtcgcgacatccctgggaccgggaggccccgttcaattggcagctttttctccttccagggaaccgatgaccctaggttggctgacatcagtcgctagacccgcagcccgcaggccccgttagtccctgaactggctttcatggcccaaggtgtctgtcagtactgctgggaaagctgcctgtcctggacatttgccatctgctgcacccagtcccgagaccccaactcggtcatccgaagaagccacatctgtaagctcaggcaccttcagctgcctaaggccacaaggcatcccgggcaggcctcctttcaaccctgggaacatttagaatttaatacagacacttctacttaaatagggcagaatattccccgcctccctcctgaaaccttccaaaattataggaaaggggttttataaagacaaaccctgcaagggcaaagagctgggatattgcagagcttaagaaaggtggacagcgagagctactccagcccacttggctatggaggccagtgtctgagggtcgtgggtgaaagcacagctacagaaaggaaaccccagacctctgtccctacccaccggggctggcaggcactgcagtgtctgagacgtgagctccaggagaggagctctgaggccctgctcaagcaaggccctgtctgaaagcctgggagtaagtgagactctgggtcctacccctgcctccacccctgggctgggtctgaccacccgcatgccatcaggcttctcagagaagagggctcctctctgcagcagctcctagctcaaaagaaaagactggcagggcacctaggggtagagtgttgcccagtagaatggcccagccagatccctggcctcgaagctcaccaggtcataagccccagccactaaaagcatctcactcttcaatgcagctggacagcccaggatcaccagacacctgagaaagaagaaaagggactcagaagaaacagagacgataaaggaagccgaagaaaaatgaaaactaaaatgccattctcagtcaataaaaaggaactgggggctatagagaaagaaacctcgggatgagaaagagctcttagaaataaaacatgaggggaaagtgagcaattcaataggcttttaagatgaagtcttccagaatgtataatgacagaaccagatagctggaaaacagaatagcagtaacacaggtgggtgctcttagggctagcctggcacacaaggcctccacaatggagggggtggatgggaggtggggggctggtctgccaccaccaccaggggaagccacaggcaccaccctctggggacagcttcccttggcaataatgtgcacgcaggatgcatggtgcccaggactgttcttacacacattcattcatgggatcctcacaacccagtgctatgcaatggatacagctgttaccccatttttactgatg

SEQ ID NO: 51665 - DNA, 4502 bp, Homo sapiens
tccatataaaacctgattgcatgctccatctactgagatagggaaaaaccgccttagggctggaggtgggacctgcgggcagcaatactgctttgtaaagcattgagatgtttatgtgtatgcatatctaaaagcacagcacttaatcgtttacattgtctatgatgcaaagacctttgttcacgtgtttgtctgctgaccctctccccactattgtcttgtgaccctgacacatccccctcttcgagaaacacccacaaatgatcaataaatactaagggaactcagaggctggcgggatcctccatatgctgaacgctggttccccgggtccccttatttctttctctatacttttgtctctgtgtctttttctttcctaagtctcttgttccaccttacgagaaacacccacaggtgtggaggggcaacccacccctacaaagacaaacaggtaaagactccacaacttcctatgcaccctctcaggaaacctggaggatggtccttctcaaacagggcaaatgaaggaagaggaaagcagtacaggacactggtgaagagttaacccatgctgaccactgggctgtaagtccaagaacaagtagcctgggcagggggcttgtatggtgggggctccaggaaaagaagaaactgagcagtcagttatgtgatgagtcctaagctgtgacaggatgctcatgcttcttcaggaaagtctaaagatgaatcaatgacaaacacatatagaaaactaggcaaaccaaaaaaaaggcaattattaactccagggaaaacaaaaagttgtgcaagaaatgccatcctagaacaccgtgttctctcctgagacgtgtggtaatgaagctgtaataacacccatgcagctatgatgcccgtaacactggaatgatgccgccaggagactgaggcaggtgaccgccctcctcccagaggatgccagccagggacatctaatgtagaaaaacgaataaacaggactaaaagcatgctcatggttttgaaaaacatggatttcaaatgcctgaagaaacagttaagagagttgaatttggagaggatcagagtaggagcctgcatttattatttattattggcctcaaaaaaaaaactattctactttaaaaacaatacatatataattctgaaaagataaaatttaaaaggaaaaattcaacagagacatgattaagtgcagcaatggtggtattgatgcttttaagttcagtttaatcagtagtacaatgttatgtatttgccactgaaaccatttagaaccatgcataatcagacagtttagcatgagggtttccatctaggatatggaaattactttagattgctaattttgagttggaaggcgtgagaatttgaataattttgtaaatagtattggaatatttaagataactgagattcacgattttgtacctttaatttatttgatatgcgttagtaagtcttgctttggtttttggcttttggttggagtgctgtggtcagcagaatgccacccttccccaacaaaagaggttcattccttaatccctggaaccagtgaatgttagtttacatggcaaaatgtgtcctgcagatgtgtttaatattaaaaaccttgaggagggagattatcatgtattatctggctgggcccaacctaatctcatgagtccttagggacaacctttcctgtctgcagggaaccagagaaatggttcgtgacacagactgaacctgctagctctgaagatggaggagggggccaagagccaaggaatgtaggcagcctctacaagctggaagtggccttagtttacagtcagcaagaaagtggggaccttggccctgccaccgaaaggatgtggattctgccagcagcctgaaggagcaggagacagagtctcccctagaacctccaggaaggaaggcagcctgccagccttgattctagtccagtgagacccatagtcagacttccagcctacagaattgcaataaatttgtgttaagtcactaagtttgtggtaaattttacagcggcagtataaaactaatacagtggtgtgccttcctggttgacatttgaaatgcgtttagaaaggcatgaatgcgctaatgtatacatacagtttaaaatgcttaaggccatttcactaagtttggaattggaggagaggcaagccaagaatcaagaggccaggaaggcaggggtagaatccatgagggcatagaaatctctaagactgagccaggagtggagtgggagagaggcagggagccaggagctgacatcctcagaggcccagggagcagctgccccagggaggaggtgcgggaggtaacatggaggggctgtgagtctgaggagcagggaggatgtggggtccctgacgcctccaggccagggaatgcatgagagaaaaagcccattggaggggctgcagtggccagaggagatctgcagaggggctgcaagttctggtctcagggtgggtaaagggtcaaagaggtggctctagggcagagctgtgtgggaccaggggctttgctgacaacagcctcaactccagacctctctgtggtctgtttctcctgccaggtccctgttgtgcccagtgccatgcctgacacctgcaggtgtgtcaccgctggcttgctgtgcaggctccttgtgtgggtctatggtgccagcaggggatggctgctctcccagaccccatggagcagttccctgggcagaggtctgtccagggctgaccctcacccccaagccccagagctggggttccctacagggcagcctcctgcatgctgaggaggcagtggccccggccaggcagcctgggtaggaactcagggcggagaatggaggatatgggaaggggttctgggggcaaccctgatcctaaggacctgggaggcctaacggctcccccacacccaccccccaacccctcggcgcccaaggcagggtcagccccactctcaggagacggggggttccttcactaccggggcctttgtgctcccaggcgcatggaggagggcagccccacggtgctggagtctccccaacatggcctgcccaggcagcaccccggcatggtcccctggggctggggctccgggtcaggcctgggtcccacggtacttgaggaaggtgctctccaggaaggcggccagcttcatccggtcgtcctgcggaaggagggaggcatgggggacggaggggcgcggcctgccccgtgcgccccctccgccaggccgcgccgcaccgcccagcgcacctcgtggaggaagccatagtgcacgagctccgaggcgaggtcctgggcgctgtccgctgaggcaatggcgtaaggcgaggcatgaggccgctgcccacccgccgcctggggtcaccgcccgccgcccaagtcccctgcccagcctacttgggagcaggtcgtaggtcagctgccggtgcagccggtcttccagcaccagaagcagagtgagctggggaggcggcggggcgtggtcggctgggggttcagggctccgccacgctcccgccttccccacggcagcgccgccctcccaggccccgctcacatgccagcgcgccttgtcctcgcttctctccaggttgcactgcatctggatgacctgcagcgggggaaggctgggactcacaaacccagcagcaagaccacatgccgcggccccaaaggggccgggaagggacagcaaagactggaaaggggggaatctctaagaggagcccatctcactgctagtggcttggcaagctaaggaaagcttcgagaagagtcgacattaggggctgggtactgaaggctgaataggagctttcaccgcggagagaacaacttgaacaaagagggaactgtgggcgtggggaaagggaggttgggcgggacaggaccgcgccgaagtgcacggtgcctgcgggatcaggcctcccagagcctgggcgtcagctgaggactcccatgatctctgctggcagccaggagcaggcagtttgcctgttaggacatgaattctggctgcactgcaccgagagaggcccctggccaggagggggtgctgcaggaaaagtctggggagacaccaggacatagatgtccgggaatcagcaccaggtgggggatgggaggggtggggggggggtgggaggggtgcgggggtgggggaagattgctggcagggtggaagagcccgggtgagttctggaggaaggatgcttggagtaggttcagggcaggcagcaggatgcaggggaaggatctgaggggacagggagcctcccggaaaaggagagtgcccagcctgtcctataacccccatgacccccacaagggggtcagcctggatctggtctctggcagccaggaggagagctgggctgtggggatgcaggccctaagagaaggaggggcacctcttatctggctgttagaaggtctgagggatggcac

SEQ ID NO: 51666 - DNA, 1642 bp, Homo sapiens
gctgccccaaccccgtcctgtccccgtggctgccccagcccgctccccatacccgggcgttcatggccttgtggttcttcttggtctttttgaggaattgcttgaggctgcctgatgacacgtactctgtgatgaagatgacctgcacggtgcgagctcaggatttccaccagctgcgggttcgtccccatgcccgccccacctagctgtggtctctgcctgcccggggccttgcccgtgctcaccctcgcgcaggcctcagaggtatccagccagtacttgtgcaacttcacgatgttcgggtggtccaccagcaccagctgctcgaacacggtctggatcttctcctggggagggagggtggtcgctgggtggtcagcaggtggtcacccaagcaggatgaggagggggcagcggtctcacctcgtgcgccgcgaaggccttcctgtctccgaagtggagctcgttccacaccacctctaccccctcctccgtgtccatggctaggaaggtgctctgaagccctggcatgttcccttggtttacctgggggtgaataaagggttatgtgtgccctggtgtgtgtcagggttgtgggtgaggatttggtccctgtccacacctttccagtgggcccaagcgtgggctgcaggccctgagccactctgcgggaaggtggggcttggagggtagctgcccccaggagccaagggctcctatccaagggctgggctaaggggatttggagcaggtttcagggggtcgagggggatccccaggaagctagcggctgagtccagaggcatggggaggtggtcctgggaggagactggccctcagggagtcccagggcgagcgccaggccaaaggggtccaggggtggctgattcgcgggccgcgaggggccgcggagaggtttccagccgccgcgctctcccagcgcccccacgccccgcgcagcctccaggcccctcccgctctgggagggcggtgtcaccccgtgccccaacccccgcgcccacctgctcccgtcgcttttgccagcgaccacacgggctttcctccaggatgtcgctctcgtcctcgctctcgtcctcccgctcccgctcccgttcccgggcccgcctcggcgccggctccggggccgccatggttcggccagcccaggccaccgccctctgcgcgatccgccgccggcgcagcctctcccggcccgccctggcctcgcgcccagcagcccagcctagagccgccgcggcagcctagagccccagccccggctctgggaattgggaggcgcgggcgcgcggcggacgggcggggcccgggggcggagccggcgcgcacctcccgagccgcctgtgcctgccggagccagagcagagcttccccgagagctgccgagcccgggccgcgcccaggccccgcccccccggaggccccgccccgcgaagccccgccccagtccctgtttcctcctcgtctcccaggcctgctccgcgaagcccctccccaggccctgtcccctcctcgtcctccaagcctccttcgcgaagccccgccccaggacccgccccacccccgcgaatccccgccccgttttagtccccgcccccgcccgttcccagggtcctccgcgaag

SEQ ID NO: 51667 - DNA, 536 bp, Homo sapiens
cgccgcacctgcccgcacccgccgcacctgcccgcacccgccgcacccgccgcacccgccgcacccgccgcacctgcccgctcgccgctcggtccgcagtgtctccgcgcgcccgctccgcccgcatttcaagccccacaggccccgcccccgtctagggcggcgcccaggtcggggccccgacgcggggcggggcggggcgggcaggtgccggaaaccccgcgcggcccgggcctggcgcttgcaccccgggcaaggggcggcggctgggcagccgggaccctcccctcgtccccagcagggagtcaccgcgaaggaacgcagggcgggcgcggaggcgtcctgtgcccttcagaacagctttttttttttgggaaaggagtttggagtgaaacgcggaccggccagagcggcggtttctatccccacaagccactaatgcggtgcgggctggtgtccctgcctccagccccgaccccaccttgtctgctcagcttcctggggacgctgcttcacgtcgtgtgtctgctgggtcc

SEQ ID NO: 51668 - DNA, 1691 bp, Homo sapiens
aggtcaaggcaggaagatcgcttgagcccagaagttcaagaccagcttgggcaacagagcaagaccccatctctacaaaaaatatgaaaaattagccaggcatggcggtgcatacctgtcgtcccagctactcaggaggctgagatgcatggatcacctgatcctggggaggtcaaggacacagtgagctgagatcttgccactgcactccagcctgagcaacagagcgagactctgtctcaacaaaaccaatcgtaaaaataataaaacaacataatgcgacaactttagaaattagattctctcctcccctccaggatttgttgttgtcctgcttgcggtagtccgacacaccttcccttgtcaacgccctgcacgtgcggccacagtgacctacgtatttcacgagctatatttccaccccttctcttggacacaaattcactgattcgaaacctgcttcccagttatcttggagacagttttgccaagtgttttgcataatgctggtctctgcccttctgataagtgctttgcggtcaggccactagtcagtgtcccgtggggtttgcagtagcagcatccccctccctggcctcaaagtccatccactgcgataggtttgcttatgtcacgttcacaagccaccccagcgtctccagcttaaagccacagcttgttctcactcgcactgcatggcaggggttggctgagtttctctcttccgtctttgcttcaggacccaggctgatggaatgactgctgcctagaacattgcaggtcttcccagatgagacacagaggctctggagggtcgtgcaatagtaagtaaatgctctggcgtaaaggtgccatgtaaatacctcctctcattcctcattggccaatactggtcacatggcaccacctcatgactccccgccacggttcccctcccggccatgatgggaccaggcagtccggcccctcccacccacccgaagatgaagcagagttggggagcactgctagggaccaccactcccctcattccaaatcatcacctttattccctctgccataattttatttattgggtaggataatttaccctctaagtaacacatcgtaatatttagtatagatgatcgctttccacagacatgatttggcagcttgttattaaattttgctatgatttctgccaaatgaatgatatttgccttatcccacgtgtgcggttgtttgaatggtcttctggatcctagatactgcctcaccggaagctgagcctggtacacgcagagcccacaggacacccacaagagtcacatacctgccattgaccacctctgggcttttaataccgaaacttcaaagaacttatgtgtctctcattacacttgctagcaatatttatacaggaacatgttgtatttatatccccaaaaatcagtaagagaattttaacaaaaccatgtatgggaaaagtcttaagtcacatttcagaaacaatgtgtagtggttgtaataacatgggggcattttgcaaagtttgagaaccaacaaagaggcgtgcgcacagccagggtggggctggggctcctgcagagagatttgctccaccctgcgttcaggacgccacctgcacgaaatgttaagttcacctgcgtgtcgtgtgtgttactggcatacacgcttccctggtttat

SEQ ID NO: 51669 - DNA, 2091 bp, Homo sapiens
ccacacagcaggtgcccactcccctagctggggagggctaggctgcaccctgcacctcccggagctgggatggagcagagtggaagggcagtgggcataagaggaacccacaagtgtaccactaaacctggcccagaacccccaggcctggaaaaggctgggggtcgagctccatcgatggttgcaggctggcaggtggggcctctggcagcctggctttacactcagtggcatgctcaggccaggttctgcccacccacccctagctgcctgtcgtcctgccagcctgtgtgactcagctgccgtgccagcaccaggctctgcctgctcagctctcagatttgtggtttcctgtgcagccaggacaagcagcgggtgagtcagcctgtgctgcgcagaagcctccccagggcaggcaccggggcctgcattcctccacagggaggctctgggccctgcccagccagggccagagggcacggataggtggcctcagagagaggcctgtaccctcaggccacagatccagtccagggttgcggctggcaggaaggcacccaggtgccaccatacctacggcgccagtcacctcccaggccacgccctagccagaaagcggatcaacccgccagccaaggagcccaggctaccctggaaactcctgcagggggtgggggtcctgggggcagccgttctacctggaagtgcagaatgattgtccagatgaggccaagggtcagcttggggttgccgtcagcgatgtcatcattcctgatgttcaccagcttcacctgtgagcgaggggctctcggtcacggcccacagggcggggctggcttggtgaggggtctgggtggggcccagggcctgccgggcagccttacctggcggtgccggaggtagtccagggcaatctggacattctgcagcttgtggaaacgcatcctccccttctcccggggctgtggggaggcacagtcagcacccacagtgcagctgcagctcccgggccccaccctcagcatgccccaaagcgccgcagcaaccgagccaagggtcttccccagggggcagcagcccctcatcccaggttcaccctcccccgcagggaaagggaggccaccggcccaggggccaggccaggcccatcagggctcgggaagtccagcgacccaggctgagggaaggaaggaaggggtgggaggagacaatagccaggaagcctcgtgtggagggcagtggcactaaagggggggtcctcctgcctggcggtggcagccacagcagccaccggtgggtcccaggccagctctgggcagcacggtggacgggcagcttgacacccaaccacctacccgcccaagagccaggcaggggttggccgacgggccaccagcccccagaaagccgggctccacggtcttggggagctcccgtgccgctgcagccggcaggcacagccactcaccaggcgtgagctcctgcttacgtcccgctccctcggctgcccggccagagcagggcaaagggtaaagggcagaggtcaaggttcagagtccaagcagcagagaaaccaaagcaaagcggagcatgaggttactgtgtcccgacgcggagggcggcaaggcccagagcagccgaggtccgagggttgcggccactcccaggccaggccctcggctgtgatgcccagcagcctgggcgggaggtgctgccagggacgaggccagcctgcccccagggagaaggcaggaggggttgagctggattccaagtagagtgggcggccggagaggccccaaggagggaaggcaggcagaggtctccaggtggggcaggcggggcccggagggggcaggggcacacgtaccaggctgtcccccgagaggacctccagcagggagatgaggttgtggccatcgcggaggtcttcatacaggtcactgatgtgcctctgggcctgtggggacagcagcggctgaggtggccagtcccccagagccaccaataggccctgagtggctgatctacagagtgggtgctggtcccagagggaaggaggcgggggctgagtctcccgggagcccacgg

SEQ ID NO: 51670 - DNA, 2460 bp, Homo sapiens
gtcccgcagctagtggagacggtcctaggatggaaaccccaagactgggaagggaatcccactggcccaggactgcagcaagtccacagaaggcctggagccccgccttcagcacctcctccctcccccgtgtcctggaaacccaggccaaagcccaggctgacgtggaacagccgggggtgggccagccccgccccctccagccccgccccctccagccccttctctagagacaaacaaatgggggtaggggaacatcaccccgccttcctccccaggtgtttccggagctcgggggcaaggctgcaccgggccaaggcgccacccccatcccagcccaggcggcggttcccagcagagacccagccccactaggtgagagcgatggtggccccttctgtgccaccggccacgccactgcacccacctacgcagcacagctgctggtagaggtagcccctgcgggccggctcgcagcccccgtccagccagcacggccgctccagcaagacctccctcggcgaggcaaaggcgccccccgcccccgacatgccggccacggccggagccctggttcggcccacggacagtgcggggagctggaccgcggcggcgcctctgcttccagcccacgctgcgaggctgccggcttcgctctccacctcttccacctcccccccacaatccgcccactgcgggagcgaggcccagacccaaagaacctgcccctggcgcgcagccccgcccagcgcagccaggaagccgcgccccaacccacgggccgggctgggaggctgccctgggactgaagcggcatgggagggggcctcccagcaggatgtgcggtggggactgcagggcccagggaggaaggcagggcatggggccaggtggtgggcagacaacgctggaggcagaaccgaggagctgagccgcgtctggcaccaccagggagtagaggcatcctgtgagccaggaccgtggccgaagggggcaattgtgggctgaggtggggaggcagggacagtgtctggtccccagccaaaaacatggatggggaagaagccctcagcccaagtcccatcctggcagctgagtccccggcagctccgggcgtccccagcgccacgcctagaagccccatcttgactcatctcaagtccggggatccagcagaggagctgagccaggcagcgccctcactgcaggagaggtctggccagccaggtccccgataggcagtccctctggccagaagcccataattgaggctgcccaatccccagggccccgccccatcctgtgctgggcacggttgccacctgggaccacagcccaggagctggtgactttgagcagggagggcagggcacagcctggctgcccccgccccctgtgcggcccgagggcatgagggcacctgcctcacctgcgtgtggctccaccccctgctgtgtgtgcagggagccacctccacctcagtgctggccggacaggcacctgcccacttgtccctgccacggcggctgccacaggcctcccttcgtgtgggggacgctcctgccctgccggcctccgcttccacccacctgtcccgcacaggctgcaggctgagggccactgcagagcccgccccgccctgggactgcagcagggtcagggtctacactgcagggtggggtggaggggcaacactgctttcactgacattcagcttggaaacaggaaggggagggcgcagggaatgaaggggcgggaggcaggcggcccctctgccccgcctcgagtccctggcagccaccagcggggcttaccttgctcgtcctgcgcccaccgacgtcccctgcgccagtgccacacagcggccagggtgacaacgtgacccacaaccaccagggagggaaacaggctgcccgagggctccatagccgccacgcggagccgccagggctgcccttcctgcgctgggaaccggctgctccaggctagacagccccctccctgcgtgcagggcgagcgagggggagcgccgggaccggagcctgccctgcccgcaggaccgccccatacgcggcggcagccccacaacagctcccgcccgcctcctctcctcctccctccgcgggtccggccctcggcgcctccccaccctcgctccccacccggccggctcagctgtccctgcgcagggctactgacgctcaaggttagttggccttaacccctgcgtccccgcggccacacccgccgggaggaggggccagccgcacgcctggccaagccgcagccccccagcactgcccgcggcctcggcacacaccctccctccctcccagcctccccctgctgtccccaccagaagaggggcccgagcagcccactctgcctccaaggctgccctctggggacagctggcaggcatggagggatgccagagcccccacctcaagcctgcagctg

SEQ ID NO: 51671 - DNA, 1360 bp, Homo sapiens
acccaacactcccactgtcccacgctgtgctccatggacccccacccgtatcgctgctcgccccaagccgacacaccccttcccaccaagcccggcaaacccgggaactgattataaatagggcggtgggggggagtgggagagaggggggatcccgaggtgggaggcgctggccagcagccggcaggcggccaacaagcagcttgtgggggcgggtttatggggccgtcgccatggcgccacggtgcaggctccaaacacacacacacacacacacacacacacgcgcgcacacacgcacgcgcacgcgcacgcctgcgtacacagaggtgtggtggcggggaaactccgaaggcatagccacggttcccacagccctctggcagggccagctcgctgcggcatggctctccctccctctgaagccagccccaggcaggaaaaggccagcctcaggaggtgaggctccaggaagatgtagggaccacagtggccacgcccctcggaccaccagcacctgcggaccctccacccaccagggttgtggctttgggaacaacaccagctgggtccaagcctgcccagccctgtgcccaaagaaggccctaccctcttggccagtccctcagcgcacccccccacactgacctcctgcactcccggcaggccgaccgcatcttcctggcctgattccctaacctaatcccccccagatctccaagggccccaccaaactaacccacgatacccacactgtcccaaaatgatcccaaggcctcttaaaagcacgtggacctaggttctctcctacacaggcctgcaggggtgccaggactgacccccgctgggccgccacccaaccagccccgcctcccccaagccggctccgggcaggaaagggcggtagcttcctccagcagagatggggcggggctcggcgggagtcccctccctcccaccagccaggggcctgcaggcgggaagggaagccgcagggaggagcccggagcagaatgttcctggcccaccctgccagctccgcacacgcccccctgcggcatgcgccacccccccccgcctcgcagcacacacctcctgcagcacacaccccccccgaagcacacacacccctgcgccagggtccaggcgtcccccaagacccccgggcggaagctaccgccccctgcccccaccctgtgggaaccgaagcgggagctgattcagcactgggagggccagggtgtgcgactgggcggccccttctccccccactccagacccctttgggtttccagagcaaccagtcagggctcctgggcagcccccagcccccccaccccaccccaagacaaagagccgc

SEQ ID NO: 51672 - DNA, 1149 bp, Homo sapiens
ttttttaaaggattaaaacgcataaaatggaatgttataagattggccaggcgtggtggctgagcactttccgaggctgagacaggaggatcacttgatcctgggaattcaggaccagtctgggcaacaaagcaagacaccgtctctgcaaaaaactaaaaaactatcctgacacggtggcctgggcctgtggtcccagctctttgggatgctgaggcagaaggacggcttgaaccagcccacccaaggctgcagtgagccgtgattgcgccactgcattcctgtctgggagagagcaagactgactcgaaaacaaacaaaaagataggatcatggtttcaagctaatgagaaggtgagggcacacagctgttcagagaaggaacacacagcttttcatgcaccgactccgcctttaacttcccccctgaagtcaagctgcccgcctgtgagtggccaccatggtcacctgtggtctcccgcagccagaggcttatcgacaagctgcagcagcagcaagttcccatgaaggagcctgagactgcccagcccagcctgcctggaacggtggccacatggtgcagccttggaagtgggggcggccacgatgaccctgggaagggctcagccagctgcacgtcagtcagctctgtggttccttcccggcacaggcttcccaaaggaagggacagctatgtggggacgggccgcaggcagccagcacaggaagagaggccacaggcaccaaggccttgccgtagaggaaacaagtccaggcaacccccaagaaggtggaggtggctgcagccgggaggggggcgcctggagacggggctacagccggggatttcaacaggacaggcaggtcccaggctggcagcgaagggcccacgagcaagagatttaggcagcggggaggaaagggagctggggtagaggaagctgggcgccctggtgacgcagctctggagcgtgggaagcaaagccccggccactgcccaggagatctcatcgctctggccccaattcatggatcacaaaggagtcttgccgaagaagcacgcgggtctgtgtgtccaggccagtgaactgcagggacccccaggctgcagtcgggctcaccagcaccagtgcctccggaaaaccccta

SEQ ID NO: 51673 - DNA, 4904 bp, Homo sapiens
gttcttcaaaatggttaaatatagaattaccacacagctgagcaattccactcctaggtatctacccagcagaaataaaaaacatacgaccacacaaaaacgtgtatgcaaacgtccatagcagcctcactcataacagccaaaaggtggaaacaacccactatccgtcaactgataaacgcataagcaaaagtgggcacttccacaccacggaaccgactccagcggggggagggtgaggtgctgatggcgcggcgatgtgagcagccctgacagcgtcccggcaagtcgaagaggccagacccagggccagtacaggccaatccataaccattcctgtctgcctgagcccctcagcccccccattctccctgtcccccatccagggcagattcctctggggctgaggctactgcagcctgtggcaggagagctctgggcaccctatgggagaggcctccgtgctgagggctgtgggctggtgacttagacagtcggcccagctgccaagaggtgtccagtcgcccagccccccaagcctggcctgtgacagctcatagaggctgggccgtcctgccacaccatgggagcctggagagagacctggggtgggtgtggcagggcggggacagttctaggagagagttgtggcaatgcaggtgagtggaggtgaggcggtcagtgaagaaagaaagagcggcccagcagcagtccagcgttgtgggcaggggcctgtcctgggggtcagggcatgagtgcaggccggggagtggggagtggggccagccgggggcctgggcagctggggatagagactttaggttgtcatgttagggatgggagtggggcttaggggtgctgtgaggtggtcctggagagggcagcaggggtgagaatgaggccggggtgagtaccgttggtgagtgggtggcgttggtgtggggcaggggccaggggtgggaggcctgcattggtctgggggaaaagcgggcctggagaggggctgggtgtgttgggtctccacagggcgtgtgcccagcctgtggcctgcactctcttcaggaccccttgccagccctgggcctgcccagtgccactgtgcctggccccctcctcatgtgtcccctactctcccctgtcctggactctgagcttggttatctgtgtccctggcactggccccaggccctcagccagcactgcagggtgtttgcacgggtgagtgggtgatggcgtagggcgtcatctgcagtggttggtgctcagctggcagagggcaggctggaggttatttggggctcactggagaggaattttggtcggtgtttactgtcaaaagtaaaacgctccaaaaaaaaaaaaaatcaagcagggtggaagtatacaaagaaaaacggggagagtcacacctctgggttcaggctcccggctggggcgatcgctgtgcatgagagagggcgggagagagcacacggatttggccgcccctttacagggagctcagactgagatttcctctggagccactggcttttcatgtcagtaccaattaggttgacctcatgctgattattagtattttttaatagctttattgagaggtaattcacatgccacaccattcacccattcaaagcgtccaattcagtggtttcagtagattcggagttgtgtagctgtcaattccaggatattttctcacccagcccctggcaacaccgctctcttttcagttatggactggccgcctcacctccactcacctgcattgccacaactctctcctagaactgtccccgccctgccacacccaccccaggtctctctccaggctcccatggtgcggcagaacggcccagcctctatgagctgtcacaggccaggcttggggcgctgggcgactggacacctcttggcagctgggccgactgtctaagtcaccagcccacagccctcagcacggaggcctctcccacagggtgcccagagctctcccgccacaggctgcagtagcctcagccccagaggaatctgccctggatgggggacagggagaatgggggggctgaggggctcaggcagacaggaagttggcgatgttccaagcggagcagtggccgcctgactgtacagggaagaccggggatttccaggggagagccagggaatgacgtgtccaggggagggtctgagacgttgtggggtggggggtgaaggtcaccggagtgagggtcagacagggagttgtctgtgagagggcacagtgaggtggaaccgaggcaatgccacagaggggaggaggccaggaggcctaagccagagcacctcctcagtgcagggatcagctgggcagggggcacaggcctggcctccctgccctcctcagaaccaccaaatgctgagctgggcccaggacaggggcccgcagctgcttaccatggagggatttggggctgccttgccgtcactggctggctggcaaggggtgccatgccctcccacagtccctccaccccagggacaggaagggccggggctccagccctctagcaggtccaaggggctcacagaggtcaggcctggaaaggtgtagggcacaggggccacctctgacctcctgcaggccctcctcagccttggtccgtggctcccagacacaggtaccagcccagcccctcccgtccccttgtctcaagccaggagctaaggagacttggggtacctggtgtgctcacggagcctcagcacctgccttgctgtttagccactctcaggccagtgccacacacatgcgggcagctgcaccatcacgtgacaactccacttcaggcaagccccccggcccccctgccccctcaccagcctccaccaccaagcccagaaggcagacaatgggccaagactgcgagtgtgcccaacaccaatcctggcctccagaggagctgcgcttgggagggaggaccctgacagagggtcccagcaacctccagggatctgtctggctcacccctggatgaatcagaagtagttcccaccccaggaggtagaggaaagacagccctggggccaggaaagcctcagcacaatgcccagaacaggctggggcaccccaggcagcccagcaacctgaccagatgaagaactccaggaggaaacgatcctgcacagttcccgcactttgaacagagtggtcagctcagaaacagctctgtcctggggcttgccaggagggctggagcccaggtgggcggctgcttccctgccctataccccagcacccctccgggtgctccctctaaggcagggccggccatgtagagcatgagcaacaggctgcccgctccaggcctccccaagggtgcaggagtgtctcccctggcccgaatgaactagtcacacaggcaaagcggctgggcacagcactgtcaaagagagccacagcagtacatccaccctgccccagagccgtcgctggaggacgcctgaaggagatgagttcggggcaccatgaaacctacccagctgggcaaggttgtggtggagagcggcaccacggggccccagcaggacctctctccctgagctgcccttgggggcagagccagcaaaaccagccacgtggagctggagtctgctctgatcggctctgcctgggggcccccaccgcgaccctccccagcagctcagtcccttgctcctaagcctctgcaggccggcagccaatgctgtgtccacaaccgcctggagccgggcgacccaggctgagccaggcagctgggctgcaagaatggccggtgggaccaggacctgggagggtccaggggctccccgtgggcgtggactagggcaagggggtctgccgaggcatcaagcaggtgggcaggccactctgatgctcccctagagaggaaggaggggccaccctgacccctagcccacagctgtcccctagtgaacagagaaggggtgtggggggggtgccctgccaaggaagggtggcagcccaggccctcgccagtttagggaggtgaggagaggcggcaactatgtgacccattgccaggcggcggagctgcccctgttccatgcagacgcgccccagaggtggggcaggggatggctcagccttgacccatgtgtctgctggccacagacaccggatcctggctcagacagccgaccccgacaagccctgagcgcccccacccgcccgcggcccaccccacccacccgagccgcgcgatgccctattaagggcatggcctcgggggctcagcggagcgagtcctccccttccctaggcactggcagccgttgggggcgatccaggcggacgaggccggcggagtggccgcgctcgggccggcgatcgggaccgccaccgtggacgacaaggtgctcggcggctgggctgtcaggagcggcccgacaggcagcgggacggggggccgtacctttgtacttctcgcgcacctcctcgtaggcctggatgaagtcctgctcgtcgggcagcgggccggccatgccggcgggcgcggggcgcggggtgcagcggagcctccagcacccggcggccactctgtccccgcggccgcgcgcgccgcttaaagaggccgcccccgccccgcccccgccccgcccccgcacccaggatgccccacgggcggggcggggccggggccgccgcggccgggcagagggagccgcgtctgggcccctcccggcgggccggttccgcgggctccgagtcccgcacgcacgccctttcccgttctcgcccgggtcgcggccgccgacaccgcggtcgcccgggggtcctcgggtggcccccgcccaggggcggccgcgacctgtctgttccccgccgggccggcgacctgcctccgagacgctcccctgcccgc

SEQ ID NO: 51674 - DNA, 790 bp, Homo sapiens
cacagctctaggtcacccacttccctcctgccctcccccttccccaagcatctcgctggatgcttcccatcgttctccctggatggggagctactggaaagcaaggccagatcctggctcaggaagaggctggggctccagacaaccaggtaccccctccctatacactgctcctgtacattcccacctggccgccattgtggcagccaagaccgagggcctggtggggaacccaaaaaattatccttgttgcatctgggcactggaccgtgttaaaatcaaggatggacgccgcggcaagaagcccaaccccaggcctcatgaaccgcctgggcgcggccggcaggtggcgctgtgccgcctgcactcacctgggacgcgcgaggccctccgtgacccgcagatccccctaggcctcccccacccagtccccgctccagcgcctagcacgcagcgggaactcagtcaacctcgcgtgccaaggaggtgcacaggcaaggccctgcgcagttacctgcgatgcgaatgaccgcccgctcagctgggtccaggacactcccgttgctcccagcgccacccccgctgcgccggctccgctgcgttttcccaaggttccagggcagtgtgtccccagggctgggcgagccactgcttccattggagacatcttcagagactgcccggacctcagcgtcctcacccgacatggcctcctggaaggggagcaggaggggtcacatctctgcctgttcaggagtggactctgcacgccgacccacccaccaccttc

SEQ ID NO: 51675 - DNA, 1528 bp, Homo sapiens
gacctctaggactccccatcacgccaccccacctcagcccgcagtcccacctcgatctccgcagcgaaggcctataaatagctgcagccgcagcggcgtgggccgcgggagctctgctgcagcgaggccgggagggagcccgggccgcagctccagcggcccacagtgggggcgcgtacaccggcaccgcggacgcaaccaggacgcacgcatacccacgcgcgcacactccccagcccccgtccccaagagcactggcgtgcgggaggtgaatggggctctgtctcggagggggtgggctggcgcgggggcacaatgtgggctctgtgcctccgccctcaggccaagggctaaggaggaggcagcggacaccgaggagggggccgccgcgccccgcccccactggcttctccacgggccgccccggttgcagccccccgcccggagccctgcggtcagccgcgcctccccagcggcctttcctgcccacaccccgggcaccgcccgtccagttccgcagtctcgggcgtgcagggaggtgctgtcctctcgagcgagggcaggagggggcgcggcgcagcccctagttccgtgtggcctgcggccggagaccgccccccgacccccaccccgcagcgcccgcacgcggcgcgcctctccatcctggccgcggtcatacatgcctggtggctccgctcacttcagctctgccgccgcagccagactgctcgggccgggagagcggcggaggcggcgcaggcggggcgagccccgagccccgccccggcccccacccagagctgcgccgcgcgggcccggccgagagcgagcgaacgctgccagcgagatcgggcgcccgtgtctgcgcggggccgccgagatctcgggagcggcggggctggggcccgggcgggcgattcggccagggcagcggcgcacacctgagcccccggcgcacggggcgggccggtagtcaaggagacgctgtctgcgccggcgtgcgcgacacgggaacgtcgtgcgctcgccccggtgagctccgggccccgccccgcaccccgacgcctcctcggaagcagcagatcccgcccctgggccgcggagatccccactccccaaacagaggtcgcagtcagagttcccgggtcccttccgcctgggttcacgttcacgtttattcaaacaacagagccgactcgggcgaggtctgggagcggcgggcgggcggtgtcgcctcctgggctctgctgacccctggtggtggggtcggcccaggctgggacctagcccggcccccctcggccgctgctgaccgccatcccccacaccgccttctggagcccgcagagggaggcaggggcgtccccggggacagctcaggcggccacagttgggggcggggagcatcagcctgtgcggagctgggagcctgggaagcaggaggccagagggtggccccttcggttaagtgtctggggagcggcccgggagcccagaggggtcgtcgggggaagcgcggggcacgtgc

SEQ ID NO: 51676 - DNA, 1905 bp, Homo sapiens
tcaccttgccactgctggaaggaggcaacagtgcccaggggcccgggtaggcgttgcaggtcctccaggggccccccaccactgcggcgctcattctccaggtacaactccagcaacagcaggtccacagaggcaccatcccccaccacacgcaccgctcgggcctggggaacccgggccagggacaccaaggtcccctccaggcccagattctgggcctgctcctccaggacacggacatctgtggggtatgtgcaggtcagctcagggaatcccccctagccagcacctcaaccccaaccctgcctctcacctgcctcagaaaggggcttgggcaactggaccagagcccggtctggccgggggctggccaaggcacagcaaggctgtactgggagccccgaggcccgcagcaaggcctggacatgctgctccaagcgctggggcgtggtgccagggggcagtccttggagcagcaggcgtgcaggggctcgtggtggagctggccgcaggctcagctgggcaccatgtagttcgtgatctgcctgggccaagaccctctcggcgtctgtgggcaggggcggggcaggatgtcaggcattagaatatcagggcacccaggctgtcccttcagccagccctctcacctgcaggctctctgaaggtgaggacgcccccacagcccagtctctgccagctcaacacaggtccccctccagagcgtcggcggttttcaaagtagagagtgagcagctcgtcgggcacggcagggggcagtccacggacctccactgccacccctgcctctgcctccgccattgcaaccctgggacggggcatcaggtgggtagggaaacagcccattccacccctcctgcccctccccaggcccctccaaggtgtgtcctcaatgctcccccattatgggtggccccacatacagcacttacattccccgtggccgctaggcagcctcaggccatgagctcagccaggactcctgtgcctgcccctcagcaagcctaaccctgctgggagcaggaaaacaaaagtgaaactgaaagacggaaggagggagggagcagctgggccctgggcgctgaggcctgggtactggggctcagatgcttcctctcctgctgcagcctcaacccccagctgaccaggaggtattggccaggctggacccctcaggaccctccagccaacccagcccagcccaccggccctacctggcccactccagcccctggttggcagggtagacaggagtgtcccctggtggccctccactcccctggcctccatggcctgaaaatggccaatcacccgccccactaaacccaccaaggggcctgagtcactgcccctcactcaggatctccaagcctctgtgtccatgacaccctctgcacacaaagtgctgggtctccaggcccgcccccggccaaggctggccttcaacgcccccagcaaccttctcaaccctgctcctggtccctcacacctgccaggtgctgagcatgggcggttccccacccttggtctccaagaatgtgcattgcagcacagccttcctcccgcctcaggtcttgcctgcccattcctgcagctttctgtcctgcctgcacctccccatctcacaccatcattggcatcgtcacaagtaacctcagaaggtgacaaggtaatggctccactgcattccttgctgccgctaatcctcaccacagaaagggaaacggaggtgcagacaggcccatagcagcaccaggcctcaaacctgggcggtgccttcagagtccacactcccactcgccacagatctcccacatcacccaagctccgtttgcttccagcctttcaaagagctgtggccactaccactctccatctcctacttcc

SEQ ID NO: 51677 - DNA, 2098 bp, Homo sapiens
atttcttaactaccgaacggccagtcaaattggccagaccagacttctgcctccaggggtcttcagcgcccaccgcccgaccccacccctcggcagacagtgagaggcgggcctctggccggagcgaagaggaacacgcaaggcggcgcagcgggaggggtccgcggaagccccgcccacctgcccctcccaccccgaagctcgcccggccccgccccctgccccgccccgtcacaaggccccgctgcgtcttccgagccgcaggcgcaggcccagctgagcggccgccgagcgggtgcgggtgcgggcgcatcggccatcaccgcgcggccgcgcagcggacaccgtgcgtaccggcctgcggcgcccggccaccggtgagtccccggcccgagcccaggagcgcctctgacccgctgcgccgcgcggcctgccgcccccgcccccgcccccacgcggatcttgcgcatccgagcgtggccgcctcgggtcagtaagttggtccggccggggcgcgcggcagctcgcggccagaggtggcggcggtggtgggggcggggagccgcggcggcctggagccggagggagggggcggcgcgctgcggcgactgctggacccgtgaccctgtgcgcccccggcccgcggagggcccatccgctctcggtgccagtgccacggccgcagcccctacccgcctcgccccacgcccgctttgttccccgcacgccccgtggtcgcttccatcccccacacacccccgcaccccgctgttcccggcgtaccccactggcaggcaccggcagccgatccaggcccgatccccccaccccggagccaggggccgttgggccctgttgttgggctcgcgggggtgggggggctcgggcctttgttggtcacagatggcccggggatttcctgggatagaaatagccgccggctccggccccttaaagctgcttaaggggcgggatgcggaggggagggtccgggcacaccccacacgtccccggccgagaccccagcctccgcgctgagctcccacccgggagacgccggcagcggcgcaggcctccggttgcttgtgagaaacgacccaagccccaaatcccgaggctggcggtcgtcccctcgcccggcccctcccccaccctaaaggcggcctagagccctgggaaggccccacggcgccgcccgtccggtcctcacgcgcttctccgggcccaggctccggggctccccacagcccggggcaaaggtcacggtcttcccttgcttccccctgggttcccagaagcaggtggagttgcgcagggctgggtcccgacgctgtcgtcaagccaactgttccactgttccttgtctgtcttctctaggggcggaccgcggaacccgaggccatgtcccatgaaaagagttttttggtgtctggggacaactatcctccccccaaccctggatatccgggggggccccagccacccatgcccccctatgctcagcctccctaccctggggccccttacccacagccccctttccagccctccccctacggtcagccagggtacccccatggccccagcccctacccccaagggggctacccacagggtccctacccccaagggggctacccacagggcccctacccacaagagggctacccacagggcccctacccccaagggggctacccccaggggccatatccccagagccccttcccccccaacccctatggacagccacaggtcttcccaggacaagaccctgactgtgagtctcaggaagggaggggtggggtggccgggagggcagggggaggtgcttgtgagtggcgctgacccagcctgtctgcttctcagcaccccagcatggaaactaccaggaggagggtcccccatcctactatgacaaccaggacttccctgccaccaactgggatgacaagagcatccgacaggccttcatccgcaaggtgggtaggggcatctccaaggcggtgggggctgtggctcccagcggatgactctgagcggctccttccccaggtgttcctagtgctgaccttgcagctgtcggtgaccctgtcca

SEQ ID NO: 51678 - DNA, 1118 bp, Homo sapiens
tgttggatgaagaatataaatctcaaaagcaaaactttacaacttctgtcttgagacacacgaaagcactaattacaaaaacattcaacactattcaaattaagaatttctgttcatcaaaagataccttaaataaaattgaaaaataaaaaaataagggagcccaaggtaggaggatcacttgagtccgggagcttgagacctgcctagggaatatagctagaccccatctcaaaaacaaattaattaaattgagaagacaagttaaaaactgggagagatattcataacacatgcaacagacaatggatttccatcaaaaatgtaaaaagaattcctacaaaccaatgcaggacaatcgatttttaaaataaatatggagacttctggccacaaaggactaagacagaaccaggatttacatggacactccactacaaacaactaaaaaatgttatgaaacagccgggcacggtggctcacgcttgtaattccagcactttgggaggccaaggcgggtggatcacttgaggtcaggagtttgagatcagcctggccaataaggtgaaaccctgtctctactaaaaatacaaaaattagccaggcatggtggcacatgcctgtaatcccagctactggggaggctgaggcacaaggatcgcttgagcctgggaggcgaaggttgcagtgagccaagattgagattgcgccactgcactccagcctgggtgacagagtgaaactctgtctcaaaaaaaaaaaaaaaaaaaaaggttatgaaacaatgattttcagaaattatacaaacattttgtaaaactgtcctgtgatgcaacaggcagcacaggactgggacccggagacaggaacactatgatcatcctggctttctgcctagaggcacatttcaggccacgtgacagaaaacagtcccaggcaaagcagtggcatctccctgagataaaaatcaggttggagaagctgaagaagctaaacatagttccaggacagagttctagaaaggaggcaactctacgtaaaaaaagagcaacagaaatctgcataggggccggcgcagtggctcacagctacaatctcagcattttgggaggccaaac

SEQ ID NO: 51679 - DNA, 1722 bp, Homo sapiens
cccggggcaggagcatgccggcctcctggggaccacgtggtcagtgtggggcttctggccgtggggtccctgtccacccgctccgccctggcccacctgctccaggatgcggcggatgccttcggttggcgcgtccgcatagttggcagggtcctctgagagcagttttaagacccgcacgtgcccccctgggcactgggcaaagacgtctgtgaaggtacccccacggtcgatggcaaagtggaagcggccctcggggctgcccatggtggtggggctggagtcccacaggagctcttcagctggtagccctggaaaaactggacggaggcggggtcagcccgggctcacctgcgagtgggactagaggctccccagccctgcgcatgcggggggttcctgagggagagacccacgggcacgactctgggaagagccagagccgcaggcccagctccgagggcagcctgggcccgagcgagagcctggccggcggtcagcggcctgatgcccccatgcccagcatcgcgcttctccgggccctggactgggccgaaacccaggcagcggagcaggcacgggaggtggggacgccgctggaccctggagccctcgggcggggtccctcagcacgaaagaggcacgggagtgcggggagggggtttggggcgagctggccgggggaccccacttcccgctttgctcgaccttcgacccaagcctggcgggccccgggacaggacggagcctgagcaccgacggggcgacccgaggcggggacgcgtgaggagcggcccgggaggcagcggggaaggggccgcggaggggaagcccgggaggcagcggggaagggccgcggaggggaggccgcccggcgcaggccccacctggcgctcggctccggctcggtcgctcgcggtcggctctgcctgcgctcccggcggccctgcccgcaccagcctcgcctcggggaggagcctacagggcccgccccccgcgccactggtcccggcactcgcggttacatcaggccgggcccgccccccgcgcctccgtcctcgccctgcgcttccccgggccacgggcgcaggatcaagggcaccttggctctgcggccctcgggtctccggcgccgggcctgggctcgcctagcgtgggcgccccaggatcccacctccaggtgtcctgggcaaggggagctggcagcccaggccacaacagggcttcccactggcggacgtccttccccgtggagggggcgttgaaggacagagaggagaggggaggccctgcggccttctctaccagccccagctcccggccccgtgggcctctcctgtgcggtatctctggccttcttcaccgggtctccctcatctccagccctccttgtgccagaggcgtgtgaaccagagcaactccatcttgaataggagctggctaaaaagaggccgaaacctactgggctgcactcccggacgattaatgcattctaagtcacaggatgagataggaggtcagcacaacacacaggtcataaaaacctgtatctcccagcccggccaacacggttgaaaccccctcgctactaaaaatacaaaaattagtcaggcatgtggcacgcgcctgtaatctcagctaccgggaggctgaggcaggagaatcgctggaacccgggaggcggaggctgcagtgagcagagatcgtgtcactgcactccag

SEQ ID NO: 51680 - DNA, 1365 bp, Homo sapiens
catccccagccaccccctcgcctctctgttcactccaggggcctgtgctatccactcacagacgaaacctctaagggcctgtccccacgctccctagcggcatcccactgccgtgcacctccaggtgtccacctcccccacctccgcctgcctcctgggctctcctgaccccactccactgcgcgtctcgggggcagaccaacaaaagccaacccccacccacccaggctcaggcctcccttggctgccccacctgcctcctaccccactgggcctttatctctgtccctccatgttgctgggtcccagcttccccttggcaatgccacgcagcccctccacagcaaccagaggcagctccaggcctgcgggatggcccggcccctactctctagtggcgcctctgactgcatggccagacacgtcccaaaaccaagccccaggccacctaccagtggcccactccagcagcggctcccccacccagcgagctgccccagccccattctcatccccacacgcaatctgccagaagtcctgttactttcaccttcagaacacagagctgctacttctcacacctccaccccggccaggcttccatcacgttcccccagggatatggctgtccccaccaccagagagcgcagggctgggaggacagagtctgccgttgcagtgactctgacagcttcaggcacagacaacttgcacccacctcagggcctggcacaggctgttccctgggcctggaaagccgcgccccagcctggcagctccctcgcccgctcaggctctgctcagaggtcactttcccagacctggcaccttctccccgccgcacatcctggaagagccccagggccctggctttgctccagaggcaccgcagcacccagcgggtttgcccaactccacagagtcttggggccccggtacggctcacctctctcagcattcttgaatttgatcgttctccgcctgggtagccagggactggcagccacctcagccaggaacccggagctgcagaagcccaggctgctgccgcggttcctgagcaccagcttcagctcctggttctcctggatgagctgcaccagccgccgcagctcttcgttctcctgtgccagccgctggatctcctgccgcaggccctcatagctgctgaggagggacatgcctggcagccagcggcggcagctggcgggggccagcaggccggccagggacagcagaccctgctattgtgaggtcagcagctgcccctgccccctcgcctcagccgcattccgggccttcagggtcaggacccagctgttccaaccaccccgtggcagaggtggcctgacctctgacctccag

SEQ ID NO: 51681 - DNA, 2039 bp, Homo sapiens
tctgactgccttgacccacagagtgtggcaggagggacactatgtgacttctgaggttaggtcctaaaaataccatgcacatgttgtccaccttgttgtcctggaaggctacccttggaacccagttgccatactgcaaggaagccctggttgcatggagaagccacatgtaggtgtgctgcctgacaggcacagatgaggtcctggcccgccaccagcatcagccaccaaagatgtgagggagaaagctttaggatggctgcagccccagctaccatctggcagcaactgtaggagagatcctaagtgcaaactatctagctgagcctagataaccccagattgcagcacataataatagaatgatttttattatttgaagccgctgaggttaagtggcaagagataaacagacatacaacccctctctggaaaggatgaggaaatctgcatcctcaaagggaaaagggaggcccacctgactgcagtgtggaagctcggtgtaaagggagggcatgagaggactggagaggtgccaggtgtggaccatcctgggacaccagcctggtcactttcctaggaccgctcaatgccttctcctgtcagtgtcgcaccccactgggttcatccttccactttcacacttggggcgcggggaagggctgaatgcaggcaccactggtcacgagggcgtgactgggcaattcctccttcggcgggcgcccacctcctggcacccgtggcacagctccgggaacggctgcgggcccagccgctgcttccccgatagcgccgccgcagttccccggagacagaagtagagccggaccgccggaaaccgtagatccggggaggtcggggccgcggtgaactccagttcaccaggacaggaagtgacagcggaacgccggaaaccgcagatccacggaggtcagggccgcggagagctgtagttccccggaaccggaagtgatggcggacctccggaaaccgtagattccgggcggtcggagccgccgggagctgtagttctcccgcggctcagagaagtaggcagagagcggacctggcggccgggcagcatggcggggctggagctcttgtcggaccagggctaccgggtggacgggcggcgcgccggggagctgcgcaagatccaggcgcggatgggcgtgttcgcgcaggctgacggctcggcctacattgagcagggcaacaccaaggcactggctgtggtctacggcccgcacgaggcgagtgggcgcgcgggatggggaatcgtgtggccgtgggagctgcggggcagccgggctgagcgctggctcggggacttgaggggcaacggccggcgcgcctcagtctacacagccgatgctcagcaccgcatctcactcggagtaaacgcaagtccttagtgtgctgcgcggtggtcctgcctttctcatcggcctctgtccctgcgccctccttcctctttgcggctcttcaacgtgctaggcactcccccactcgctccctctcctttcagctctactccgacgtcactccttcccagacgaccttattatccacgcggtacttctcgccctacaataaaccctttgttttgtgcacctacaatctcaaatgcctattttgcttaagcattttcccctttgtttcctcgctggaacataagcttcctaaagaaaggaactttacataaaactatctggtttcattactgtgcttccagcgctgtaactgcctggccagcgaaggtattgaaagagtgtttgcttagcgcatgagtgtgggagctctgctttccaggcggagggaaccagaagggcgaagaccacggtggtgaaaacaagcaaggcacttatgcagagcagaaagactgctggtggggaaagaggggataactccaaatcaggttgagggttcccggggaggtgaggacttagggttttgtagagtagggaaatgatttgggatcttatttcatatgtaatgtgaaacctttgtaaggtagttaggatttgagtgtgtaggtg

SEQ ID NO: 51682 - DNA, 1734 bp, Homo sapiens
ctggatctcccaggctcaagtgatcctcccactttagcctcctgagctgagactacaggcatgccccactcacctggctaatttaaaaggaatttttttgtgtgtacagactgggtctcatttcgttgtccaggctgatctcaaaggatccacccacctcaccttcccaaagtgcaccctcttgagcaaactcccccttcattcacctctggcccaccgagccccgactaccagtccctgcagtctggaccctgggactgcttctcccctaatattccacggatctcctggcccggacagtgacagtatgatcccccactttataatgcacacaccccagctccagtgaagcccgttttggccagtagtgccatcagcatcttctctgcagtcatctgactctgaaaacctcggtgctgggctcacgctgtgactccactgggacgtcctgagtcattggcagtctcgcttggcatccattctctgaccgccgccggctttccacccacctgcccggctcatcacctctgactcctgcgggccttccagccggcgctatctcgcagcccccgaccagctcggcctgctgtcgggcatctctgctgtcctccggctgtagggctacctgcctccctcccggggggtgcactgcgagtccgactctagtgggggcagcgcctagcggactcccaaacccgctcaggtcctgccggcctcaccggcaccgcccaccctccagccggccgcggctctgcgcttgcgcgccggcagcacacagtgttaggggcgcgccctctgctctggacatgcgcgccgtcgcgagcgtctctgggaccggaagtgcgggcgagcgcgggtccccgggtctgacaggagcagcctgtgggcaccgcggcggtagttggaggcgggagagggtccgtagccgcgccgccctgccccgccatgggcctcctgtcggacccggttcgccggcgcgcgctcgcccgcctagtgctgcgcctcaacgcgccgttgtggtgaggacagggcccggggaggcggggacccgagggccctgggctcgcgccggcggccccatgcgcggtccccatcgagggccggggccgctccagctgctcgcgcccctccggctgctcgcgcccttccgctcctgccctctggaagcactgagggtatcaggcccaggcttagggctcgggtccggcgtcccgatgcaggactccgggtttaggtctcccagacccgcgcgatcgaccccgggtgcggaggttgtggcctcgggtcggcgtctgaggacccgctgacgctccggtgcccctccgtcctctctcacagcgtgctgagctacgtggcgggcatcgcctggttcttggcgctggttttcccgccgctgacccagcgcacttacatgtcggagaacgccatgggctccaccatggtggaggagcagtttgcgggcggagaccgtgcccgggcttttgcccgggacttcgccgcccaccgcaagaagtcggggtgagcggcagagcagggcgtatggggcgagcagtggtggctaaggccggggagctctgctcagaggctcccttcgtgtctgcagggctctgccagtggcctggcttgaacggacgatgcggtcagtagggctggaggtctacacgcagagtttctcccggaaactgcccttcccagatgagacccacgagcgctatgtactgggggagtggggtg

SEQ ID NO: 51683 - DNA, 1776 bp, Homo sapiens
ggtcctcagcctgcaggggcaccctccacccggccatcgcgcagcctgggaaggtggagaaaaggagcgtcggggtctcggaggcggcgtgggaaacgccgggcggagcgtggcgctgtcacggcaacagagagacgcgacggggccccgccccaccgccagtttccacgacaacccgaagagcgtggggaggcaggcggtgccccggcccctgactgacgcgaccgggaccagcgcgcttcgtccccgcccacccgacaggccccgcccccgagcccggccccgccccgcgctccccggctttcgcgaggttttgactctcgtggcgccccaggggccgacgggagtggcggccgcgcggaggaggccaagatggcggcagctgcggcttcgcttcgcggggtagtgttgggcccgcggggcgcggggctcccgggcgcgcgtgcccggggtctgctgtgcagcgcgcgtcccgggcagctcccgctacggacacctcaggtgagcgctgggccgggccccggcctccgcgcggccccgcatctccgtgaaggtcacggcggggaggctgcgggcgcgggcctgggcagcgcggaagcggtaccggccacccagcgtccccggtcccagctgcctgccgaccttgagcgtgtgggatcagggctgggcgcccacctctccgaacggcagagagcccgtccccagcgtgggggttggcgggacgggctagctgccgtggcggggctggggctttcccgaatggcgcgcccaggacggctcttgcggctggctgtccaaactgggcccgcgtcctgaagtgaccccagcctgatctcggccagctgcttgtgaccttggcctgtcccagcacccttggtcacttcggtctgatccccggctcaggatccaggaacaccctctcctgagagcgaatcacggtctaggggtcagcggcggagagggatggggtgggtagtgggacagggtgtgcgtctggtgccctgcaggaggaggccattgctgggtggagaggtgggcgctgagagtcagatccccaggtagggctgggtggtgtcctggcaggcgctgagcggagatcttgcaggcagtggccttgtcgtcgaagtctggcctttcccgaggccggaaagtgatgctgtcagcgctgggcatgctggcggcagggggtgcggggctggccatggctctgcattcggctgtgagtgccagtgacctggagctgcacccccccagctatccgtggtctcaccgtggcctcctctcttccttggaccacaccaggtgtgcagctggctggctggctggcagcgggaggttctgggtggagctggtaaggtggaatcttcagctttcctaaccctttccctccctccagcatccggaggggtttccaggtatataagcaggtgtgcgcctcctgccacagcatggacttcgtggcctaccgccacctggtgggcgtgtgctacacggaggatgaagctaaggagctggctgcggaggtgtggggtctggggatgcctgggacccagggctcagggctcccactgttgagatggcagggttgtgatgaggctctcggtggcaggtggaggttcaagacggccccaatgaagatggggagatgttcatgcggccagggaagctgttcgactatttcccaaaaccataccccaacagtgaggctgctcgagctgccaacaacggagcattgccccctgacctcagctacatcgtgcgagctaggtacacggg

SEQ ID NO: 51684 - DNA, 2792 bp, Homo sapiens
atgcttgcctctcatccttcctgagggttaaggaagtgcaggctgaggttccagggcttcctggtggaggctgcaacttgtgctggctggggcctcagatggtgtaggagactgactccagcagccactccaagtactccaagctactccaggctccacctactccctcctggaagccttcccagacatccagcagtggggaaggtggatccaacttccccaaccaggactggggggccaaggctattccaaattgtaattgtatccattacagggcactgaccattctgtccttccacggtggcacctcggactaggactgcccaccgctgagcttcctgagggttgaggaagtgcaggctgagggttccaggccctcctggtggaggctgtagctcgtgctgggtggggcctcggatggtgtaggaaactgactccaggggccactccaaattaacctgagaagagggagagtccaggctcagggcgtccccccgccctacatcgcacgaggagcaaagaaatacaaggtaacatttatagaccatttacacggtcctaagccctgtacgcctatcatcaaatcctcacaatagccctgtaaagtaggtccaggtaggtcccagtaggtccgagcgtcacccccatttcacggacgagaaaacagaagcaaagaaacataactgcttaagggcacccaggtggcaagcggaggggcctaactttgggctccgtgccctgcccgggccaagaggactgaccgcgcgccctccgcccccactcaccgccccaggtcccgcgcccagcagctccagccggaagcgcccaggccgctcagggtccgcgctcagctgcagcctccgcagctgtgcctcggcgtctggcccggcgcccagcggcctcaccgcggcgtgcacagccaagagcactgcggcggagcccaagtccgaggccgccgccgccgccccgcccgctggcggcgccatctccggtccggccgggtcccacccctccgagcgcgcttccgtgggatcgggccgctgagccccctccgccggtcggaaacacgggccgcgaacctggggttccgggcgcgcccagagcgtcgggcctgggacggcgccgagtggtgcactctggccaagcctgccccgctggctttgcccacaaatggacacggcccgagggtctccggacaccggctgggcgaggctggcggcgtgtacgaggctggggcagggcggccgaggcgctcacgttagagctggtctttgggggcgaagggtcagggggcgaagcaccggccacaactgaaggcggacgcggcctcttcgccccaggggctcggcggacgtagatgcatccagcgtgcgactatcccagcgcctaacggcagctggacttcgctcccgggacctccaatgggctgccaccttcgcccgcagaccccagcccccgccacgcccacacgtcgcactaggttggcccgcgcctcactggttacggggtcgacccccctagggggcggagctagagaggccacggccaatgaacgccgggggtaagcgggttagtacgacgagaagagtgacagacaggctccataaccagtagacgtagaaggcagaactgagtggcgggtacggcacccgatggctattcgagctctcgatctcggagactggagcgggccattcagaggcgcggggccgggcccggcggacgcttgttgttgtccggccgggggaggcggaggtcgctcgctcgctcgctcggctcgctgactcgccggagcgctctgtggcggtcggcggcaggtcggtcgcgagagcgggctctgtggaagggggcgaggctatgtcgcggtggcagcccggatgggccggcagggccgggagtaacgggacgtcgccgcggagcttcttcccccggatacagtgcggcccgagcggaggccgcggcgccgccctccgatcttgaagagcccgcgctgcgcggagcccgcccccgcctgcgcaccggcaccgacgcggagcgacccagcccagccagacccggcccggcgcggcctgatctaacccagccaggcaggtgggtgtccgccctgcgtcccgcgccgtctgcgtacccggaaccacagcccccagcaggcctcgcgcggcgcgctgcctcctgggatttgtagttccaccgcggcttggctggtgcccgacgtggcccaggcgggcgctgcctggtgactgcagcgccccagcggggccgagggaccgccctcctaggcgtctggagaaactaggcaatttttccgggtagagtggaggaacctgtagttttcctctccccgggccagaaagtagccaaaacgaaagagcgcccgcccaggtgaccgcagggcccggagtcccaggtgtcctggttcctaaccgggatgcagcctcttaccttggctgaggagcccagccagcctgagggagactgcaggagtcacgtcccgttgcggactcaagagttacccccatggtggctggagctcttttggagtgggcgtggagatggggaatgggaatgttgagcaacaatctcagccagcagccccagggtgagcagggtccccggtggtctagtctagtcccagaactcgcgtgttctgcagggggtatggctgacctggagcctggacttaccaccctcaggtaaaacaggatctctgtcacctctcctggccgggcagagaggggagctcctgatgtgcagcctggacagaggccagactcagcttgttcctagcggct

SEQ ID NO: 51685 - DNA, 2061 bp, Homo sapiens
cattcagcccatgggagccaggatgagttgaattcgcttcacaaagcaatggggcagtttcaacaacccagcgcggccgcggccgagggggctgtgaggggctggctgtccatcccctccaccacccaatttgatgatccccacaaccaagacagggctgagctagcagagagcaacagtgagttctaatacagcaaatgcagcagacactgggttctattcaggttttcttattctcatgtctatcccatgagcataaaaacgcaattaactagcgtatacgtaggttaagcatttactgggagcgcaagccgagcccttttattggcaggatgcacaaatggaacggctggagaggctgctgcaaggggcgccccgtccccactccccgctcccccgtttctttgcttcccggacgccgtcctttaccccgcagtccgctctgcctgagaccccccgatagaggagctgcacccacgcccaagaccgattcactgggcgcgggcgcccaggtgacagaagccgggcccacccgccccagcgcggccacgtgcccgccgggccctctagggacgcgccccgccgccccgcatcgccacagtcacctccggctcgggctcaggctccagttcgggctcagaccgccgcttctccggccgcacgctcggcgccgccgtgcgccccgcaccccgcgaacccgccatgccccaccgcgcgccggccgccacccgcacagccgcttccgacagcgaccgggccgcgtgcgcaggaggacgcgccccgcccagcccggccccgattggcgggtggagggaagggggtgggaccaacacgcgcaggcgcgcggctgggccggggaccagggcggggtcggggcctgcgtgctcgcgccgggggtgacgcgggagggcggcagcggcggcggcgggagcgcgcccgttgcaagatggcggcggccatgctgggccccggggctgtgtgtgcgcagcgggcggcggcgcggcccggaaggctggcgcggcgacggcgttagcccggccctcggcccctctttgcggccgctccctccgcctattccctccttgctcgagatggatctgcccgtgggccccggcgcggcggggcccagcaacgtcccggccttcctgaccaagctgtggaccctcgtgagcgacccggacaccgacgcgctcatctgctggagcccggtgagggcagcgcgcgggcgcggggcccgtggggaccgggagggagcagggccgcggcggacggcgcgggagggctgcggggaggggccctgccgcacttcagcttacgcgcggtgagcctgccctgcccccgccagagaagggcggcgggtcccgagcctgctcagacccagagccttaagttgggaaagcggctacgagacccacactcggttcaacccctgccccagcgaagtttccctgggatggggagaatggggcgtctcttgtattgggcttctgctaactgttgggcggttgcggaagtgtccgcgcttagggcaagcacccggcttcgccagcggacgctatgccccagaggacatcggcgtccccaggggacagcctacggggtgctgggtcggcaactattaggagaaagtcaggacttggcacgtgaagtggagggcgttgctgtagtggaacaggaaaggcagtggaaacagtaagacgtcatgaagcttcaggttgatctcaagcccgtttccgaatcccaaatctgggtttcccaagaggagttttgtttttcattccttatggggcatctttattcgtgtttctgtcttcagttgcctggcagcaggcttgtttacatggtccgaccctgcaagaccggacagctccggtttgcagaagtaaatcagtgattgtctggagttggagatcagaatctgctgttcacatcccggctgtgacgtcgtgtccggtgaggggcagagccaccgcctgcggctggcaagtgatgacctgaagaagggccacactggccgagtggggtgactcttgcttgtaatcccagcactttgggaggcgg

SEQ ID NO: 51686 - DNA, 1753 bp, Homo sapiens
ccactccccacctggaggatggaagtcccaacacagaacccaactctctgtccctacaacagacgctggctctggcaacatcggcagggctccaggccagcctaaccactggagcaatgaatgggccacgcagccactctcagaagggtctgcaaggacaagaacgcctctaacactgccccttgtccggggcagctgctgattcccctgtcctcggacaggcctgggctcctctggccccctccctggcaggccagccctcctctgggagcctttcctacccgcaaggcaccgctcatagcaccaagaaggaacctatcaccacaaactgcccagatcttatctgactccttccatataaggggacactgtccagggccgggcccccaccagcccgcccctcgaaaagctcctcaggagcccctgaggatgcacagacccaagaggatctggatgcgggacacctgccggctcccctctgcctggccaaggccagctccagagcccctacccagtgaccttgtcaggtgactctccccaagcctcagtttccccacagggcccatagggcacaccgatccccgcttagcccagggcccatgttctcggactcggagctcgcgcttcggccaaccccggaaagtcgcggggcccttgggtcagaggttagggggtcaggcgctccgctacctcagctcccagtggccgctgcccacgccggcgtctccgtccttgttgggggccggggctggcgcgtcccccgcggctcccacgtcggggcccgcagcggcgtcccgcacctcctcttccgccgccgcaggcccgccgccgccgtggctcgagggccgcgaccctgtcctccggcgccgggagctgccgcggtcgcccatggcctcagcccgcacccggccgcagccaagcgtgggcctgccgggttcgtagcgcccgaggcgcgcggccccacctccgggccctagacaacggccgccactgccccctgccggccgccgtagcccgggtgaccgcctcaccagcgcgttcaacccgcccgcgtcaggcccgtcggcctcaaggacaacggctgcgttgctccggagccgctaactaatggacggccgcctctctcgtccatttgtagtccgcggccgacctgaggcggggcctggagaggctgacggggcgcagggcaccctgggagtcgtagtcgccgcgggcgcgccggcgcagagcaccctgggagtcgtagtcgccgcggccgcaccggcgcagaacaccctgggagccgtggcagctcccagggccggggctgcgggccgcaagtgcgcgcagcgggaacggaccttgcatcgctcccgcgtggtcccggggtcctgtccggccccacggagcgggatggtccgctgaggggtgcgctgggccccgacttcctggccgctgtgcgcccgcccctcgtcccacttgtgtacacacggggtctcggcgagtcactccgggcaatcatttaggaagcgcctagtgcgccacggtccagctgtccgggccggtgtccgcggcggctcgcgtcgcccgccacccagcgcgttggtttctgcgcacgcagcttacagtaacgtccctggcgcgcttctgctccgcgagccctctggttaccccggcaggaacctgcttttcttcgccttagggggacgtcagacaagggccaggtcagaagaccaagctggagaaatgcaccaggccctgcgtcaccgggacg

SEQ ID NO: 51687 - DNA, 2152 bp, Homo sapiens
gatgagggtcagcctctggagctgtgaaaacctgggccgacagcggaggcagagctgcactaatgttcccacacgagtccttcccacccaacaccttggtgcagggagacggaaggagcctggagccaggggtaaggaagagagggaacccctcaccgattgggcataagccactccagggaagcaaggagcttcttctccgccttgaccccgcccttggcaggccggccgaccagcggggacgacagggtcacggtgtgccagagcgcgggttgggaagcggcctcctgccagcggcggcacacgcgcgcagccctgggaggacagcgtgctgagggtgccggcccctccgtaggcgatgcccccctctcgcagcgcagtagacaccccggctcaaagccgggctcctgggactccaactgggcgcctaaggggctgcgctctcggactgagcggtgcgcgctccgatgctttcgccctccgcccccgcccgggccaccgctcggaccacgtctggcccaagccgctacgctcggcggcgggcccggcaccagcgttacctgcccaggaagggcatggggccgtccgccgccaccaacaacccgaaaatctgcaccaggatttccaagggaatgcggtctccccagcccgcgtcgggcccttcctcgggcgtgggcgtgggtgccggtgcgggtgcgggcgcggccgccgcctcggacctgagcccggccttgggcttggccgcggcgctggggccccggggcggctgccggggagtgcggcgggaagcgcgccgctgtgcgcggggccgggcggggccgggttcggacagcaccagcagcatgctgtcggactgcagcaggtggtaccccgagcccctcggcgccagccggtcccaccaccagtcctcggccgagcggggccgcggcgctgcccgggctctgcgtcggacctgccgggaggctggggcagccatgaccaccgacggcgctcggggaagccccagggagcggaacgggcgaggcttatagaccgacaaccccccggttcctctcaacgcccgcccgcccgccgaccagcttccggggcgggacttccggtcgtgggccatgccgggggcgggcccggaaccgccacgggtgagtcgggtcgtggctgctgccgggtcctgcgcgctccggactgaggtggcgtccctgggccggacggcggtgtcccggcgtggcgggaagccggcactggagcgggagcgcactgggcgcgggaccgggaggcgcagggaccggacggctcccgagtcgcccacctgacggtaccgagagggcggcgcccctccgagcagagccgtcccggccactcccctgggatctgacttggctcttgcggtcgcgggcaccgtgaagccctggggtgtgcgtggctcctcctggtaggcgccctttcccggcgtccggcttggggtggtggtggcgttgactccagccccgcctctccctggagaggagggctccactcgctccttcggcctcctcccctggggccgcagcgactcgggccggcttcctgcttccctgcctgccggcggtcccgctgggtacgttttagccaatcctccccatctgcgctcctgcccggggctcccccagttcccctggtctcaccctgttctgactccggctctgcatcctatctgtttctctgtttctttcaagctagaagaagtcttcacttcccaggagagccaaagcgtgtctggccctaggtgggaaaagaactggctgtgacctttgccctgacctggaagggcccagccttgggctgaatggcagcacccacgcccgcccgtccggtgctgacccacctgctggtggctctcttcggcatgggctcctgggctgcggtcaatgggatctgggtggagctacctgtggtggtcaaagagcttccagagggtgagtgggagggaggtgcaggtgtgcccaagactcctgggctgcggtcagtgggatctgggtggagctacctgtggtggtcagagagcttccagagggtgagtgggaggaggtgcaggtgtgcccaggaaggtgggctttggcactcttcctcccttgggcatcatgaccctgacatggcctcctcccttccctgcagg

SEQ ID NO: 51688 - DNA, 2049 bp, Homo sapiens
gggaggaggaggggccactggtgggaggaggaggggccattggtgggaggaggaggggccacttctgagagttgtgaaaaggccttgaggcctgaaaacctcccactttcagctactgtggcacccttaggccaagctgactcaggagccctcgtggattccacaaggatggtgttttgtttcatgctcacagtggggtctaggagggcttgcaggcagtaagtgccaggacccgtgttggcgcccgaggatccctggcatgttcggggacggtgaggtcagtccagcagcggtgaggtcagtctagtagcagtgaggtcagtctagtagcggtgaggtcagtctagtagcggtgaggtcgtcagtccagcagtagccttgctggctgcatggcatgcccgggcctgggcccctacccagccagggctgtcacagagtgagtagcagcagcctagggcactgcaggaggctgtgacgtcactgacgttcccataagaagctaagtgacagggaccaagggtggctgcaaagtgaaccccagaatctgaagccctggccctgggaaggtctccccatgggcacgggagctgctccaggacccctttggccactctcctggttgtcttccagttcccagtcaggggcgtcatcttggccctcacacaggcaggtggtgagttggagtcctgaggttaaagagattcacgctaatcacactatagcacggagtgttaaagagaggcggataccgggccgtgaggacctcaggaagccctcagccctccccggattatccacgtgcttctcacagcggtccttccggcaggtgcctgcccggggaatgcgcagtgcgccgagggcgggactggaaccctccgctctcaggaggcgcggtccgggcgccaaaaggtaagcctctgggggccgccaggggacgctgccccgccgcggaggccggcacgactcggggcgtggcctccagcctcgcccaccgcccacggggcggggctctggctccggcgcgtgcgcactacgcgccctcccgcagggcctgctgggctgcgagacgctaagcggcgccgggcgggagaagagcggagcagtggtcggagatgtggcgaccggtgaggactctcccggcccggggcgcccgagatcctgcacaccagccccagagacccgagacccgcaagtccccagaccccgccctagagaccctcggggctttttccctctttttttttgaggcagggtctcgctctgtcgccctggagcgcagtggtgcgatctccgctcaccgcagcttccgcctcccggactcaggcgatcctcccgcctcggccccgcaagtagctgacaccgcaggcgtgaccgctcccggccgactctgtttagcagagtcggggtctcgccgtgttgctcaggctggtctcgaattcctgggctctagcgatccgcccgcctcagcctccccgagagctgggatttcaggcgggagccgcgcccgcagccctgacgccgcctgcaccgggagccgcaggggcccctccgcccagcccggaggcgggtgcccggcgccccggagagcgcgatctccagagggcaggggccccgcggggaagcctcaggcgccgttcccctcgcgaggcggcctcccggaatcacggacgcctccctgcccagcctgctgccccggacctccttcgctcgcctccccgccgggcctgccctgccctgaggcggcgggcgggcgggggctgcaggccgggctctgctctgagcgcccctgcgtcgtctcaggggcgcgccccccatggctccgaggccccctctctcaggctctcggcgtctccccgctcccacgtcgccgccgggtcccgttgctctgtccctgcggttaggactgcgggggggcggggcagaggccttgacacgcatcttacccacccccttccagaagagatgaaggggctcccagcgccgttcctttttttcttggaatgtcagcagagcttgtgtttggcgataagctagccttgcccgtctggc

SEQ ID NO: 51689 - DNA, 1845 bp, Homo sapiens
ccggcaaccaaaacaccactgtatttcccaaacccttgaggcgtgtgccccactgtaccaagactcctgtcaacagtctgtccccatcctagacctggccttgttccttgtgctaccaatgtccttcccccgacaaactcccgctctgcctcagacaggctcttctgatcatgcgactggaaatacacagtctccttccttcactcctttattcccgcagcagcacttgctgcaggggcaggtgtgtttatttagatgttccccttccccaagtgtctgcaggtgtggttcacatggtatctctgctacccagcgcacagtgggcgttcgctccttccgaacaacttgctgaaaaaacggaagagcaaacaagacggctagggcagcgcgcccttcccggtggggtaggaagggaggcagaacagggtagcagctgtgagaaaggatctgagcacaagagattcagggtcatgtcctggctcctcaggctgaggaacgttaagcaaatcactcaacttgtctggggcttggctcttccatctgcaaccgggggcggtgagagcacccacgtcgcggacagcggggagggctcccagggcccgacctacctcggcgtcgcggttgaggcggtacacgtagagctgcgaggtcccggccactaccaggttgcgctcgctgttgttgaagaagttgcagtacatggagaactccagaccggtgggcggatgcgcctgtttgtacacggcgtacatggcgccaacccgggctgcgcaaggccgggagaggaagggtgagcggggtcgcccacgcaggagcccggccccgcaccgcgcccctccccggcctcgcgctgccgcctcggccgcccgcccggccgcccacctggcagttggagccgactcgagaggaaccgggacagcagcgaactcagtccggccgggcccagaagctgggcgggaaggttccgggcttctgcgcctgcgcagcgccgccgcgtgagcgtggctgcaggggcgacagcgggccctagtggcccgggatgcgggcggctggcggctcggctccgggctgggcgtccggaacccaaacccctagcgcgcgaagtgcggggcctccgctgcgggcggagcagcgcgggttggaagccgcaggggcgccggctgcagcggctcggggtcggccggggggtgcgtccgcgccagacccaggacggctgcagggagaagcgactccgctcgtagctcccgggttcagggggcgcgccggaatccagaagagggggcgcggcgcctcgccagtgtctggggctccgagaaagcttcctagagaggccgcacgccccctctgcccagtgtccccgcgcagagcgacccccgccgccaacactcccgcggaggacgcaggaccccgcgagcccagcgctgtccgcccgccttgctcactgctgcctacccagggcgggcccagtgccagcttccgggagcttggatcctggatcaggcacgggcctaggacctagaaacggaatcatgagaaataaaacaagaaagtatcgttacgcccaagaaaatggcgtggaaatatgtgtttttgttgcatccaaatctacttgctcattgggcagtgggggaagggccacttggatgctcaggcgtgtgacccctgagccacactcaaccgccttttaaaagtcaataggaggcggtggctcacgcctgtaatcccactttggaaggccgaggtgggcggatcacctgaggtcaggagttcgagaccagcctggccaacatggtgaaacccagtctctactaaaaatacaaaaactgtgggggaaagagagagaga

SEQ ID NO: 51690 - DNA, 3345 bp, Homo sapiens
ccactgcactccagcctgggagacagagcaagaccctgtctcaaaacaaacaaacgaacaacaaaaaaaaccgacaaaaaaagacagcccgtaagtgccaggtcctggagacccagggctccatgaagagctctcctaagctcaataatggtgaacacacagggtgctataggggctaccagaaaaagtgaggtactatggacactcaggagagcggggcgggggctgcagtggagtgtggttcaagctggaggttgagggaggttatgagggcggcaggcagctgtttgatggcccacgaggagagtttggggcacaggaaacaacacacttaacagcccgcctttaagtaggcatgaacttggaggaaccaacaagctgaaggtgcagcttctcgaaagagggggtcctagggaatgaagatggagaggtgcccctagttgggcagcgagctgtggagaaacaatgggagcggggcccgtgggagggtcctgcctagcacggaagctgggccagctccagacgttctctctttgaaagtggagccgtcagatccgccgagggatttgagataggattaaaataaaggagttacgaacgacacccctgtttttggcccaatgggccgggcagtaagataaactcagacggagaggggaggaggagcgggcctggcgggcaggcgcaggaagctctcggtggagaggcccgggagagcagcgctgagccggctaactgggagtggacggtgctaccggggatgggagaagagcagaagtgagggaaggccgcccgcgccgaagccctggggcgccccagccgaggaagagccgggaaagggcgtcgccgctcatgtaggtagggaacgtctgggtcaagctctccgagggtcgaggccattgcgagccgcggggtggggaccgaggctgctcggcagccgtcacggagccgccaggcaggagagcgccgaggagccaaccgccccaaccacgcaggagcttctgcctaacagcgaaagcggacgttctgcggccacaagcaaatgtgcaaaacaacctcgcagagtggacaacgagcaaggaaagccagtttctagaacatgccaataacgtgacttttgcggcgctcagccgaagctgtgccggggcctaggcgcgcccagagggtgccaggccctgagtcgcctctccccactctgccccttccccgcccaccggccgggccccgggtacctggacggctcgcggtcgggaagatggcgccgggggcggggtgcgctcggtcagcgactcggcattcgcccctcatgtctgcgcctgcgcgcgtcggggcgaccccccgcccctccgtccccatcggcagctcggcgctcagccctcacgcctgcgcccgcgcccgcccggacttcgggacattccctccagccgcgcagcccccgggacgtaaccggcgcagcagactcgaagcccggtcttaccccgcccacccgcctgccaggcagccacggggagggaggcagcagcttcatttattttatttttttttttttttgagacggagtctcggtctgtcgcccaggctggagtgcagtggtgcgatctcggctcactgcaagctccgcctcccgggttcacgccattctcctgcctcagcctccggagtagctgggactacaggcttccaccaccacgcccggctaatttttggtatttttagtagagacggggtttcaccatgttagccaggatggtctcgatctcctgacctcgtgatccgcccgcctgggcctcccaaagtgttgggattacaggcgtgagccaccgcgcccggccagcagcttcatttattaggggcttcggtgagggtggggaaaggcagcgccagggtcagaggcgccgaaagaagagcttggagccgtggtccagcgtgcactcgccggggcccggccgactgggctgcagctggcgcagggcgtccctgtcctcagcgcagaggcgtctgctgcacagctgcagttcccggagctgcgcggctatcttgtcccacaggcccaggcccaggggaccctggacggcgcagcctgcggaggggaagagggcagacctcagcgctgcgggggccggcggcgtcctggtgcccgcggcaggctccagggaacaaactcgctttcgctgagggccccagggctgtagcgaggggcagtgggcagagctccggagaggccccatgactctccaggaaggggtgggatcatctgcacagccagcggtcagacaggaggaagggtggctcccttctttacctctgacagtgcccgatctcaaagtccatgcctacacgtcagtctccccacccataagaaggacataatggatctgcttgcaaatctgtacatcgtgggcctgagtggatcaagagaacactaagctcaggaattcagggagctgggtgggaaggtacagatgccaggaactgaggtgtggggaaggggtctcacaccagcactcgggggccttcctggaaaaggcggcctggccctgggaggtgaaggggagggggcacaggaagaaagcagagccccgcttcgtgcacattcacttaagccctcatcccctggagggcacagcctgccccggccccagtggggcaagccaggtcatcaaagcccttcctggggttgtcttccagacagctcaggttggggactgccctgatgtggctcaagagagaacaagctaaatcagaccacagccctgggcagggttgtgtcagaggagcccctgccaggaagtaggagggtcccttggcagctttcaacaccctgaccttgggatcccttttcctgccagggacaagaagaaagtccctgtggaacagggtcttgcctaccatagtctgctctgaaggttgggttggagagaccagaggcagatacccacctcgccccctaacccatggttttaggagctgggatcatgccccttttctgtcactgtcactctgccccctgctgccccagcctcatggagcccagccttgctgcctggctggtagcagtgacagccccttaggaggaggcacctgggtctcaggcaggtccctgaaaaggccgaacatggcaggcgtggccaccataccagcactcacctgacaggccaaggaagctaaggccttggggccgcttttggagggtggacaggagctcttccaagctggcacagctgatctcagggttggcagacagatccagtgagatgagtgaggggcacagagagagacatctgagataacatgggaagaagtgcaaaggttggcttccagagaggctgtgccccaacactagga

SEQ ID NO: 51691 - DNA, 1142 bp, Homo sapiens
atggccggccaggagctcccccagctggtggcacagcgcggcctcttcgcgccgctgcccggccctctgcgccttggctttcgccttgctcagctctgtgggaggaagaggagggctgggcctccgcggcggggtccggggccggggccgagtcccaagccctccccagcctccgcgcccccggaggaaggggtccccgaggaacttacggcgaagctcgcgctccaggctcatgctcggatcgccgcgggatccggacttcccgcgctgcgccgcggccccgcccctcgccgccgacacgcaggccccgcccctcgccgccgacacgcaggccccgcccctcgccgccgacacgcaggccccgcccctcgccgccgacacgcaggccccgcccctcgacggcggcggcgggcgcggggcattccgggaagtacggtcggcccgcccgcggcatcctcggagttctcgtgcgggaggagctggggcggggtggcggcgacaactggggcgtcccaccctaggggccgtcttcccggacgccgggttggcccgcgcgtggagccctctgcccggcccggggagtgcctggtggggaccccgttcctcctcgtaggcggcggggacgcgggaggccgggggcccggagccagcccgtccggggtcgcagcgcgccctgggtggggtcttctgggctgcagcccccgtgccgcccgcgctactcatggtggacgagctgtgccgccgccccaattcctcccgaaattcacacacacagcctgctcacaggcgcaactattaaaaacgaacgtagtgtccagatagactgacgataaattcacgagcatttggctgtggggacgtaataaggtgtcaggcgcgctcctcctccgcagaacgcagctgggtcacatttggggactcggccccaaggactgttttgggaggggaatgtgctttccatagtgaacaagtattgtttcagcaatgtgtatgccagctgtattctcggaagagtcagtgaacctgtgcttcagctgcagaagtagcccgggcacagtggcccgcactgtaatccgagcgctatgggaggcccggtcaggaggatcgcttgagcctagcagtacgagaccagcctgggcaac

SEQ ID NO: 51692 - DNA, 2974 bp, Homo sapiens
tggactacaggcaggagggggcacagatgctattgaagcagctgtcctgtgggaggcacagaccaagggcccacaccactgtcctctcacagccccccgccccccggaggtatgccactccacgtggccagctctaaacacctcctggtgagactgccgggggccttggacgaggttctgggtccagctctgcacgtacagtggccttagcacaggcaaaacagcactcttcttggctgtggcccgacccccaagggagttccaggcagggctggagcatctaatgccacccaccaaggccacctggcctctcttcctggctctgcatagcccaggaagattcgaggtggggtcctagaccctcctaagggagcactgaggctgccaagcacatcaccacttacctcccagcactgcgggcctctcccccgaaagccaccccagctcctgggccggcccctggccacaggcctcattcctttggggcctccagatcccagcatgggctcagtcaattccataccatgaggaggcagcagtgaccctgccctcctctggctctctctgggcctccaagaggacctgcaagctccgaggagacacagggccattgccccttcagccccaatagctccattcaagtcagaacacagggagtccctagagtgccctggactacactggcccagtagccaagggacacagccacactcacccccagaccctccccactggtcaaaggacatctctaggtgcatggcccggtcccgaccaacactcagcccaggaggtctgtccacagcaggacggtccctggtcacatgctccggagcctccccaccatctgggtcccctcagcccctgcgcaagactctggctctacaccaaggccaggccacaggcagctgcatccttggccctggcagcatctggccagatgcacttgattctgacttgtgcccaacacccaacagaagctgggccctggagggcgccgcacagtccaggggatggcgtgggccaaggcccccaagagcccgggcaccttccagagcagctgctgtggcacccaggccaggccacctctccccaccagccaggaagaccccaagggaggggagaggaggggatccacaaccccccacgaccaagaatgacgccatgggggatgacatcatgggcgagacatcacagaggatgatgtcagaggggtgacatcgtgggaaattgacatcacatggggaatgacatcatgggggagacatcacgggaatgatatcacgggatgatgtcacatgaatgacatcacaggggggacatcatgggagactggcatcacatggggggatgacatcaccgggggatgacatcacaggggcatgacattgcaggggaattgcatcatggggggtgacatcacggaatgacatcacagagatgacatcacactggcatcatgagggaatgacatcacaggggatgacattacggggatgacatcaaagggagtattgacattacaggggatgacattgtgggaaattgacatcatgggggactgacatcatggggggatggcatcatggggggaatgacaccatggggatgacattaaaagaggtattgacatcacagaggtgataccacaggggatgacatcatgtggtgacagcacgggaatgacgtcacatgtatgacatcacaggggaatgatgtcatgggggaatgacatcacgggggaatgacatcacagggcctcctgggccctcctagggcagatgtgggcttgaagccacagtgctgggctcagacgccagcccacagatccccagtaatatgaccttgggctcccctcttggggcctcagtttcctcatgtgcacaggtgatgagtataggaccagcttcattctgtgctgatgaggtgggatgggacagggtggcactgccccacacccaacaggcagacaggaaatatcaccaccttgggcagccatggcagagcccctggggctgccaaccccaggagccagaccccaggcccctctgcagatgctgatacacacaggtggcccagaaatggccatttgcacctgcatcctcaggacagcacccagccctcccccctgctggctacaggcagctcacgtgacccccatgcagacccagggtctccacctgagctacttcttccctggggttaaaggggagctagatgggcggaacaggctcaaggagccctgaccccatcccctggctgagggcccccacgatttcctggtggtcccaaggtctctatggtcagctgaccttgtaggacccctttcacacctggactgcatggttctctcagaccctggggacctcctgtttgccactggaggatggcacagtgcccaggcccatgggagcagtgccctcgctcacccaggggtcagggacccacaggcccttgacagaggtcgtcagagccaaaatgcagccaaagggcttccctgtggcacaaaccccaaaagcgctgctcagccagttggaggtcccccttcctctgccatctgcatgcaggcaaggcctcaccagggccagtggtgcttcagggcacaccccatgcaccccgcgtgctcggcccctaacctcccgaatcaaacatgggtctgagagggactggcacgttgtccaaggccgcacagctgttaagcatgaagccaggactcgaaccctccacccaggctggatttgaagtccctcacctgctactgctgtcagacctcaaacggtggccaatcaatccccagagtcgggcccacattcagaacaaggctgcttagatctaaaagtaactcaaatgataaccaccacagaaaacaaaaattccaactagccagagattccagaacatcttccttgctcctgtgttttagatacctaagcagacgtatttacaaagatgttttctgccactttcctcacctcaa

SEQ ID NO: 51693 - DNA, 2263 bp, Homo sapiens
gtcaaacccacctgggccaggtaccctaacagccctaggctgcttaagggctgagtcccactgccatgcggatgtgaagatgggggaggaggggtgggccggctcctggagcactggctgcctaggaagcctggcctggcctgggtgaggtgggcaggagcctagcgtggggcatggcaagtccagttggatgtggggtttggctgggactggagaaggtacccaaactgtggggcttgttgcaaatggttcatcccgacaaacagcaatcccctctccttactgttcttcaggatgaactggaaatggaccaagagaaaggattcttccacccaggagggtagaaaaggaggcgtccataggatgttcaggagtggagggacaaactcgggggtgtggctgccggaagaatggggaaggagctctcgagcacaggactctgagcccagggagcttgggaccgggtgggttgcggggagcagttgcgggctaaggatcagtttgaggctgtgggttgggagagtgttcaggggaccgtggggaagtctagaaaaaagaagggagaggtaagcggaagacaagcgattcagatcgggaagtaccgtggatcagaaaacagaaaaggggggtcccgagcggaaaataaagccctgagagaaagacaacgaggagcttcggagcagccgctggagccccgctgggcgaggaagtggctgtaagggccagagagggttcccggccgccgggccccgcaggcctggcctccgaggagacgcggatcctggggccccgcggcgggggctgcagccccgggctgggccgggtcggggtcggccggcggccctacctggtacacggaggccttgggcaggtccaggcacacggtgcagcacagcaccgagtagagccgctcctccagtttcccgctgccggccgccgccgccgccgccgccgcctcggccgcctcggctgcccgcagccgcttcttgggcggcgcgtcggggtcgccggccgcctcctgcagctgtagctgccgggcgcccgccaagcccgcctcgtccgggagcccaggccccgccgcctcgcccagagccgccgccgccgcctgcccggcggccgccccgggcccggctccgaccccgaccccgaccccggccggcacggagcccgcgggccccgcggccgggccgcccccgccggcctcctcggcgccggacatagcggccggccggcccggcgggcggatgccggcgcgctcccccgactagaagttaggggcgccgcgcgctcccgccgctctcctgccgccgccgccgcgaacccgcagccccgctccctgcgccgccgcctcagtgggcccggcccgcgcgtagccccacagccgccgcggccaccgaccccggcacggccgccatctttgttttcgctgtgcgcttccccccgccccgccgccaccaccccctcgtcttccccgtcacgtgagccccacgcggggccaatgggagcgccgcttggggcaagaaagcgcagggactagagccaatgggagagcgagggcccccgaaggcccgcccctgcagaaggtgggcggggagggggcgcggcctgcgagagtcgcggagggactcgcacctgggggcagggaggcccacgcgagctgtggcgccggcgcggcacccacgctccacgagccagtggcggccgccgacccctacggcggggtgtgcctgtgtctctgtcccccaagactcaggcttgtgttaggggctctcgcccccttccccgcaggggaaggacacaagtgaaaaatcccgccggccacccctctctgtcgggtgcgggaccccttaggtctccacaggagcaagcggagagacttccaggagaggggactccagacccctaacccaccggaatctaatcctctgctcgtccgaaccccctctaaccctggggttggagactgaaggggtccactgaggaaaacgaaggtattagggaatagggctggcttccacaggccggaggtacacaggagggcgaatcagctctgggaaggatgtgcgtttctcgaaacgcctgtggtacagccctcccctgcctccaccctactcttcagttcttgaaggtcactgccccagagggccacctgccaggccaggccaggatatctggaactccaccatgtccctggagagtaagggcccagggctatgtcttctcagcccaggggtcttcctgacaatagtcaaaaggaggccgg

SEQ ID NO: 51694 - DNA, 1186 bp, Homo sapiens
aagaggccggggtcacccttttaaacaggaaagggtttggggcttccatggagacctggtcttagacgcacttcccaccaacctctctctaattcaggaaactaggtccttggggtttgggaggtatggggatgcgcccctgctcagccccagtgtactcacctcggctgtgctcacggctgcgtgcagagacaccactcccagcaccagatgggacagggctgtgctccactcggcccccggcttgggggccatggcacctcaggcggcagtatgtacgaggacacagataggagatactcaactttggagaggaaggaagcgcagaagccagcgacctggagccctacgcgcggcactctagtaagcccaggttccaggtccccattactggatgttaggagaagttcagtcctagactttccggatccctgaggccactgcacacacctgtggagaagaagaacctaattcagccgggaaacgggggaaaacgactcagggtctaagctggggggaacgtcagccctggggccctggagcccaagtgggagtgcgggcctggggaagagagagcggcgaggcgctgcaggcccacgcggcggcctcggcctgctccctgcgttccgggaggcgttgtcctgggaacccgggtccaggaggagcgacggcgcaggactccgggaggccagccgtgcgcagttaccgggctgcgcggtcccaacgcagcggcgagcgggaggcccgagcctgcgcaacgcaccgcccaccgccgtcggccctgcctcctctgccgtgcccccagttgcgggagcgagcgcggtcgggaacctccaccagcgagaggagcggaggctagagcggccgggcggggctagagcggctggggggggagggtcgaggcctgggggagagggtcgagacctggggggggccggttggaggccgtaggagcgggtggggtcgggaggagctcggggaccagaaaacgctctgtttgggtgggtgcgtgcgtgggcatagtggtttggaaggagcgtgatgaggggagaagggccggggcggggctgcgaggggcggggtctgggcggggctgcgaggggcggggggtctgggcggggctgagggagataaggtttaggcggggctgagagcggcgggtctgagagggagggggcctgggtgg

SEQ ID NO: 51695 - DNA, 1119 bp, Homo sapiens
ggggttggggcgcgccgggcggcgccgtgagaaacggcgggtctccaggtgcggccgcgggcacctgtttctagtacccccgtccccgcgctcgccttccagccgtgggagccgggccgtgggggcggccgtcgcgagcatgcgcaccggcactgcggcgggcgggcgccgagtctgggcgcggggacgcggggcggcgcgaagcggggccctctgccgccccgcgctcccatgtacgccttttactcgttgctcatctacatcttctacagcctcttccgcagggatggtggcgccgcggcggccgcggagcccggggaccccgcccaggtgagcggggctggccgtgcagcccgtcgtctcccgccgcctgccccacccccacgccgaggttcccggggcgggggcgggcacggggcgcggggcgacggggccgtgccgaggaccctcggctcggccccgatgctggaagcgtagacttcggccccaatcctccggcccggttcgcggagggaaggggccagcaggctgcctgcccccctcctcaggggcgcccctgccccctccctagagagcccgcaagccccggggtcgccggcgcccagacctgcccgcgccagagctgtggaccgagctgaccggcctggccggtaggtgcgggctgggagtcccgcggtgcgagggcggtgccgggacctcccagggaggggcggaggcctggctcaagcacgtgacccgaaatgtctcccgccctcctccctgaccggcagccagctccgagcctgaggatgggtcggaaggcgcagccgagggccgcgcggccgcggtgtccctggaagaggccctactgcgcctcgccgagttcctctccgtccagctgggggcggaagagagctgcgggggcccggcggacctgggccaggtgagcgcggcggagggggctgctggcaggtaccacctgccccggccttcctggctttcacagccctgctcggattcttgtctccttcgcagtctggcgaggtcccctcactgttgacagtgaccagtcagctcttggcccttctggcatggcttcgaagccccagggggaggcaggccctgctccaggggactcag

SEQ ID NO: 51696 - DNA, 1894 bp, Homo sapiens
ggcgtgatctcggctcactgcaagctccgcttcccgggttcatgccattctcctgcctcagcctcccgagtagctgggactacaggcgcccaccaccacgcccggctaatttttttgtatttttagtggagacggggtttcatcaggttagctaggatggtctcgatttcctgacctcgtgatctgcccgcctcggcctcccaaagtgctgggattacaggcgtgagacaccgcgcccggtctcccgtaagttttaaggcacccccctctccactggcgcttccttggtggggcgctggaggctccccaagttctgaccgctcttctccgaccgcactgtcctgggcccgaaaccacccccaaagctgccacccattccgctggcgcccgtcccgttgcccgcgatgactcggttttgtccagcataaatcaatgaccaccgtcccgggagccttggagcactttgagccattcccgtcccacccacgccccaaggaggtcccagccgcggaggactcgcccggccgcccgcagctgtccgcgttggcccccacccccgaccgtccctccccaggccccgcccccgacatttcctcctcccaggctccgcccccggctcccacggggcaccgcggcttccggctatgggtaccgcgggccggaagtgtagcgttgccatggcgagggccgggtgcggggcccgcccccgcagcgcctcagggagcgcggggcccactgacccgcggaagccagcggacccacttgtgcggcggtcggcgcggggcgcgaggtgaggcgcggactcccgggtcctgcggcgggagcggagcgagggagaggggccccggccagggagagcagtggcgggcccgggaaggaggggcactgggtcgacaccgagagaggaggccgggccggggaaggatgaggcagaggagagggaggaggccgggaagggcgggaggaggaggagaccgaagggagagaggaggctggcgacggaggaggccggggaggggccctcgggagacgcggctgccggcacgcgggcgcccagggcacaggtcccgccgggccgccttgggcgttgctggctgaggcccagggcagcaggtgccaacggtcaggaaaggcagggagccgaaggctgccggtgggcgcttcgcgttttgttccaaggcgaaggtgtgtggattctccgcagcccgtcggtcaggtagacagctccggaattgtcttcattttcagatgaggaaatcgaggccgcagagaagggacttacccaaacttaagctttgtgtgggccttggagctaggctgaaggagaaagtggagtctcactggggcaagttccttcaactttcagggattcaaatgacctcacttgtagtgcggggcgtccggaccacccctcaggaattgggatcagggcaagaattactaactaagcaagcaccccgcctgggagggagcgtccaggactggtgtgggcccctgtctgtaccagagcggaggcccggggcacggtgggattaatttccatgggtgcagagaggggagccgtgtacggagtcattctaggcttaggggagacagagcaaagttagccttccccaaacctctgtgccttccttttcttcctggattcctacctgggggtggaggtggaggcgggggtaccgctgcctttctcaaagtgtgtctagtccagcagtgagccctcctgggcgtcttggcgccccagttgcttcctggacgtattggggtttctctgggagaagggtcttgcctgcagtaccctgggcctcctgaagaggcctctggttgcgctgcctgattcagggacccagagccacgactcgccgagaggagctccggcggcgtgcggctgggt

SEQ ID NO: 51697 - DNA, 4775 bp, Homo sapiens
ggtggagctgctcgtggcgcacggggccgacctgaacgcaaagtccctgatggacgagacgccccttggtgagcttgcggggcccacctccacctgggggagaggacaggcggggagggcgcccctgacgcctgcgcccacttctcagatgtgtgcggggacgaggaggtgcgggccaagctgctggagctgaagcacaagcacgacgccctcctgcgcgcccagagccgccagcgctccttgctgcgccgccgcacctccagcgccggcagccgcgggtgagcgccgcccccagcaggccccgccccgggcttggccccgcggacgtcagccccgggcggagtgccagccgaactgggggcagagtccgagggggtgggcggggtcctccgggcactccccttcccctcactccctctcctctctcctccccaggaaggtggtgaggcgggtgagcctaacccagcgcaccgacctgtaccgcaagcagcacgcccaggaggccatcgtgtggcaacagccgccgcccaccagcccggagccgcccgaggacaacgatgaccgccagacaggcgcagagctcaggccgccgcccccggaggtgagcgccccgtccctgctccgcccagcgcaggggtgggcctggctctgccctggttctctctccgcttggaccccctcctgcctgtgtcaggaatggtgccctgcaggggccagcttttgccccatctctcctgtctgtcccttcatgaccatacagcctgaacccaaggccagggaggggggaggagcctcctgatggctctgggaccttcactgcccgcaggaggacaaccccgaagtggtcaggccgcacaatggccgagtagggggctccccagtgcggcatctatactccaagcgactagaccggagtgtctcctaccagctgagccccctggacagcaccaccccccacaccctggtccacgacaaggcccaccacaccctggctgacctgaagcgccagcgagctgctgccaagctgcagcgacccccacctgaggggcccgagagccctgagacagctgagcctggcctgcctggtgacacggtgaccccccagcctgactgtggcttcagggcaggcggggacccacccctgctcaagctcacagccccggcggtggaggctcccgtggagaggaggccgtgctgcctgctcatgtgaggctgttgctcagcatgcaggggccctgtcgcgggcacagcccaaggctgcctccccacggtgcgtgccctggtgctgcgggtgcagcacggaaaccccggcttctactgtacaggacactggcccctctcaggtcagaagacatgcctggagggatgtctggctgcaaagactatttttatcctgcaactcttgataaagggctgttttgccatggagcctcgttgtgtgttgtgtgtctcagctgggtcgctgtcccacagtggggagtgggttgtgctgtttggctggggtgccacccgtgcctgtgagcatgaaagcctgtaggtgcgcgctggggcatgtggcagccctggctgtgtgggagtgaggctcacagccactgggctggaagcctgggcctcacccactccctcccatgctcagcctcctggagcctcctccgtaaccctttgctctcctgagaggagccaggtgctttgaaggagcctccatgggggccagggcctagggtgtctgtgctgaggggcggaaggtgggggtcccagggaccatggcttggaaagggaggtggtgttttccacaagactcttgtgtcagagccagaggggcaaaacaagcacaaggctgtgtcagaagctccctgggggggttgtgggtccccagttcctggcacgcagccttaatcctggggcctggctgccagcttccgcctgggctggcataggggacacgcagttggccactctggctctgagctggcttggcacaatgtgtcagggtgagggggccccttaggggcctcaagcaggagggctgagggcaccgctggttcgtctgttcatggtgggcggctttgtgtggccaccagtgctgggtggtgtgggtttgggctgttctccctcctggctcagcacgggcccgtcagcccagtgtcctttgggcctgcccttcccctagcatccctggttggaagggtgtcctcacagggctgtgggcgggccagggctggctgctggttaaatttagtgtggggggtggggcagctgcccaaggtccacctgccaccagggctgccacttggactcccttgccagggggcgggcaggggctggctctgcctggggccaggcccatgttaacctgtgccccggcctgggggccagaggggcaggcctgcgcacggggaggctgttgtggcagcggaacagagacgtgcacggtgagaggcctgggggccggctgtccagggctcccgatggcttttctcccagccagcaggatcagaggagccaaggtccgacttgggcctggctggttgcccacagccctgctcagagggccggctccctgacccccatggttcaggtttcggtgcccgacgctggggtgggccagcgtggagcctggcctttcagctcagcaggcctgtggaggtggggctctgacggcctatcccagctcgtttcctactctctcctccaatcgggaacaagagggctggagagctcaggtcacccctagcctcgggtgtgtcccaagggcaacccccagctggtgcctggtgaaagggcatgacagcagccacggtgtgagctgtcccagggctcagggctggactgcctggctccagccccctcccccagcccctcgcagtgctcatcagggaccaaggtccagctacagagctcttgcagcctctgggccatagctgccagctctggagggtccagatggaacccagagcctgaacacccctcccctccccccagcaccccctggattcctgaggcctggctcagttaataggagacaggtccgctggcccaagcaaagatgcgggtgccacgagggccaggcctcggccaagccctgctggggtaaatcccagcagcccaggctccagtctcgcctcgggggtccctccttgccagctctgccagcccctcagggctgctgggcaccccttcacctcctgagcaccccaggtgctcagccctctccccctccccccatgtctagtccctcagagctgtccggactgacgtctgtacctaccccccatgtgggtctcctgctctcccttcgtggggacactaggcaggcactgggccttgccccaagccccgcctgccacctcacccactgcctctgcctccctggggcagagctgttcccagacgggtggggcggggcccaactgtccccagctccttcagccctttctgtccctcccagtgaggccagctgcggtgaagagggtgctctcttgcctggagttccctctgctacggctgccccctcccagccctggcccactaagccagacccagctgtcgccattcccacttctggtcctgccacctcctgagctgccttcccgcctggtctgggtagagtcatggcctcgagcacaggtgaccggagccaggcggtgaggcatggactgagggcgaaggtgctgacgctggacggcatgaacccgcgtgtgcggagagtggagtacgcagtgcgtggccccatagtgcagcgagccttggagctggagcaggagctgcgccaggtatggcccagggcccctcgctgccctccaggtcacaatggggtggccgagttggccccagccccactggcacatgggacaagggctgaggggttaggtagggcacagtctccctgcctgctcccctcccctcccagggtgtgaagaagcctttcaccgaggtcatccgtgccaacatcggggacgcacaggctatggggcagaggcccatcaccttcctgcgccaggtgaggctcctgcactgcccggagcacccccccacccccagcccatgtgccctggcctcagcactccgtcttcccaggtcttggccctctgtgttaaccctgatcttctgagcagccccaacttccctgacgatgccaagaaaagggcggagcgcatcttgcaggcgtgtgggggccacagtctgggtgagagccagggccaggaggaagcagagggccgccctgccactggaggagggaagtcccttgggagggctgaggagaacttcacctgtacttcccatcctgtcctgcccgagtccaggggcctacagcgtcagctccggcatccagctgatccgggaggacgtggcgcggtacattgagaggcgtgacggaggcatccctgcggaccccaacaacgtcttcctgtccacaggggccagcgatgccatcgtggtaggctgggcatgggcaccaagacattcctgacactgcagagggggcgcccagggtgggggacaggtgcggccccaggcctcgccaaccctgccttccccttcctttccgcagacggtgctgaagctgctggtggccggcgagggccacacacgcacgggtgtgctcatccccatcccccagtacccactctactcggccacgctggcagagctgggcgcagtgcaggtggattactacctggacgaggagcgtgcctgggcgctggacgtggccgagcttcaccgtgcactgggccaggcgcgtgaccactgccgccctcgtgcgctctgtgtca

SEQ ID NO: 51698 - DNA, 2816 bp, Homo sapiens
ctctggttgtggggcagagcccgtcagatcacacagaaatgggttgagagggtccagagtgtgaggaaagcgcaggccccacacccctttgtggaagcccccaagaatctagggagccaggggcccaggtggccacccgaagaaacacagcctttcctgaggaaggcacagtgaactgcctccttcctggctccctttcctgtgaggtccatgtcttccctggggcagggggaaatactaaaccagcatggtgctggctggtcagggtgactgacagctcaggaaggaagtcttggttctcttacccaaggaagcaggggtggggccactgtctggggggccagagaccacctttggtgtcattgtgtggtgcagtccttcggctgggtggagtgggaggcagagggagaggataagggagcgtcccaggggagggctggggctggaggaggcaggggctgggctgagcgggagtgggcagcgctgtgtcctggcctggggagcatggctgagcacctactacatgcagacactgctggggggtcactcaatctgcacagatgctcttctgaagtaggcatgatagtccccatttgatagacgtggaaacctgcaacccaaaaacctgctgagctgacaagaaaccccctcagaggcctcggcagccagaaaaatgcgttgggtccagtgccctcaagtccgccaaggacagggctggctttagagactcacaaacttgggagataggactggccaagggcacctggtttttttcgctctggagatggttcttaaccacaggccacacacacttcacagcctcatctggccctcgggagccccagagggcacagctctgggcaggagacacagcaggtgggcccctcccttggcagggcgggctcgaatcaggcagggtgctcctagccttgtcaccggacaccgaagggcgtcacgggcagtggctggcggtgtccttctgagctaagctgggtcctgacctttcacacttccctcctaacttccatggctctgtcaccgccttacggaggagctgaagccacagacacagcaaggttggggtccgcaccggaagtatccagtggtagacggcggaacccttaagaaacggacgccttcatgcgggcggctggagaagcgggggctgggcactgcagcaaccacgcttcggctgacaccaggaaggaagcacgcctggagcggatccgaaactactgagaggggccagggctggccgtgggcgcaggccgatccttacattcgaggccggcccagctctgtagcttccccctctgggcctctcacccgcgcaggacctcggtgggagcgcgcacgtggcggggcggggggccgcgggcccgagcccggactggccaccgggggcgcccgcgagctgacgctctggcccgttgcggtctctgtggcccgcgcgaccttccggccctggagccggtggccgcggggctccagcgacgccgtgtggtccgtgctccgctctgtggctccagggggccgagaaactgctgagagtccggcccggccggcagtgctgggcgcgggccgagggccccgggaggcagcggccccgccctctttacctgcggcctcgcagagcatgctgggagccgcgggaggcagtggccccgctcccctcacctgcggtatcgcagagcatggtgggagccccgggaggcagtggccccgcccccttccctgcggccgcgcagagcatgccgggagccgccggccgccggtgtccggaccgctcgcccccgtttggacccgacttcggttcttctggggtgttgatgctcctaaagcccgagagcacgtgtccagaccctagcctgtacgacgctgactctgcccggtcccagaaccaaagccatgccggggtgtggcctctgaccccacgcggaggggacctcgccttgcgggaccccacctggaacccgacctcccagcctcgcagccggcctgagccgccatgcgcgggaagttgctgccgctggccggcctctacctggtgcagggcctgccctacgggctccagtccggcctcctgccagtgctgctgcgtgccggcggcctctcgctgacgcgcgtggggctggccaaggttctgtacgctccgtggctgctcaagctggcttgggccccgctggtggacgcgcagggctcggcgagggcctgggtgacgcgcagcacggcgggcctgggcctggtgtgtgggctgcttgccgggctgccccctcctggagctggccaggccgggctgcccgccgctgtggcggggttgctgctgttgttgaacctgggtgccgccatgcaggatgtggccctggacgcgctggctgtgcagctgctggagccggccgaactggggccgggcaataccgtgcaggtggtcgcgtacaagctgggggccgcgctagctgggggcgcgctgctggcgctgctgcccaccttctcgtggccgcaactctttctgctcctggctgccacctactggctggccgcggccctggcctgggctgcaccagccctgcggcggctcccacagcagcccccttccgagcagcgtccccacaccgcgcaccttctgcgggacgtgctagccgtgccggggaccgtgtggacggcaggctttgtgctcacctacaagctgggtgagtgaggcctcgagccaggcaacagcagttggggcttccgggacagctccaggtgtgtccccaggggcttgcaacccattacagggccacgctctttctggggtatgacctgcaagacttggc

SEQ ID NO: 51699 - DNA, 1096 bp, Homo sapiens
cccctgggcagcccgcacctggctcggtcgccgcccgcgctgccgtcggaacgcgcgctcccacgcctgcagccgctcccgcacgtcccgcagccgctccatggcgcgcgcgcccgcccggcctccgcgcttgcgatcgtccagcgaatctcccgcgcagccgtcgcgggggccgacagccaatgcggatgcgcggcgggccgggggcggggccaccgcccctgggcagccagtccgtcgggcctcggacaagcagccaatgggaggcgtcaacgtcatcgcggggcgccgcggcgccgggcggggagcggcggacggtctaggcggggctggaggcggtggctgcggttgcgggaccggtgagcgcgggcggccgggggggtgtctgagcggggcggcgcacgcccctggccctgcctggcctcaaggggcggggcaccggtcgctcggggcggcctggccgagggaggcagtggctgcatttgggagcccggggccgaggccgggagcctgggaggtgccaccgcgggccgggaaggactgggagtccccgggccggtcggagcggcgtcaggccctggtgggagacgcatccgacctggaggagcaggccccgctcgggaggcgaaagagcggagggtccagcgcctcccgcggctcgaggcccggaggagccgggcgggggcgtcttcgcgaaacgcaggcgaccgaggaccgtcgcgttccctgcggccggcgggaggggagggggcgtcgcacggaggtgcctgcctcccttggtgggcaggccgtctgctttggtgttctcccgtgacaagtgctcggttggtctgtcctgtcagagcgagtatgatcgttgagatctgtccaccggcagaactaggccgagggttggtgtctgggacttttcaggaaccggtgccttaaggacttacttgtatgtggaaaagtcgacaaaaagaagggccttggggccagagtgtcttccccggcccccttccctggcttgtcactcaggctgtgaccttgggccaggccgaggccttcattttctaatctgtcacagggagatggctgcgatttagttttgaggatg

SEQ ID NO: 51700 - DNA, 1780 bp, Homo sapiens
ttccagttgtgagctgagagagatgatggcctctctgggcctttcctctccctttactgagagctcagtgcttctggggttgaagttggacagaggcctgcttcagggaagctgggagtccccaggcactcacgcctcttacgtgttccctaccctgccacccagccaccccactgggctgggctcgggctggagggggtcatcaaggtacacatgtgcctggaagttgaatttgtggctgtttttttttctgtccacgttggtcacccttatccttatctctgctgtcacccccaacatggccacccggcaacaactgccatccagcctgtcgccccgcccttcgcggggcagccccgtcggcactgccggccagtccttgctcttcccacctttcggaggcccaagatcctactgtggccggccagggccagcgagggaccccccccatgcagagctggaggttggggtgatgtcttttcggaagagcttcaagggaggtgttggggcctccccggccaccttccattgctaccccaggattcccgagtgcaacgttcccggctcgcgccccacacacggctcagcgcacactgcgcggcttccacctttactgacggagcatgcgcgaggccgcaccggccaatctccggcgcccacgtcatccgcgcgcccgcggccctagcagtggatctcgtaggcgaccggcgggggcacgcggagtcccggccccgccccctgttccgggccgcagtcagcgggcgcctccgccggaccctcggcgaagagcggcttggagcggttgatgacgaacatctcgtggccgcgctcgtcgcggagctcctctagctgtgcgaacgtacaggggccgtccaagtagtcgttgacgaacagcgctccctcccccggaggcccccgcgccttttttcgcctgcggcgccggcgacagatcatggcgaccaggagcagcgccgtgagcgccagcagcgcgatggccgccgcaatggccgtctgtgtggccacgcccagggcgcggaaggccatgctgcccgcctcgggccggggctcgctgccggcggggcgggcggccggaggcggcggttgcgcgggctgctgcggctgctgccgggacgcgttgaccaggagccggaagggcacgcgggcagcgccgccggcgttggaggcctcgcactcgtacttaccggcgtgcgccagcgtgatgttgctgaggaagagcatgccgctgcccgtgtcggatgccgagtgtccgcccaggcccagcaacccgccttctagctgggcctgggctcgcggccggccctcgcgaggctggggcacctttctccaggtcaccaatggctgcgggtagccggaggcttggcaggcaacccgcaggtcctcacccaggttggctgtgagctccagcggctgcacgtggacagagggcggaatgcagatgaggctgctgtgggatacgtccaggagactctggagcgccaggcgcgggggctctgcacacatgatcttcctgtccctggaggtgagcagccgctggccgccctccttgatccaggcacccagccagtgcagggcgcagtcacagcgccatgggttctctgtgggagagcagcgttaggcaggtggcttgagggtgctgctaaaacagcctgtgcagttggggttttgcaggccaggacagaggcctctttcccacctcccacagcgttttcacacggagtccaaggccctgccaccccttccttgaccccaagctccttgg

SEQ ID NO: 51701 - DNA, 1410 bp, Homo sapiens
tcccggacatgcagctgccttttgacagggcttccaaaaaaaggcagggcggcccgggtgtctccctggcagcggcgagaagtcagcgccggggctggggacttgtaggacagagtccgaagctgcacaacgcagcagggacgcggcccatgtaggagcctcggcccggaccgacccaactccccgtctttccagcgcgctctcctccagctctgaggagtcgaggttgcccaccgcgcaggccccgcccacccacccaccccctggaacgtccctccggccccgcccctcgagcaatggtcccgcccacagagccacgcccccccccccgccccgcccagagacctctcccggccccgcctctcgagcaacggccctgcccccgcccacctggccctggtggtccacgtagtagaaatactcgcgggtccgcggctccggactctggccctgcgtgtaggaaacgcccccatccccgctgcaggcccgggctccccgcgaccgcgccaaggccagggtccggagcgtcccgcaaggcggccacattctcctcccgcgccggaagcgaccagcaggtcacgccgggggcggtgctgcgcgaactcgcgcctgcccgcagtagccccgcgcttcgcgttccggcggcgcccgcctccgcgacccgggcccggcgctcttccctctccctcgggcctcgggggctcgcccgccctggccttccgagaggcgtgtgccggtgacgccccttccggtccgccccgcgtctcttcccgcccccggccgcgcccacaaggaacgggaggacgcgcagggtccatgtgcactttattcactcgtgtcgtcgcctctcgggtccatgcgtcggggcgagcgtctcagccgggcgggaccgcaaaggccccgggaccacccgactgaggacgccgcccaggcctcggcagggctggggcttttgtttttaataaataaaaacggaactctaaaaaatatatatataaaaactggggagaaattaagttttacaacaattggaactcaaaattccaaaatggaaaatgtacaaactcggtcccccagcagctctggccccgagaacggacagtcccgggcccggcgccttcccgctcgctcgtctcctgcaggtctgggatggggatggggtagagcttggtttttggtcagaagccaagaaaaaagatcggagaagaaaagaaggaatgacctcaacttgctctgcacggaggacggggacggctcagagataaatagcatttaggttaaaactatgtcattagcaaatttagttcttatatctttccctctatttatatctctatacacggtgggctgcgatgcaggatagattctggatttacagttacacgaagaaaaaaatactctcgcccctcc

SEQ ID NO: 51702 - DNA, 1464 bp, Homo sapiens
cacactcacacccacctagggcagggacacaactcactctggacagggtacagtcacacccacttcgggccgggcacacgcgaactcacccaccctcacactcccagcccggcccgtcggcgcgcacccgggccccgcgcggcctcggcccctcgagcctccgcgccccccgcccggccgggccccgcacacccacgccccctccctccacggcccagtcacagcccctcccgccgctgcagtcgccgcgggcctggattccttgcgctgccgggcctggagcctccgccgaggctgggccaggaccacggggaccgcagcgccggcccctccgccatcttcttggcccgcgccgcccaccgcccgttgcccgcgctctcaccggccggctgcgcgcgggccgcgccgccacagtccctcatcccggcccgcgcgacgcgcgtgagccagccgccgctccccggcctctctgctgctccgccgctgctgccgcggcagcccgtgctgtcggcgtcctccgccgccgccgccggcccagtgcgcggcggccgcgcgtcctcccgtcaccaagcgcaaccccccgcctccggctccgcccccgcggcggtcactacccgccgccagggggcactgcctcgcgaggccgcatcacgcatgcgctggcgcgcggcatgccgggagccggagtcccgcggagggcgcgcgcggcatgctgggagccgcctggccccgccccgtcgccgcgccagaggcctcccgcgcggacctaccctgtgagttagcggtgtcttcccgtctctttcggtgcagagcagttaccatctgacacgtctcggtgtggtttggtgtaattttgccctctcaaaccacgttgggcttcccgagtctgagatttcacttttcttcgactctagaaatacagccattcttctcaaaacgtgggctgccctgttcctcagtccttcttgtggcgggctcgtgtctcttcacctcctgttattctcacctttttagtcctgtcacttttactcggtaattcactcagctgcagctcgactagtgctctattcggcgttttctaatctgcgttcagcctggttttctagattctcttagtgccaggtgcgtttctggaaattgaatctgactggcatttctggagaaacggaggctaaacagcctgaagcttcgatagtagaagacaggggcgcacacccttcagtcctggacattccctgggtcctcaactgtgagaagccgcaaagggctgaaaggcccccgtcaaaagtcatccgtggagctccacctcctgccctgcagctcagtcgccttgcagggactctcccgcctcaggagatctcccgtcgggctgtctcgccgcccgcgcttccctgttgggccgtcgtcacacttcactcttcactcttatacacagggctctgctttttcgcctcccgctccctc

SEQ ID NO: 51703 - DNA, 1865 bp, Homo sapiens
ctctccctgcaggagggcgagtctacctctcagaaccctttcctcacggttgctatgagcccctggctggccttaccagttgccgggctcacggctccagaggagagtagcttctgactgggatggggatgaagatgaagaggtgggcaggaaggagggttaactcacctggtgccctggaagctggaatgtggctgccattctgtgtgcatgggctgctgtggtttccaagagaagacaggagactgccctggcctgaagtctccccgaacttaccttcagtggggagaactcaggctcagccccattcaaccaggggtgtggaaggatggccaggaggcagaagctgattgctgctgtggcctcctgggtcgcgggaggcaggtcactatgcagcacgggccgacgtgccctactgctcagtgactcctgaaatcccagaacggccagagccagagcccggggggatccagggacgcccggctaaggggtgaaagctggcagttcccgtggtccagacctgctgaaggccctggaaatggggtgcagggccgttctacctgcctggccaacctggggcaaagagccacgtgagggtgcagcctcaccaaggctgaggacgtgagaaggaggccgcggggatgctgccgaaggccccaggctccggggagaggccggaagccagctgtggtcctcagtccagccttctagggccgcgccgcggtcgcctcctcccggcctctgcagcccgtcggtggctcccgcggcacccagaacaggctcctcctggactggccgccgcctccccgcgccctccccgcgccctccccgcctgcctgcccgcttggcgctccttcctggtccgacactgccccacctgtttgctcgacccggggaagccaccgaggaagcgccgaggagctgcgcagtcgcaccgagcccggaacggaccctcccacagaaccgggtccagagccggggagggggcgggctaggatgaagagggcgggccgggccgagctgcgcacacgcaggcttccccgccccctgcggggcctcagtacgcctccgagaacgccgggaaccggaagccagccgcggttccgcccggattcttccggggccgctctgggatgactggaggcctgcgccgtctatggtcggggagggggagagcccacggcagctgagcggagggtctggcgcggtgacgctgcgcatccgggccgcgccgcgctcgccccgaccctaaaccctcacctgaaccctaaccccgctgggctcccggctcccccgtcggtcaccatacatcgtgtgtcccgattcaccataaccaccagaaagtcgcttatgaagatgttacaattatcggggctcagaacacaacgccccaaaatgaaggcctgggaggcagtttccctctgaccttcccaggcctccagtctcagttcttttctcccgcgaggctcctcacagagtgaatcccttttacccaaggcgagtcccagaggccagacccccaaagccagccacaaaacctaaaaacacgactctgatgttccccccgcttttctgtgtgaaaactggcggtaaaggccgggcgtggtggcgggcgtctgtagtcccagctactccggaggctgaggcgggagaatcgcttgaacccgggaggcggaggttgcagtgagccgagatcgcgccactgcactccagcctgggtgacagagcgagactccatctcaaaaataaataataaataaataaataatccatttatttgccttttctccaaaaatctgccttttatgagttggctttcagtgaaccttcagagggcaaagaggaactttccctttggcccctac

SEQ ID NO: 51704 - DNA, 1993 bp, Homo sapiens
cggggtttcactgggttagccaggatggtctcgatctccagacctagtgatcccccccgcgccttggcctcccaaagtgctgggattgcaggcgtgagccaccgtgctctgccatacatatgtagatttttaagagacaaaaacagtattaggtttgtagagatataagaaaacgaggccgggcgcagtggctcacgcctgtattcccagcactctgggaggctggggcgggcagatcacttgaggtcaggagttcgagaccagcctggccaacatggttaaaccccatctctactaaaaatacaaaaattagctgggcatggtggcgggcgcctgtaatcccaggtattcgggaggctgagacaggagaatcccttgaactcgggaggcggaaggtgcattgagccgagatcgcgccatcgtactccagcctgggcgacagagcgagactccgtctcagaaaaagagagagagaaaggaaagaaggaagagaagagaaaagaaaagaaagaaaaaataaagaagagaaacaaaaatctggctgcctggctgcggggagaaaagccttggagcgccagaagcgaggagggtggggcggagggaaggcacaagcagagggaggagcactggcggagcgcggacgctaaaggcaggaggggcggcattcgcagagggctgggaggaccgcgagacgcacgagccccgcccctgaaaagctgacaggagaggagcgtgggagggagccgggatgggaagcctcgggccgctgggaccaaggggtctggagcgcatcgggacgcagaagccgctctgtgcggcaggagtccaggggaccccgcgtggggcaagggagttgtcaggggctcgagagcggaaggagccccgtgaggagcgaccccagggctggcagagagcggcgaggcgcagtccgtactcggggccttgtccggggggtccctcgaacaggaagtgccgctgatggcgggacggacccacgcctgcagcaccgcgagaggaccgggcacaggggcaacgcgcaggggagggtctgcgccgggagggtctgcgccccgcgcgcccgcccccgccgggctcacactcacctcagcgccgccgagcagcacggcagcccaacctcgcccgttcggccctccctccccgccaatcggaaccgatccggaagtgacgtcagccgactgtctgggtccgaggcgccgtccgggccgctctgggaagctaggacgccgcgtgtcggctgcccacctccctggcttgcagtaaggctccggggacccgcgaatggcaaagccgtaaagcgggaatgctgccaccgggtggcagtccgaagccacggcccagaggcctcagaactggggcgatggtcagaggcgaaaacatattagtctttccctttttctgagaaattctctccctaatgatgcacgaaaggcgccgcaaacaagaactaggcccttcgatttacagagaaacgggaaccgcacccttccttagggccaagaaaggatgcttactggccaaagaagcctgtcttgggtttaacctattgctcctcatccttaactcctgtaaatggggcccagtgtccactctggagaaagggtttttcgggtgcctgagctgcttctggaacaaactttccctcatggccggtccatcggccaagccctgccgtccactttgcccagaagggagcagaaaaacagtgaccgcttatggccaagctaagcatctagtgctttcccaaaaccctctttccagatgcccctccatccttcaggaggaaacaccgccctcctggattctttctcgacaagtcagctgggaccctgggaccggccctgcgaatgacgagatcaaaaccaggtcccgtagttactggcggggaggcggggctggagtgggaggaccacatgaggccaggggcttgagaccagcctggcaatagcgagagcctgtctaaaataaacaggcc

SEQ ID NO: 51705 - DNA, 2279 bp, Homo sapiens
agcatgttcacccacagccctcagcattcaactgctgcctgatactcaccaaccacagctctgttggctgaggagataaccttcttggagccggagggcagcttcacacgggtcttcttggtctcagggttgtgggagataacggtggcatagttccctgatgcccgggccagcttgccacggtctccaggcttctcctccaggcagcacacgattgtaccctcaggcatggtgcccacagggagcacattgccaatgttgagctgggctgcaaggggaagcagcatcaggccgtcagcacagtaagaaacaatgcgaaccccctcgctctaggcaacccgcgaagttgcgagcacagcattcaacatccagcctcccggtacaactctctcggcacccaccggtggccactggtctggccacgcggatgtccccacctgaagcttctgcctgcgaggttcccatatcggcttaggacgttaactcctcaggcaacacccagacccctccccaccccgaccttccttccccgccgcgatgctaacccttcttgccgcaatacacaaactggcccgtgtgaatgccctcggcggcaatgaacagctccgtccgcttcttaaaccgatacggatcccggaagaccaccttggcgaggggcgcgccgcggcccgggtcgtggatgatgtcctgtgggcagaggcggcgtgagtgcggcgttccggccgggcgtcccttcccctcccgccccggccagcgttccgcaccttgacgatgcccttgatgtagccgtgccgctcagcgaaatccacggcgcgcaggcgcgcagcgcctttacggtgcttcacgtgcgcgcggaacacagacccggcgcccttcctctgtccacggatcacacggcccatggcgacgggtcctgggggcgactcacgattagcgcggccgggcggcccgggtacccccgccagcccggctttccgggaccccgcccccgaggccgccgcgcccaccactccctaccctctccgcgggcgcccgcaccggcatcctctcaggagggccggtccgggtctcagcgcgcctcacggaagaggatggcggcggatactgcccatgccgcaaggccgcaaggatgacctacctgttcaccagcgcggccgaaagaggaaacacggcgtcagcgagcggccttatcttccggggcggggcccagggccgcgacaccttccgggcgcgccacggccagcctagcgcggtgcacgccggggcttgtagtcaccagcggccgccggccccgcctacttctcctcctccagggcccccgcgcaggcgcaccaggagacgcggctgaaggtgtcctggtgtgcgtgggctcggaaggagggtgcaggagtgctcggctttcaccggggtctccgggagggcaggtgttttctgagtggccgaggaggcgccaagtggttgagtgacctgtccagggtgtcacagagcgacccactccgggccacggggtctggggctcccggcttgcctggtgaggggcttccgtgtaggccgagggggttctcgctggtgcagagcaggagatgggcaggggagacgcgtggacccactcgtggaacgtcatggtttgcaggtggcaaatgtccgtctccctgatgaacgggcgcttctggacgcggggaccttatccactgtaggcccttggagaggtcgggcgtcgaggagaggagccccgggatccttgccgagggtgagggccggccggcccaggaagtggggagggccaagctggagggtcccgggtcgaggaagaaggagcggggatgggctgggtcacatgctgcggagtggacgaataatgggagactggaccgtaccctgaccagaaccctgtgcgggagaggtggggaaggagcaagaaatggaggctgggaggggctgtgggggcctgagctggaaagagtcagcccgactgggggtgtcctgcggtacgtgctgtggagaggggcttcgcggaatcgggcccctaacgggtgggaccccgaggccgcgggtgggggatggtggggaagaggttttccaggagagagtccctggctgagtgagcactgtcgagcacacgcgaggccgtgggtggggaggcagcaaggaggtgaaggcgggggtcccagtgggcgggagaggcttgctgtcggtactgggaggtggggtgtttcctagaccctgcaggggctgaggcagggttgacatcgtgagaaggagacaggagagggtggaag

SEQ ID NO: 51706 - DNA, 1657 bp, Homo sapiens
atcaggagtccgagatcagcccgggcaacatggttaaaccccgtctctactaaaaatacaaaaattagtcgggcgtggtggtgggaacctgtagtcccagctactccggaggctcaggtaggagaatcgcttgaacctgagaggcggaggttgcagtgagcccagatcacaccattgcactccagcctggggaacaagagcgagactcaggctcaaaaaaaaaaaaaaaagtcatactaaacaatgtcataaatttatatgagaccgaccctggccggacgcccccgctccgcccttcctgcgggtccgggagtcgatcccccaccgtgctccccaacccccgcaggccacccgggggcagagagtgggcgcaaggggtgaacgttcgctgcctccgatcccgggggaaacggagcgccgagaacgtcgacgcccttccgcgcccgtcgggcctgggactgatacccggtctggcccggaaccccccaggcgcgcccctagctggggccctggcgaccgccgcgccgcaggggctagaagccgtcgagacgcgagcgccatcgaggcgcgcggtcctccaggcctcccagagcggcgcagcggccgtttccgggggcggggaaggaaccggagcctgagagccgggcgccgtgcgctcctccccgcgctgtctcggcggcccagggtgagtcggccgcggccgcggggcggggactgggaggggcgcggtcctccgagcccggcctggtggaggctgtagcccccgcagtgggcgcgcggagctcggcagggagcggacccgcagccgtcactgtcgcctccgctcgccttgggttccgaacccttatcggggcgaagggccctgcgccccggtccatgctggctgtggtcgggggcgtgcggccgggcccccgagacccgctccgccgagccggacggttgcgcagagatgaggctgcaggcggggaggcctggcgaggtggggctgctccggggaggaccaggctctgcccctcgcttccgtccgatggcgggctcttcccggcagcctcgctccccggcggacgccgtttcccgcagcgttcatttaccctgcgcagttttgccccctccccgggttggggcatttattggaccaacagtcatttcgtaaatagctgttgggtatttaactgtgagcgttccggtgctggggaccccgcagtgagcgaacagcccgcctcgcctccaggagcatgaattgtaatagaggtgaggcgttagtgtaacaggcaataacgcagcaaaataacttctggttttgacaagggcctcgcacagaataaaccaaggaaataaaattgtgagagttagggggttagggtagccttggcggtcaggggaggctctgtaaggagttaacatttggccgtgcgcaatggctcacgcctgtaatcccagcactttgggaggccgaggcgggcggatcacgaggtcaggagatcgagaccatcctggctaacacggtgaaaccctgtctctactaaaaatacaaaaaattagccgggcgtggtggcgggcgcctgtagtcccagctactcgggaggctgaggcaggagaatggcgtgaacccgggaggcggagcttgcagtgagccgagatcgcgccactggtctcc

SEQ ID NO: 51707 - DNA, 1880 bp, Homo sapiens
tccctcctttggtttgcgcaagttttcccgcgcgggttcggatcaacacgccgggggagcccggcttacgtccctcctggacccccgccccgttcttcccgtggggaggggcgcgtcaggcggacctggcaccctccggctgctgggcttcgccgggagccacgcggggaggtccaggcagtcgggacgcaggcagcgtcctcgccgaggctgcgagtccgtggccgtccgggggaggcgcgcaggctctgccggacgcagaaggaacccgaaggaggcggggtggagggcggtgcggggccggggaggggcgaggcgagtggcgagtggacgccgggcccggcctcgggcaactccgaggggcgcccttcctcggggtcccggaggctctgcgaccccgcggccgctccagccgctcactggggacaaggcccgagccaggcgtctccgcgaggcggggtccatagcgcgcccagcaggcgcctcctgtcgcagggacgcgggggagcggcgcctgaacagcctcggtgggaaccagcgcccgaagctggtgatccggggtgcgcagggcccaaccgggcgatcccctggatctccgccagcctcgccccgactccgctcctcccacccgccagcgagtccgcaactcccggccccggcccgcgtccccagctccaggccccggccccgccccgcccctgctcaggcaccgcccactccgggctctgggccctcctctccctcgcggctccgccccctgcccgcctctgactgtaccccgcccccaggcgccagccccgcctatctgggcttctggtcccgcccaggttcttgtccctcgggccccagcctcgcccctcctcggctctgactccaccccttctccggagcctgggaggcggggctgagaaccacagagatggccgggcctccgagcggcccagggcggccggaagtttgcggggcggggcggacgcgggtggccaaggcccgtttccggcggcgtcgcgcgtttgcgagcctcgggtggtcctcagggagggtgagtcggcgcggcgggcgcggactcgggttgccctcggtccgagtgatccctggtcgcttccttagccctcccgccttcggcattggggtccccgcgtcccccgggcctccaggcgggaaagcgcgggggctttgcggggccttgagcgcctggtgtgggaggtggtcgagcccagccaccctcccccgcggcggcgcgaggtgggcttcgtttggccgagtctcgcagctccccgcagaccccgctcgtggcggccacggtgtccggggcctgagtaaggcgagctccagctgcggccttttcttcaggcctgggtctactcccggggccctgactcctcctgcgaaatcacctccttctagagccttttctctttctatttattgccccggaaggcctaggataagtgacagtggaggaaggaacggtgccttgggtggggtaggctgtttgtcttctctaaattctggttgctattccgggcattcctactgtcaggagccaggtggggggatcagcctacctgtgccggtgacctggggcttccacccacaaaccactttctgggccagaagctgccatacgaagactctttttcccattccgacctcccgggggaatgcctgggcaggtagagggtctggggtcattggcttaattgaggtgaacgatttatatcagattacatccctgtgcctggttccatcctggcgacaggtgagctggagactggaatttatgtacttgagggcaggggtttccatgtccactcttgtcttccctacagtttgtcatttttgctcctgccttctccaacctccagtcgctcactgcc

SEQ ID NO: 51708 - DNA, 1948 bp, Homo sapiens
tctacaaaaaatttaaaaaactagccaggcgtggtggtgcacgtctgtagtcccagctactcagaaggctgagaggacagaggatcccttgagcccaggaagtcgtggctgcagtgagacgaaatcgagccgctgcactccagcctggacaacagagatgctgtgaggaaggaaggaaggaacgaacgaatggagggaggggggagggaggggaggcagggaagaagaaaagaaaagtaaaaagaaatcaaagctctaaacacagctgccaaagtcaaggactgaagcctagacctgtctattcagaagtcccagctgtttccaccacagccccaacccccgggctggaagagctgagcaacggctggcaacagaggcaagtgcggcaactaaagagggttccgacgcacctgaaggagcagtgcagcagcacaagcacctgctatgccagaggaaacgcacgtgcccacctcagcacaccaggtactggagcagagctcagcggggcacagctcctgtcctcgaggcacttgtcaggccactctgcacagcgctgggggagcccaggagctccccacgggcttcacggcgccccattctccctgggagtcaacgaccacccactgccaactccttcaccgtcccgccagcaccaggagctccttcccactccaaagagccatccgggaaggcctccgagctgcccgcttccggtcgcgcggcttggaaggccgggttcgcaccctgactccgtacccgcggctctgatgggggcgcggcgtcgcccgttccggggcgcggggaccttggtgcacagagtcaaattggcactcggccgtcgccgcccccacggttcggggccaacctaccggcgggcgctcctccgcggaaaagccccgcagtatccagagctctccgaacacagcggcgaagcagcctttcctaggcccacacccccagctcgggagggagactccatcctactccaccccacgctcccgctgtccgagtcgcccccagcacctggcgccggcaatccccggctgatgcagccaaaagcgggcctggtccccggaagcgccctgagagccacttccgggccgctctaggaaggcagcaatgaccgccccactgtggtccgctggcccgaggggcggagccgaggccgcgccaggtcccgccccctccccgcccgggggaatcgggggtcgccggcggggtcccagacctcgtcttagacagttttttttttttctttccccaaagaaaaagaaggcggtgttgtgtttccgtttctgaggtagaaactgcggcctgcgcccgcgtctccctccccgcccgcgcagagtgagggtaaagcgggagaacgcgtcccgtggtctggggtcagaattccagtcacctgaggctgaggagctcgctggctttcgtcggcgtccgggtgggcggcggggaaaccgcgagaccttgaggatcagcgcggagcggagccgagcgggcgtccctgtcccgtgtggacggtctgcgcctccagggttttgagagctgccccgtttcccctcctgtcgggtggcgtccggcgcgcgtgactcggttccgctttgggctgctctgttgggccctagcgcaggagctcggtccgaaacaatggccgagccattttatttaacatgtactttaccatagttaaaaaataatatgccaaaatcattgaattgtacaaaatgggtgaattatatggtatgtgaattatagcccaataaaacttaaaaaaaaaaaaaaaactctgaaaagggaaacaacctaattaaatgggcagaagatgtgagtagacatcaaggaagatacaaagtgggtaatgggtacatgaagccttcggcattgttggctattagagaaatgcgaatggaagccacggggaggtgccatttcataccattagaagggt

SEQ ID NO: 51709 - DNA, 3356 bp, Homo sapiens
attgagaagcatgttttcaacatacatggaaaaaaatatgagctggcaaatcacaaagaaatacaaatggcgaaaacacaaatgaagggatttcaatctcaccaataaacgcaaaacgtcgacctggcaggaatgcagtgacctgtcaaagcccacaggaccagagtcccgtccagggcgggaatgtcaatggcaatctcccacccttacccacttcgtagagaccaccggacagagaaacctatgtccagaagacaagttacgaactgaaaaatctgcgagtacccacccggcggaggacgagtggagcgccccctgccgcccctggtgttagtcaaacgacaccagcttccctttgatgacagaaaaaagggtgtgcgtgcgtgcctaaagctctaacggcattcaaaaattctgaaactgttcacagctcctgcctcttcatacactggcagagtgtcgggggggatgacttttatatatttctgacatgcctgcattagaagaagtattgcatattattttcaattttaaaattaagccaataaacaacaaggaaaatatttgctgtgttgcaaagagttgggctcattcattaaaatagggctctaacacagtaacagaaaagacagcatcgacagcaaaatggggagaggataagacacccggcaagtagcacactcgaccaactgctgaaacgaaagcagctcgttttcgtcttgacgcgggaagactttttatagctaagtaaagtggcgctcccggtgcgccgccggggtcttcatggggctcctcaggatgtgcatcaaacagaaaaaacctccatttttatattttggggaagctccccacccctttccgggcccatcccaggggacgcgagaccccgaggagcgcggcaagaagagcggcccgggggtccggactgcgcccctaggactccggccatcctggccctaggcacggcgcccggtagaaagcgcgcgggagggcacgagggggaggaaggccggagatctgaggagatccaaggtgggagggacgccggtctgacggggcccaagggggtaggggcggggaagggaccgaggccgtccgaggcggacgggggtgcgggagggcctgagggggtccaaggccgggcgaggggaagggtgggaaccccgaacgggggagagggcgcggccttggccctggggaggaggccgccgcgcgtccgtgaggggaggggaccagcgtaaacgcaggaggcagtgcgtgctcgcggggaagagtccacgattcgtgtggaggacgcaccggctccggtgtccgtgatgggagagggtcctggccggcgacgacacgcgccccccactcaccgtcagagccgcagcctcacgcgcgaaggaacggcatcccgcagcaccttcagacaaagggctgccccgccccgtctgcgcagccgccaatccctgggggctcctgcccctcagttcccgcccccacagccgagttcgccaatcctggagggcaagcatgtttacgtcatttggcccgcctgcccgcccgaagcctttctcggtgaccgactgcagggagctctcaggagccaccgagagccagacctccgcgatccctagaggggccgaacacctctgggcaatgggcccggccggctccccggccgcacttccgggcgcggaggttacagcccatcgccgagccttacccgctcgcagtcccggttcccgagctcctgccgccgtcgccctgtggaggacacccctgccggccccgcagtccctcctcgacttgcgctggcttcggccgtcctggaactcgagctcgttcccccctccgagccttttgcccttgcggttcccgctgctgggaacgaccttgccctcagccgcctggctggtccctgcgccgctgcagtgcgaatgtcgccttctcaggggccctttctcttccttcgttgcaacactgaagtcctcttgtttgatgacttgcgtgaggttattcctcccacttaggaggctgagtgctgcgaggtccgaggcgcagccgctcttcgctgtgtccggcccggcgtgctcccgacagggggcgtcactgaacagcgaccgtctccgtcgcccactcggccctggtgtttgctttttggtgtgtttacaccgcgcacctgggggagaggggcgggccttcacgagggcgcgggccacacccgtgtggaggcttcgggcacagcccaggacctgacagccgcggcagggagggtggggctggtttggagcggtgtcaggggacgggaaggctgacgcctagtccaccttctgctggccccactcccgaaggtcaggtccgcgtcgtccattgggcgcgtgggcgggcccagactctcaagaggcttccccacagggcggggctgggggctgcgtgggggcggcggggaaggcttaaggttagggggtaggcttgaagcgagtgcccggcccgtgctgttgggagcggaggccgggaggatgtggcgataattccgtacttgccgcgcaccaggcagacgcgaagtctgtgctacgcttcagcgaacttagcagcccttgcgggcaggggttcgcacttcacggagctaccatccaccacgcgcgtttcgagcaatgggcccgttgcctggcgcactagaagccaaaacggtggcaccagtttttgagaaaagagaaggctttattatttcaaggtcgacggccaaggagaccggaggcatggctcaaatgtggctcccacatgtgggcttaggtcaaagtcgacgggttagggaggacaggttggcacacagaagtgctggcgggcaggtttcaataggagggctttaaacttggccatttatggtaaggtgtggaatggcaggtttcagcaccagatcttccaggataatggacccttcccttctgaaagcgttccgcccctcaagctccggtcatgtccctgtcttcttggctccacagggaggaaacgttggttccgagttatgattttcctcctttgtgcatgtccgggttacatgactttcagttttggctctgctatacctcctgttaccaacagaatagggtcagtttgggccagtcttgtggttacacctcagtgtcacaggatttcctctgccaaagggctgtgaagctcaggaccaaggtaatcaaaattcagctctactattggattgtcctggattgttttagcagttgacagggatcaagctctgtcccagcaaccttgatcccaacagagaactgatgctcctaggaccttcacctcagacctcagtgcatcctggtttttgtttttcttcctcctccacaacttttttattt

SEQ ID NO: 51710 - DNA, 1183 bp, Homo sapiens
tttgggtggagagaaacaaatctggcctacgtgcccatccaggcatagtacctccccttaaacttaattatggcacagattcttttgctcacatgcttttttttgctgaccttctccctattatcaccctgctctcctactgcattcctcttgctgagataatgaaaataataatcaataaaaactaagagaactcagagaccggtgccggtgcaggtccttagtgtgccgagtgccggtctcctgggcccactgttgtttctctacactttgtcttatttcttttctcagtctctcgtcccacctgatgagatatcccacaggtgtggaagggcaggccaccccttcaccccgtcgctccgcccgagctcgaatggtggcaccgacaggcgggaacgccaccagcctgtgggcggagtcctggctcggcccctcgcggcgaccttaccccggggtctccccggagaccccctaccggaggcagcccccagaggctctgacctccagcccaggccgagctgcccccgccccgccccccccgcgctcccacaaccccccgcgcggctccgcccccgcccggggtccccagctcgctgcccgccccgtctgagccctgagaggcccctgggccccccaaccacgggggcatcagggacaaccagacgcagggtcccaggcgtggagcttcgcggaactaacctcaacgggtcgcgcttggaaaggaggcagcaccgtggcacgaagacgtctcagccaacgccggctgacccccggaagtcccgccccgaattccggcccgccgctcgttctatctggggcagcgtagcctctctagatggcgggaggccggggcgactctgtggttcagccccagacctggtcccactagccctgaggccagagacccttctgttcccctttttttcagagttgacccgtgcactgaacaaggcggcaactgaagaaaaggggacactaatagaaatgcagagataatgagatatactcgtgtagtgggagattttaatatacaggcccccagaatcggaacagacggtagtttgataaaaacctaaggatacgttttttggaagaactgaatcattcaatcagtaagtgattagatagataaatggaagaattcagattccttcagtagataacatgttttcgtgagattgtg

SEQ ID NO: 51711 - DNA, 1657 bp, Homo sapiens
tcagcatttaccgagtgcctactaaatgaatgagtgttgagcttgttccagcgcatctgtgagatatcacctcctgcctattcctttccttccccaaaacagaagctccttcacaccacagctctcacagctttaccctttcaatcaatacattcctgctaaatgaaatgcacttttctctcttctgaaaaaaaaaaagcacaattcagctcatcccctgacattgcccaaactcccttcctctgcgagatctttttacccatctggcttccctgcctcagtgttgctcgggagcgtggatgacagcccgtagacctgcacgccccgctgcctccgctcgtgcctcacgccaccctcgccctgcccgcgcctcggccaacacaaagcgggcgctcagcaccccgcagccgccctcgacgcgtcctctacgggtcactgaggccgcggggcccgacctgcggcctctcagaaccacggcaccgcccctgcccgccccagcgccactccggcacctccgcaccaggcgccctagctcgggactcactcggctcgaccacgggaagggaaggagcgcgaacgctaaatcccgtgccgcggggagccaagccccctgggccggaaatgcctaatctgaacttccgccctgcccttcagctcaccaaccaattgaattccaggtttcgtgggtccgctctaggcggctgatagtactcaatgctccggcagtcctgctccttcccggttacgtcccttccagcccttggcggagtctgcgggcgagagggcgcaggtgcagaggtgccgccggcggcgtgcggctgcgaaggaagggaccccgacaccgagcgttcctgcggacgctcctcaaccgggggttgttctccgtgctctggacccggcccttcctcacctaggacgtctcgcggtgcactgtccccctctctcgggcgacttttcccccacctccaagtagtgatcaagctcagaatccagctcgcgcccgctgtgcacctagcacttcccacctgtagtcttttgacctcatcgccccctctagaaggctgctgccatcgcttaaatgaggaagccgaggtgcagagaggtttcagacctattgcggtggagctggagttcgagaaccaaccactcggtgctgagacgcgcttgcggaacgggcggcgggcgggggtgaagcggagtgaggggagaggccaggtgcgacccgggcaggtgaggagcacgggcccggagggaggacttacgagaatggaaaggaaagcagcccgtcttcagtgggacagtgggagcattaagatgtcagagaatgagcagttgtgggaagagccatagggtattttattttttagagatggggttttgctctgtcgcccaggctgcaacctcgacctcccgggctcaagcgatcctcctgcctcagcctcccgagtaactgggactacaagcaacgcgccaccacactaaatctttaattttttggggggtggttgaaggtgggggcgggacagggtctctctccgtctcccaggccagagtgcagtggcgcaattacggcccgactcctgggctcaagcgatcctcccacctcagcctccggagtagctgggaccacaggcgcccaccaccacgcccagctagt

SEQ ID NO: 51712 - DNA, 369 bp, Homo sapiens
ttcagatttacatcttgcagcgacttcccactgcgttagaacggaagtaagcccatgacgggggccctcccaactctcagacctcacccgagcctccacgtcccgagacgccggcctctcaaacgaccgcgccctgaccctcgctcttccccatttcccagggtctttgccgaccaccctcttgcgccgtagctgctcacgtgctgtttacttgcttttccctccccaccaaaaggtgagccttgagaagacacaccctcgtggagagctttgaacttttatccggaaaggtgccgggcacgtagtcagcgcccgcgatcactcgctcacaagggttcttccgagacccctcttcagcctcttccccga

SEQ ID NO: 51713 - DNA, 1279 bp, Homo sapiens
cccagcttcatcccaccccagccgcgccccgccccgcccgctccccgccccgcccgcgccccgcccgcgccccgccccgcccgcgccccgcccgcgccccgcccgcgccccgcccgcgccccgcccgcgccccgcccgcgccccgcccgcgccccgcccgcgccccgcccgcgccccgcccgcgccccgcggaacctagagtcgcaggcgcgttcttgaaggacggaattcggcgtcggactctgcgccccgcgtagttccggtggcgactgcggcgcatggcggtgagcggtgtggagaagacgcgcgggtggctgggccttgcattgttggcggctctcggtgaccctcgtgctacccccctttctccaggccctgggacatcttgctggggaggcagcggcggccccaggcccgggtactccctgcgcgtcccgcggagcccggcttcccggcccagtttccagcgcccggaatccttccactgtctgtctctgcccagagcaacctacgtgcagtaacgctgactccagagcgcacccgttgggcgatgaaggcggcacagcgtcgaaaaaacaaaagaataagaagaaaacgcggaacagggcctctgtggcaaatggaggcgagaaggcctcagagaaactcgccccagaagaagttcccctaagcgctgaggcccaggcaagggcgggcttcggtcgggaagggtggaatccacgggtgcgaatccacgggcacgtgtgatctggggtccgcggagttaaggcggggaggggcatgggatggggccggcggctatggttttccagtgccctctcacagccacttccccaaatccatcacaggcacaacagttggcccaggaattggcttggtgtgtggagcaactggagctgggcctcaagaggcagaaacccaccccgaaacagagtaagggacccttctgtagagctgggggatgtgaacagtggcactgcctggcctgcaggtgctggcagagtatggagttgttggctttgcggcggggtggtaggaggtcagtaatagaggtgttcactagtcctttatttttattcgcagaagagcaggctattggagcaatccgaaccctgcgcagcaaaagaacgcccttgccccggaagaggcagctgatgcactccttgtttggagactatagggctcagatggaagccgaatggcgtgaggccctgcgggctctcagagctggtgaggagctagccactggttgattcaggaaggcctaacttaaggagga

SEQ ID NO: 51714 - DNA, 733 bp, Homo sapiens
agcggaaaattccagaactgtacaagccaatattcagagttgagagtcaaaagaggtaagaacagggcagaggaggcctcttcctgtgggataaagagcagcgcatggggcctagcaccttggggcatgctctgctgcacttggggagctgcagaacctcgaaagggtggaagagggtcccacagtcagagaggctaccagagtgtgattcattctgcctctgtcctccccatccctgctccttgacctctcccagacaccttggtgttggtcttgtgccagggtattcccagggctgaatgatggcctgtgttggtttttttgtttgtttggttggtttgtatgtttgttttggcacagtgtgaaggggtcgcagacctttcacttattatttgctgagttgtccatgactgatgtccatttctactgggtgatccacccccaaccctttctaaaaggctaactgatcttttcttgcttctgtacgctctctttccctctcctccctctcttttcttaatttcagggactccttccacagatctagtttcaggaaatgtgaaacccagttgtcacagggcagctaagaaaagccatcttcattcgtggagactgtggccctgcaaccctggagaaggacttgctggtacttaaaaaatgggacatttgccacccaggactgactgtacactccctgatcagccagcactctggaagctttgggatcccagga

SEQ ID NO: 51715 - DNA, 1069 bp, Homo sapiens
ttgatccattgtttcttaactaggaggagttttggaatcacctggaaaatccccaaaggtagaatttttgttttgtttcttgctgtgtttccaaggcctggaaaagtacttggtgtggggaagctactcaataaatacacatatattttatgaatgaataaactttttcaaaattcataggcctggttccactctgaaatcctcgtgcagtttggggtagagcctacatgtgtattttggaaaggcctttctgatcgttttgccaagtgctcctggctaattaataaccaccaagagccactaaactcaacaatctccaaggtcccttcacatgcagttgccacatttagcaaacaaaaatgcagagcatccagccaaatttgaatttcagataaacaatgaatacttttttagtgtaagtataggtcatgcagtatttggttgctgcaacttaaataaacataaccagataagacttctgcttagactgatagtttgggccagagagtggcaccttgaaactggcccagatttgaaaatcagacagagatagtcttggtttgagtctctgccctgatcttagcagattgcttaacttcactgggctccacaactacagtgtctaccctgtagagttggtgaaagtattagagataatagaggtaagatgcccagcacttagcaggcatttaataaagcttagctattattactattttttatctgctccacggggtttgaagaaaaataatagtatcaatgagactgttattggcaatactgtttactcgtaaattggcacttgaaataaccaagattatagttaacagttctaggtagagcttggcaaagttagattgaatgctgaccttgtattaaacaatacctctatgtctgggggaacaaaaccgtactaagtacagatcatccagaataaataaaggaaggaagtacttttatttcattcattatgaaatgtcatttgcttaactgacttttttgacgttaaagataaatatttgttcaggttttatagggtcactctctggggaaataggctattacttgg

SEQ ID NO: 51716 - DNA, 5962 bp, Homo sapiens
ggaggctgaggcaggagaattgcttgaacccgggagacgaaggttgcagtgtcccgacacagtgctactgcactccagcctccatgacaaagtgagactccgtctcaaaaaaaaaaaaagaaaagttatttaaattaatgataacataaaatttgacaggaaaccagaagagaagaattactcaaaattccacactaggtcttatttttagtatttatttttcatgcttttcaggctaacaaacttaaacacagtttcaataagcttttataatttggatatcagctcttgactttaacattctttgcatttttccaagtcttcatggaaaatagttttcaaattattattttcaatgactgtataatattccttatggtgtttctaccagttgaagtattctttttttgtttggatgtttggactgcttccacattttccctatggtagatgatgttgcagagaacatcttccctggtcatttttctcctccttttttattatttcccaacaatttcaaagaagcaggatgactgggttaaagggcacaatgttttcatggctttagtaactgttgtggggcttgaatctcgttatcttggtcagttatttggctccagcttttgtctctatgctgatcttaaatgagtacaaaggccactgataagaccgggtcagccagacagagccaggctcatggcagggtaggcagaatgctgcagtgcggtgcaccccactctcgcttgtgtaaatatttttctgggcaggagcgtttctcaaacagaactctgagcccactgcggtgaacctgatagcaggaattacgtgctatttgtcaagtataagactagtttgcagtgactggtctggctagaacccacctggtgttttctgagatcatctgtaaggaaacacacagcacagcagaggcagtgtgcgcccgtggtggtgagtcttagacctgtcatctgtgttagcattaccccgaaggcagagagtttgctgattagaaactatggctgctttaattcatgggtaccctccgtgacttttcagggtctcctggttgaatgaatttgcagaaggattaaaatgtgtgttcttatttgtgctttgtattctcccataagtagtgtgttggaggctattagaatagctgagagggtaaaacataaacacataggtaggagcctgacataaacacataggtaggagcctgccataagcacgtaggtaagaactaaaagggtgtgtttccatttcagttgtccagccttccttccatactctcagatgacaaaacacaagttgctgagctcacacagctaatgactaagccagaagttggacatggagaacatttttcctttgttcaaggttatttattatgttgacatttaaaatcagaagtgtgatatctgtgaagttctgattaaacagatcaagtgaaaaggatgtagttcagaaaactgcataaaaccctaaagtacagtgtttaaaaataaaacgtcctccctgatagggattatgttggtaagttactttttttcttagtatggattatttcaaattaataaacatattgttattcctttatttattgcatcatacagcttcatcctagtattagtgtgtttaataattgcatttaattagattatgcatttcaactttcaatgaaactgtagctgttagtcttttgaaggctaatttcacgctgaaatttatagatgaaataattttcttatagtggtggtgtttgagaagataatgtaactacttcttagatttcaatttcataacccttaaaatgttgggaccacctacaaatgggggacaccctgggttttgaagtcttgcctgtgtggttaatcagaacctcagaattcacccagcccccggagaggttttgaaaagcccctggctcatcagagcttgcttgtttcataaactcttaaggctttgttttaacctgtagccagcttcgccttataagctttcttgccccaagccttgagccagtcataatggcttaagcatcagatttcagacaggcgattagctctccagctaagccaagaaaggatgatttatcttccagtgagtaccagcctatttgagtgtaggaaggagaaaaatctgtgctcctgctcctgggtactgggcaaagaaaccctttggttggggatttttgcctggtaccaactttataggtgccaacaagaaagaaagaaaaaaacacatacaaaataaacacccaacagggagattcgctgtgttaagaactcgagctgttgctattattctaagagactgggtagccagtcaaagggttaaaacagcccttcctacaaggatttgaaaactctgtgctctgctcttcctcagcagacttctcgttgtgagtattggcatttatttctgattatgcacttcccctctttcttgaatgagttgggtgggctagctgagcccatcaaaggtatagctcatttgcttccttttccagggtttgccttcttcctgtgtctgggataatttcagttcatctcctttgtgcagtttctgagaaaggtttgtatgggcttagaggaaaatgatcgtgactaaagctcacagtcaccgctttggctccttttctataaaaggtggtttgatttgatctggcatgaaaaatattatcataattctcaaattcacagaaacgataagttcttgctctttcctgaccaaaaaaaaaaattaattgcattgggtagacttctctaataaaacctttaaggagacccatccaggaaatcagattttataagattcattcaaacagttgtagaaattctaagttcaaaaaccaaaagcagactcttttctttttccttccttggcttctctgttggatatttttggagtgagccttaactgagttactcatttccacatgctttaggaaaagtatgctcatgttttacaggctaagcctggttctgcttttgagctgcagttcattatgaatccggaaaacacaggtttttgaaatgcggcccatttgtacatatagcattagtcatctcagctggtagttctatacgatgagttatctcaccacttaaaaataagtacgctgctattttgagatttaaaaatatatatagtgaccagatttcttaccctagttaaagcaagccatggctgaaactcagattaaacaatattctataaaaatgagagaaggccactctaatcaacagatagaaaaacagaactatagacataagggagagctgtgctaagggacaaattgttggatttgtaggatttgttcgtatcctgaaagttaaatctttgtactcttaccttgtttatggccagatttgcctgatccctgatttccctcccaactggatcagaggttgtggaattggaatttcaccatacaaacctttacttaaaggaggtagtactagagtaaccatttatgggaacagtttgctactaatagttactagtactgagtttattttagttcctttttcatgattttattccattggaaaagttttctctcagggatcttttctactttggacatgatctctgttaggcagaatcaaaagatagctgtgtggctttctgaatttagtctcacaatatttggtttagttgataaatcccatccatcagctttgcaaataattttgtgaaaacattgattcagcttgtcctgcccaattttcccatccctgcccagtttactgagtgccttttccatttgcatccactgtccattaggccaaggcgtttgaagtgtttctgtacagcaggtacatttaagactctccaggaagaaagggggaagaatattccaaactgaaaacatcaaagagagagatggggtatttccagtaacttatatgcccagtgcttaatatcttaaaaaccctactcatgtgcatcagctcttacttttttctaactaaaaccagaaaaaagttctctcttcctctgttctcagtatccccctcatgtaagtctgtctacccaacacggtgcagccgatttatttatttttccctcagcatttttaggtggattgactgggatgctttattcaactcagggacgcaccacgaatatgttttttggggcaacccgtttggcatgttccccctcagctgtgaggacaaagactggtttgtcttcttgtgacctggcagaggaggcagaagtacctgctgagcttatgcagcatgtaccccaaccggtgccccacctcttcaagtggtgaatcagcctgatgatacactgatttttagaacacgctagggtggagacctggaagtctgtacactggtcggggagggagggatggtttgcatgtcaaaccatttcaacaatgcagcttacaggaaaaaaaaattaattgcaaaacactgtgatgccctttgccaccagatttttccattagcaccacactttatacagcttccaagtctgccccagggacaactgtttggcagtgtgaggggaaatggcagcatcacgtcataagtgcaatgattgttacctatgagcctatccggtaagggatctgagtgggcccaagcatcacacacgtgctggagctgagtgttctctgaggaacatgctaggatgttacttgggtgctagaaaacagcagctggaattcacaacacctcaggacactgattgtaaatgaagaatcctgagactaaacatcttctagaaaggtaaagggggcttagggctgggggcttttcctctgggctcttatcctttggtatgttgtccctggatgctttgagatgagactttgcagatactgctgaatttcttttcttttctttttttttaatactgctgcatttcaattggggtgttgtttggggactactggaaggaatgttatgaaactccatagaaatacttcaattcagtgagttcattcattcagtggctcacttttaaatgaccatacagatgtatttggcagaatacatctttgccattttccttctttgtgtaatggaccagccccgaggctgcgagcattggtccttctttgcctttttctccctgctttgtggttttgtgtatgtaaggatggctggcaagattaaggatcattgagctttgtattttctgttatttttctgtctccccaaacattttcactttcacaaactttaatctctaactattattcccttatcttaactctgaacttttgttttggacttattttgtctgaaatcatggtctatttccgtttcttcagttcttgtgtctgtaaaaatcacagtaggccttaccggaggtccatgactacaggtactcagagaccagctgtatccaaagagttgtgtaagataggggcatctgctccctcccagtgctgttgcccagccccaccctgccctgttccccagttagtgtctttgctttcttgacctggatatctttcccatatctattaatataagcccttcttatccttcaagtcttgctgcctctcttacctctcccaacaggcattctcagatactcccaatgggagttcctctcttcctcttctttattccttttattctgttattattctattattatttctattaaataattgccatcagttgcttttaattaagagttacggttgtgtgcgtcactaatcttataaacttgagtgttttaagaggcaagaatcatgtcatcttcttcgtatgcccaacaatgccttgcttagtagtccttgtagagtcaacagattcaatgttcaaccagcaaatatttgcagagcacctactttgtgctggcatgatgctgggcatataatacaggtcaaaaatcaggcccagcacctgcctaagaatttgtgggcctgagccctgccagttgccaatctgatgtgctatattctttgcagttttcttccagccttttc

SEQ ID NO: 51717 - DNA, 6057 bp, Homo sapiens
ctttgggaagccaaagctggaggacttcttgagctcaggcattcgagcccaacctgggcaacatagtaagaccccatcactacaagaaaaatacagaaattagctgagcatggtgtcgtgctactctggaggctgaggtgggaggatcacatgagcccaggaggttgaggctacagtgagctgtgattgcaccgctgtactccagcctaagtgacagagtgatacactatctcaaaaaagaactttttttttttttaggtaatgaatttaaatcattaggggaacataccattcttactaactttttgaaacaaaaacaaaggttgctcgaagatgttatgaataaaatgtttaagagtatgagggtacagagcaagggaaggaggcttgggcctatggtttacgaatggtgattgtttttagccttctaattatatgttgcattaaataagaagaaaccaaaaaggaaccacttgcctccattccagcctcggttcagcataaaactcaatcatttccttcacaagccagctgctgtgctatagctcaaattgtaacagagagcctttctctgcagtggagggttagggaaagagggagtaagtcagcacaaacaatgaggaaacatttgctgcctttctgatttcttcctagaattaacaggcttacagctgcatttctaggtcagcatttcatatgcctgaagagtatgaggatagtttgaaaaatcagaaggaagatgagagagggctttgcctcttttttaagatcttgctagcagttttgtttgttggtaatttttgctgtctcactgacgccaagagtcctggaattaaaccccgtggccagcaggctgttagttcgtcaggaaattccaaatgggtataaataaattctctgcaacagctcctgggctctttgcctgctaatgtgtggagtccctttaatgctgagggaagtttgcctgagacctggcttcctgctcgctgaaaatcacagttattttgtttctgggtgggtaagtaagaatgcccacaaaagaaagagaggaggagagcatgatgtttgggtgggggttggtgaaatataaactcgagctctgtgtgttgtgaaaaagatttgcttttacttcaagctagaaagaataacccagtacttgatttttggtccagtgaaaatttcagctttacctatggctttaacataaagatgtcattgttgcaggagtgaatggttgtacatatatatatgctaagatttgagtttttgagtttaaggtttagttcaattcaataatttccttttttgttgctaaatccatctttgggtatttgttttcagctctgtttttccaatagggagttgctcaatattcattaaagctggcttcttgtataaacactataaaacaaaataaggacagggattcatacaaatactagctttccactaccaccccacctccccctggccaaaaaactgtaatgttttgttagaaaagcctgttttatccctaagttagccagtgctccttttctgcttttcacagaattactctctgaactggcacatttcttttttacgcttagaacagcatgttacttttgaagaaagtttggaaaataacagtccaagctcattctcttctgtgcatgcatgattgatttgggctgtatttcagcaacaacttttaaaatgagacagtggacattagagagcagcatagttggggttgcacttaggagcccatggcattttggctgttttgagacagatttggggtaaagagttgctgcatcttgtagttggcactgaacactggagaagagggccactgtataaaccgcaaggcccctgttaccatcacatgcctccctagcacaatgtgccctttattaagacaggccgttccactactgagaatagtaaccctttccgctgtcttcccctcactcttacgtgcagcctggcttctggcctcttaacccatgcccagagtagaattggcaatacccaggagggacactgcactggggattgttaggtcatgccagttaggatgcagctggaaaggtgctgctgagtgggacgtgcagaggggaagactgcaggctctgtctgcctgagctcatctggtctgacacctgccgtgattcatttttcttcatgccatgttaagaaattttgtatcaagtctagtcgacagttactcatagcctggaagcaactttggaaatcagagttccactgacccccctcattttaagggtatgaatcacatcactgcattgtatgattccagggctctcttgcccatggctcgtgcatgaactaggaagtgatcatagttcctgttcttgttttatgaaaacaatagtataccttcccccaacctaggcaggccattcaggacgactaccctggaggtgctctgggtggcttaaagcaccgtctttgcacagtgtgttagagagcactgtgccctgaggacttcgggagagctgcagaatgagtgttcagaataatcggcactcacctttgccctcatgttgtgagatggagatattttaacctggccataatatgctttaaaagttggggggtgtttgtctgcttttgcttttatttccttcctgtgctggactgggactcccccttatctaactggtacataccactctgcccaagcagtgcgtgtgcacacacacatcccctacagctccctgctggcatctccttcatacactcttaagaagaagaaaccaatgtagaactcaagattttagcagacttacttggtcttgaacaagtatcacaaataccttaaaccctgacttcgtgggggggggggcaaggtatagaggaggaagggttctggatcctctctggggggccagggttgtgttcttctccagacaacagagggtgatccagtaccactagtagtgacaatagaacccacccattgttctaagtgacaacacactgatgcaggtactattattttctcaaacaattggaatatagtctaatttgccgacagctgcaaagcagcagagccaggattcaaacccaggcagtctggccccagagtgcctgcttcaaatcactacatctcttcctctgttatacttattcatcagtagatgcctagatgtggggctttacacttcagcagatactaagagggccatgtaccaagcgccaagtactgaggaatacaaacataaatactgcttgagggccaggcgcggtggctcatgcctgtaatcccagcactttgggaagcccggctcacgaggccaggagatcgagaccatcctggctaacatggtgaaacgccgtctctactaaaaatacaaaaaattagccgggcgtggtggcgggcgcctgtagtcccagctactcgggaggctgaggcaggagaatggcgtgaacccgggaggcggagtttgcagggagccgagatcacgccactgcactccagcctgggtgacagagcgagactccgtctcaaaaaaaaaaaaaaaactgcttgacttctgcctcccctagacacttagagtctggtagagaaacacaggcatgtgcttgctaactgtaacacagttccgcgtatataggcaaagtgacttaggaaacaagagggaagaaggggaccagttattcccaggacagagcagttgagggtaagtagggctttacaaaaatgaggtatctgggttgggccctttaggacaatgcagctgattttgacagatgggagagtgtggggaagggtgtgctgggtagaggggatagaatgagcaaagatagataagcttgaaaatttctcagtacgttgaggtttggggtggggaggaacctgggaggtgctggattggggctaaattgttgacatttcgtgccacagaaaagagcttttaggctttcttctttaaagtggagctcctggcacatcactttgcaaggatagtgattgagaagttgtagacgtttccaggaatacctgaaacaaatgtaaaatttctcaaataatatgtaatacaggaaagcaaagccatctgcccctgaaaacaggctgcatatttgcagtatgagtaacagcagagtctgggctgtgctccctagtggcaggctgactgcactcgtgcaccctaaggacattgatgcacagatgaagaaaggaaagacagaaataaaatttatttttaaataattttaatcgtacataaaaagagctctcatgtcttcctcacccagactcagatttcccagtggttaacattttaccgtatttgttccatctgtgtgtgtgtgtgtgtgtgtgtgtgtgtctgtgtgtagaaatgcagttgtcatgtctttttggcctccttccatctgaaaagttctcgtttttacctttttttcatggccatgatggttttaaaaagagaggcctgacattctgtagaatgtgtttcaggcagggtccaggccatgccttcttggcaggacagtgcaaaagtgatgctctgctcttccccatgcagatacatgatgtcaactttgatcacctggtcgaggtggttatttgtcagctttctcatcatagagtcaccatttttttttatgattgacatttcatgccacagaaaagagcttttaggctttattctttaaaatggagctcctggcacatgactttgcaaggatagtaattgagaagttgtagacgtttccaggaatattttctggtgagatattctgagacgacatcagtatcttagtctttagtaggaaatctctacccactagccttagctagtgattcctacctgaatccgccactgttctaataattggtccatggtgattttctgttgacataattccttgtatatattagttggtattcctacatatttattatagcatgatggactcacaagtagatacctattctctggattgtaacttgttactatcattaatcatattattttcatgctcaaattatcctagatttggctagtgggggttcaaaagagtttgaatcaaatatacccttgacactggcattaaatagccaatctgatgtgtgctgacgattgagactaataactggtaggcggagggtgttatctgagttctagatatgtatttatctcagacagtatgggttacctgcaacaagatctgtggtaggcaggccaacagtaacactcgggaccctagaggcaagccaacctgaaattcagcttgtcagagaccatctggtgggtggaagttttgcgttttcagagtatattgtttaagttccccaggcctatcgtctacctttagctttccctgttggccaattcaggccctggtcagatgcgggtggataggtacacaaagctggaaacagcgtgctgcccgcctttctctcctgcctccagagacacttgttggctgtcagggtcggtgttgtcttagcctcacaggcattttcagtccttgctcttcccatcctagagtttcaaacacagagcgagtctgtgttctgcatctcaacatgctaaatcagaacctggattccctaaaatgttgtctcctgtttcttcctgccctcactcatgccatatccgtccttcccaggttagatttctcatacttcagtgaccttcagaaaaggaatcccatcacttttctctgcggtgagtcatccattggtttaaagaaaaaattttcttttttaatagcagaatgaggtaacagagccctagaagacaagcccagagaccggatcctggtctccagctcagcccagagtagctggaatttgtcagaccttctcagtttcctccgaagtattaggggcagacagagtcaaggctacaggctggctagcccagatgcagacagtgtcaaagttctcattgtggaataccaccagaacttatcttactattaccacttaccatctaattgggtaggtaaaattcatatggtgcaaaggagtttgttatacctagacaaaaattcatggggacttgaataatccatggaaaccctaatggagaatgctga

SEQ ID NO: 51718 - DNA, 778 bp, Homo sapiens
tttgcatttttagtagagacctggtttcaccatgttggacagactggtcttgaactcctgacctcaggcaatctgcccacctcggcctcccaaagtgctgggattacaggcgtgagccactgtgcccggccaaaactgttgtttttatacttcctcttgatcctgaattaataatttaagttttattgtaacacttttccagttaataatttagcgtctttctcctttttaagatctagtcttaatttttgagagggaaagggggaagaactgtagtacctgttagaattcagtgtaactccaagtaaacaagacccaaaacaaacgatagctaaaacaaaatagacctttatatctttttcacttaaaagtatagaggtaggctttttagaaatgttatagtagctctgatccacaaagtcctttgaggcccaagttccttctagtacatcgttcctccacccctagatatgaactcatgtttcaaagttacactagtgttctagtcatcacatctgcattccaggcagcaggatggaggaaggcacaaagaagaacataggtgaaaggattatttctgtgtttcttaatggaggttcctggggtatactacatgacacttctgcttacagacttttatttgcccctattagtgtggaaggaggggataatgcatactaaagaacatcaagctgtctttgccatggccacccctattcattcacctcccaagtgaactttctcattttattgcagtcaattccatttgccttccaaa

SEQ ID NO: 51719 - DNA, 2389 bp, Homo sapiens
gcgccactgcactctagcaagtttattatgttatactatatattcagttatttattccttcagtaaacgttgtcagacatctcctttcttcccagcatgttgataattggtgtgtggttgggagaggaagcaatgaaaaaaaaaatgtatattttttttgggggggtgggggcggagatgaagttttgctcttgttgcccaggctggagtgcaatgtgtgtgatcttggctcactgcaaccttcacctcccaggttcaagcgattctcctgcctcagcctcccaagtagctgggattacaggtgcccgccactatgcttgggtaattttttatatttttagtggagatggggtttcaccatgttggccaggttggtctcgagctcctgaccttcaagtgatccaccctcctcggtctcccaaagtgctgggattacaggcatgagccagcgtgctctccaaaaaaaattttttttaattaagttttttgctctctgggtgcttatagtctggtacaaaagacaaaaaagtgttttcgtcttgttaaagttgggaaataaatcagggactcataagtgcctaatttatgttgatgtatgtaaacatacactagaaaacaggatattaaaaaaataatgacaccgggtagttttattgtagaataatttttaccatggacaattgtttgtgaaaatgacaccttgaaaacacatcttacttttttacttgctggagaatgaaacttgaattacaagtcctttgggtagcctggtttgagcagtattaggaaataagcaagcctaacttagttaaattctaacctcttctgattcccagaagtccaaagttcatttgggggtaatacaacgtgatacatgctttttgtgatttctacaaggtgaactaaagaaataactaaagatggaccagttaggttttggtaaaaactgtgataagttttgttgtgttttaaatactgatgttgagtcagttcatctttcctactgaaaatccttaagtgggaaaagtatagaaaaagtaggagttacaccaaaatattaacgcttgccacttgatggtaggatctgagtgccctttttttacgttctttaaattatctgtatgtggcttttttttttttttaatgttttacaagcatgtactactttcgtatctggaaaaaggtttgtttttctttcattttttaagaagaacttttcatcagtggcaaaggctcagttgaaattaatgataaaggataactacttgccacgtgtcataagcccagggctgagaagagtcaggcagtgctctggaaccagtgagtgctgcccggatcctgagaacccgcagagaacagtggggctgattgtgcctctgcacctcctcaggtgaccgagggctgggcaggaggacacagactctttcatgaagcagtgactagtataggaaaaacagagcctctctgtagagatgcttaaagtgctagctttatttaaaaatcagctggcaaagcgggagtgaagaacacacattttcagaagataccggtttcctgttttcattaagaaaacagggaatgcggaacagctgagtgcggcgggggtggtgtcactgcagccggagggagacctcgccggtgaaagctcagcctatggcatccgagcgtggccggccaagtttacacgaatgttgaaacttctcctcacggggtgaggatcgagggcgcccgaggccgggtccggctgagctggagcgagctgtgcggggcagcgcgggctggcggggagcgcggcgggcgccacgtggtaggtgagctgcgagcggcgtggggcggccaccgctggccgaattccggggggcctgggcgaggggggccggccgggaaggtgcgcactgctgggccgcttcactccaccgcaggcctacgggagtccagcttagacccgccggctcccacacacacatcccgggaggcccggatcagcctgcctgacagccaagctgcagcttctctcctgttaatggagtttcagacagtcctggagacaggtctggctgctgcagcttctctcctgttaatggagtttcagacagtcctggagacaggtctggctgctgcagcttctctcctgttaatggagtttcagacattcctggagacaggtctggctgctgcagcttctctcctgttaatggagtttcagacagtcctggagacaggtctggctgctgcagcttctctcctgttaatggagtttcagacagtcctggagacaggtctggctgctgcagcttctctcctgttaatggagtttcagacattcctggagacaggtctggctgctgcagcttctctcctgttaatggagtttcagacagtcctggag

SEQ ID NO: 51720 - DNA, 2671 bp, Homo sapiens
gcagcttctctcctgttaatggagtttcagacagtcctggagacaggtctggctgctgcagcttctctcctgttaatggagtttcagacagtcctggagacaggtctggctgctgcagcttctctcctgttaatggaatttcagacagtcctggagacaggtctggctgctgcagcttctctcctgttaatggaatttcagacagtcctggagacaggtctggctgctgcagcttctctcctgttaatggaatttcagacagtactggagacaggtctggctgcatattttgagtgatcaccttctccatgtggagatgaaagttaaaagggaaagagagaaggacagctacgttcttttaacacgagcacaagtttccaggcacagccctcccgaccagccctcccattcttaggctagagcatgactgctgctgggcacttctttcacatagaattcacttcccacacgtgttagaatcgaacagctagagcaatttaatattgttttaaattgggacgtaaggaatatacgtcctttttattcctctgcttggcaatcttatttttgtactttctttccaacatttgggaagaaagcgggcagatggaagcagaagtgttcttcacagcattcacactgtcgggtgtaaatgttcggcagtgctgggggttgggagggcagacagcaaccaggtttgctggaagttacttcaaactggacagcagtcaagtgggtttgtatactcaggagagggcagggagactgatggcttacattttcactcattgcttttgagttctttccatagctctaaaaatgcgcagcttattagcgtggctctgggaaaacaacacatgacctgatcctacaatttaaaaaaataaaaatgaccttgcttttaagtttgaaatgcatagcccaggtcagcgacaaggtctgcgctttgaaaggttcttgtgtttcctcttttaaatgtctggtttagccttaagtagtatttactgagtgccacatgatccagtggttggagtatgtaggttttgcccttatcttcattctttgcatctgtttgaactcatgacaatacaaaacaaggtgttcctgggatagggaatgttttgtccaaaaggagtcaacacggagaaaactcttcctacagttaagacagggtttggttttgtttttaaatgaggagagaaactgagaagtggaaaacacaaaatagagttgaagtctttcctctgtgtgcttctactcatgctgccagagttaatcactaaatatcccatgccccagctttctcagccggggaggtgccaaggcaaattgtaagcccatggaggtagtcaggagctgagtgcccttgacctccatttagaaaggcagcccagtctgcaaaagacagcagcagggacatctcatcccaggcctcctggttatgctgctgactttgtctgtctgctactgacttttagtttttttgtgtgcctcagataacactttgaaaaacaggaatcttaatgtctgctgtctatattccaagagactgtagatgaccaatgaaattatctactggacaatgctttcatgtcttttttttttttttttttaattgagacggagtttttgctctgttgcccaggctagaatgcaatggtgtgacctcgcctcactgcaacctccacctcctggattcaagcaattctcctgcctcagcctcccaagtaactgggattacaggcgcctgccaccatgcccagccaattttttatttttagtagggacgaggttttaccacgtgttggccaggctggtctcaaactcttgacctcaggtgatccacccgccttggcctcccaaagtgctgggattacaggagtgagcaccgtgcccagcctttcgtgtcttttataatgaattcttttaaaaatatttagtaaggacttactatgtgcttgtctcttaatcattatctctgagtactgatggacataaagatggaaaaagatggaaatagtagacattttagactacaaaagtggggaaagaggggagtgagggttgaaaaattacctattgagtacggtgtgcactatttgggtgatgtgtacactagaagctcaaagctcatcattacacaatatatccttgtaacaagcctgcacatgtactccctgaatctaacatacagttttaaaaaataatacaatcattatctcattacattgtttttaagcctgtgagttaaatatttgcatctccatttttactcagggagaaactgaagttaagagaggtttattaacttgcttacccaagccgggcgcagtggctcacgcctgtaatcccagcactttgggaggccaggttgggtggatcacctaaggtcaggagttcgagaccagcctggccaacatggtgaaaccctgtctctactaaaagtgtaaaaattagccaggcgtggtggtgcacccctgtaatcccagcaactcaggaggctgaggtaggagaattgcttgatcccaggagacggaggctgcagtgaaccgagatcatgccattgcagctccagcctgggtgacagaatgacctgtctcaaaaaaaaaaaaaacaaaaaaaaacaaaaaaaacttgcttacccagctgttgtagatccaggttcaaaaca

SEQ ID NO: 51721 - DNA, 1875 bp, Homo sapiens
gggattggggtgggaattgggttggctatacacgtacggtctcccaacctagtgctgtgctgaggagttgaaggaggtgagtttggtctggataggaaggaagcagcataattcagtgtaggctagttaatttcttcctaatttctatgaaaattgtttgcaaggccagtatgattacatcatattaatagcttaataaatggagccaagcctgagtgtttattctcatcacagaaactatgaaagcatggtattatccagtttttcagatgaggaaacggaagcagaataacttccctcgggtcataaagcttttaggtagcagagcctgcatttgaaactcagtggtctggctccagagcctctgcttctgcatggtgctgtctggtctcctttatagacattagaatctacacgtcatttaaaatcaggagaaatgtcccagtttggtgtttgaagcttctcttagggctgttggtttttgagagcagattctaactgcatatatatactttgactataaaaggacaggttacttgtgctttcaactaggtctcagaaagtctataaatagaagaactaacgaccacttggtgttttggcagaggttctgtctgaacaccctccagcacgagtggttccgcgtgtccagtcagaagtcagccattccagccatggtgggggactacatagctgcttttgaggccatttccccagatgtcctccgctatgtcatcaacttggcagacggcaacggcaacacagccctccattacagcgtgtcccactccaacttcgagattgtgaagctgctgttagatgccggtatgttggctgcccttccaccctctcttctctaacagtacttgggttgtgactcatctcagagaacctggttgagccactcctgaattctctgaccatgctaaaatcctttttattgcttttccacatgacatggcaagaattttcttgagtcattcataagaggcttgaagtttaaacaaaactgggtgacacagattctagatctgtttttgaaaggaggttttgaggatcttcttgctgcagttcagctgcattcaaaagtgagaggtgtatgcctggtaagaagcatgtctcacgttccctcctgagctgaatcatgcgggcttggccggtttgcactcaggaggcagagtgctgcttacaggcccagggtcacagccttggtgcgtgtggaccacttgatttgaccttactccatgactgctgtccttgcagaagtgtgtggttagtcaagatggggactaagcaaagccaccttaacagatggtcaaatgatcaccattctcaccaaaatatactgttattggggaaacagcatagagcaaagggcatgttattcttgtctctcaaccataatagaatagtagaaacttgttatcccagaatagagccagtggacatcttagacatgaagtgagggaggggcacatacacagatggtaccctcaagaaactgtgagctttcaacttcttgttcaaatggagcagcctgatgccacatagaccccaagtcttttaatttttgtaatacatatttttatttctagtatgtgacagagaagtcagagtatctcagtctgattaatgaggatgtagtgtgaaccttagaatatgcaatcatactgtccaattttctgaaattctgtcttcatccactgtccaatctcttctgctctgttttgggaacttggaattgatgcagagaagaaagccaagcagatttatccttcctttctcttataagtgtgtttgttccctctttttggagccatgttagggtataactgcttccatcttacaggaaggaatttcaagcccctcctcttc

SEQ ID NO: 51722 - DNA, 758 bp, Homo sapiens
aaatcaatggatttgcactgcagaatcaaattcagtgtaggtgacttctgacaggtgcacttggaaatctggattatcattagaggctggggttacacggtgactaaaaccagttcctactatagtgaaccttttccacccaaagtgaacacactgacccatcaaagtgagtagcttgtgacacaacatatgccagagcctgcagagtagcttgacttcttgaagcgttttcccatttctgcttagtctgtcccatcaacaccactctgctctcttctcccagttcccaggctgtccacatttccagataactccttgaccgggaaactcaaccaaagggggtacttttgcgtgtctctaggccaaaggacaggagtggtgataggtagaaggtaggaactggcatgtaggcagtgagatggtgtaaaggtcacagaggtcgggttggcttggttccgtttttgaaagtttatctctgtggatcacaggtttggatcagagcttctttagctcaaaacaccaaaaagttaggaaaatatcctttgtaggtcagattcttctgggcccaagccagtagggagaaaaaccagcggagtttttcactggtatgagggactgactagcttcacactcagccatctccacaggagcacatggaagctgcagctgtagcagattcccttcttcccctctgtgggagggagagcttctgaccgacttctttcttccagaagagtttgttagctgtgctgtggttt

SEQ ID NO: 51723 - DNA, 1180 bp, Homo sapiens
ccaattattggagggtgttttgttctgttacctttcggttgtctggaggtttgagaaacccaacatggcttgttctttccatcttatcttaaggatggcagcactgcgctctcaatcgccctggaagcaggacacaaggacatcgctgttcttctgtatgcccatgtcaactttgcaaaagcccagtctccggtcagtgttgtgcatttggcatttgtaaataggctgaaatccaccagactggtggacccccttcctccaggaattgacgggagacagattttatgttgattcagaaaatggaagttttagtctggagcttaagagttcatcctttccgcctccaccccgcaaaaagcaggagaactaatgttttagcagaggctggaccttgcttgtccttgcaagacatatgctcacagcttcccatagaggttttgattctgtgcagaattatccagatagcagcccctgagcccatggggatatttcgccatggttctggcattgttcctgaagcagatggcaggcagcctgtagtccacagttcactctgagtgggaaggtgacttcccaggacagccggacatagcactgctgagcccagctggccttggagctgtggacacctgttccctgttctcagccagagctctcctggctcgggctcacagctgcttgttgcctgtggtgggccaagatcctatgtcacagggtacacatctgcctgaggtcacttattaacccccagtttttttcctttcctggtctctagggcacccctaggcttggaaggaagacgtctcctggccccacccaccgaggttcatttgattgattgtatgcaaatagccctttatttacatgccactattaagctgctaattgttcctgttggggtgacagatactgaatgtatacgtattgtgcctgagctcaccagcaaacagaagcatcaagcccaggggtaaaggctgaagctttcacagtgcagagactgctagcctgggcacacacacctcctttctggccgtcttctgtgtagggcacactttaacccagtctctgttgctgttgagtctctgctccgttttgtacagtcacagggaattctgatctgaaggggcaccttctgttcactcccacaaagtggtgtctggttctcactgagacgttttaa

SEQ ID NO: 51724 - DNA, 654 bp, Homo sapiens
tttaaaataaggaagtcgagatgactttgatcattggtaacttgggcctgggccagacaaagtataaaacttacaaaagaatattctcatttggtcttaactaggtagatgtaatatatgactttttataaaaagggtatctatatgaacttgacacagtattttcagcttttgtattccatactaaagccatgaagaactacacgtaacatcatcatttgtattaattgcacaactccaatgctaaaggttggattgtgttagaggaatcggctctgtatttgcctctagagaaacacagtgttctctttgtatttatggattcctttttaccgtgtcacatttactttggtcctctatgtatttaaatgtttgaagtgccttagactcttgccatattttcaaaataaaattccattaagctcttttccttgtccctgtttcatctctgatagctgtccgccccgagccgattgacttacggcagtggcagcacacgctgatggattgagctgagcagggagggtgagtgcgccagttggctccgacagggagacagcatcttccgagggcgcttgtccacttgcacagcttggctcctgactcagattgcaagtcgggaggctgaagtttgaggcctccttagacaaagcg

SEQ ID NO: 51725 - DNA, 846 bp, Homo sapiens
ccaaagcgctgagattacaggcgtgaccatcacacacagccttgggagctagtttcaagcggtatttttgacgagtaccggggtgaagcaccagtaagggaagaattccatctccagcctgttcccactgaggagactgtaccataaagcactagggaaatctgacctccacagcctttggcttccaactgaggatcaaagcaaggacaggcatgagtcatagtagagtccccttaaacccttagctggtgagcgttatttcaccacaagccatggctatttcctgtggccaacaggaaaaggctgcatagtcatttctgaattcctgtggaagaactactctgaggcagtcttatcaagcaagtctagctctgtctctgggcagtgacctgaaggcatctcttccttaactttgacagctgatcccagactaacttgtcacataggagttggacattggttgtgccatactaaccccaggaggaggaagtggaggaactgactgagaggagaggttaccacttgctaatgaagttaagggaatcctcattgcgcaaggacgtttcagctcttctgcctgctctgaaggtggaacatgctgtggtcatcactttggtcaaacatgaacaacagccttataggagagcaggtggagctaatgggggaacaaagatgaaaatcatgttcaacacttttggaagcactgaacatgatggggttaatgagccagtggtctgatcctccttctgctcatggagggaggctgaaatgcctgacaacctctggcttctccctgcaaaaacagaagagatcctggagctaagataggtgacttttttttttttt

SEQ ID NO: 51726 - DNA, 465 bp, Homo sapiens
tctgcagaccccagaggggtccacaagcaagtgctcaacaacaccgtcctagttacattcgggtcatgtggcttcttgaccaggaagagagaaacctctcaaacaaaagctaaagagaatccacagctgccttctccaaacctgttacagctggaaaagcaagtgatgaggaaatcacatgagctcatgcttgtgaagcactctgtacaaacaggcactgtggaagcattcactattttgttaacgataaggtcatttttttcctcgaggtcaggttgttcattccagtttcactcactggcatctctccccagagcacacaggcactcacacaaaaataactgtcttcctagttatcccacaggtatggacaatcgctggtacgaccattggattgtccactgccttgctgagttccagcaggctgctctgatggggaacaaaaaaaaaaagcaacctgtgggc

SEQ ID NO: 51727 - DNA, 897 bp, Homo sapiens
gagtttaggtgctagcagagaagatggcctggctcattaatgacattcccacttatacctggaggtgaaatattttgtttcccagtgaattattttttgggagatgttgtcacacgtaactgttgtagatggaacctgcctagcctacctctttggaatccagctgccctggatatccgtccccagaccctggtttctgagtgcagccatctggaaaggggtgccgggctgggcccctgctgcccctcatctgcctttcttatcacctggagtctgctcagtgaggtctactgtgagggcttaaaactaatctcccatagtttatgatctcaaatccatttgcagtgaggaagaccctggctgaccaacggcttaaacaaatgtccccttctgtggcattcctatggcaagactcaagttccacatgcatgatgtaagtgagagcagggcaggcctttctcccacacgtggctcagaaatcatttacaaagcaaacaaaaaagacagccctgggcaggagacttttcctcttgctctgggccaggcctgcactcccaggccactcctagagggctcgtctgatctgaatgtgcaattgaaaacaggtgtccacccagtgcctataaaatatatactggcaatgggggagatccttggagattctttcaactggtagaaatatggagacaattcccaaatctgactctgcctagatccttccagacctccagccccatctctcttagaaaaaagaaaaaattcaaacaaatacttggagggaaactgggagcatatggttctaccactacgaagaaagaaatgtgaaaaagattagcgggactctgtcaaaacatcagaataggccttgtgcggctggaaaagtggctcttgtatcct

SEQ ID NO: 51728 - DNA, 1241 bp, Homo sapiens
ctgcttcttacgagcctgattggagaaagatatcatttcaccagggtcacagagtgttttctttaagcagcttccagagtccccagaacctgcctacctccctgaccaccatgaaaggtctagctttgtatagctgcccctacacaggtacagtcctttccaagttcttatcagctgtcccctcccccaccaactgcctctgagctttgacaaggttgagttcagaataaccatgggcagtggccaaagctcacagcactaggacattctgcaaacactccaggtcctgcacagacacggactttaaatagccctcctgtgccaagggctcaggatgcatttcaggagcttataggtcacttggcactgattgcaagaccacaatggaaataacagccccgtgattttgtgtgctgctatgtcagcaaatgctgcatatgaataagccagggttggagagcctgtgtgtggtgacataagtgagggcagccaagcctgtcccaaggcagcagactctgggagacctgaacggggactcttggcagcttttggaggagccagactattaatacttagcccagggcttgggaagctgtttgcacttagagtgattatttttttcatggtgaagtaagaggtgtcaagtatgatagcagaacaccccaggactatgagaaaggctcccctcatatgtcaactttcatgccaacttcttggggaatgacattgattggtctatctcctacccagcctcagtctatgtgagatgctcttcaactgaagggcagagccactgtgttctgctctttggacaaatgatccaggccagaaaaggactgggctctgtgctggcactcaccaaatcctcacggctctgatccccctagcatttccatttggcactgaataggtgcagtagttcctttacatatttaggtttgatcgtgggtactgttttgaaagacagatttgcatagttaagcattttataaaatattttcccaaaagcatttatcaaagggaagtgtgcaagtccaaaggtggacggaagctgggggagggtgtgggagaggtggggagaagaggtgagaaccggggaccagaacatatacttttcagctgccctggctggccttggagcagccctgctcctgtgggaggggaagctctgcaggttgcagcgtggatcagagagatttatgccctgcacagcgaatacatatccatgactctccacggca

SEQ ID NO: 51729 - DNA, 818 bp, Homo sapiens
tgaaggcattctggaaagcattatggctattgcacagcactcctgtgcgagtcatggctattaactaaacacgaaagaccaaactgtcaggcagcaaaccttttccttatctgcttgttttccaatttctctcaaatgcaccttgaaaactgtggtactaaactgagaacagcacaatggttgcttgaagtcagtgtttctgaaggcttccattctctctcgcatgggaggagtggataccagctgtgtgcctgaaggcgaggctgtcatggcaaatccttccttgctcacttcgaaggatggcgagagttctgtttcctgagaattaccagtaactgacaaatcctgctggactctggctatggatgggaaagttcagaagccatgtgtaaacagttggcacattggaaatatttgctaaggaaagagcagacccgaggcattctgaaaaagtaagaagtttgtgtactttattctccgggacccaggccaggcgtgtggaagactgattgtagaaaaaggattatgaaatacttaggaactaggaagtggcatcgtgtctattttcatttcctgaggccaggagttcaggctactcactgcctctcagaaattagtttgcaaaacacgaatgcatgtctgtttctctctctttcctatgttcttgtcaaagtcattgtgaaactattttctatttgttaagaaaagcaaaagctggttaatgatttgtagttttgaacacaaaaagaaagttggcaaatctatatataagcttcttaccctttacattccagacatttttttgctcaaatggtata

SEQ ID NO: 51730 - DNA, 1986 bp, Homo sapiens
ctgtccttagagatccttggaccagaatgcagaaaggagggcaccgttctgtgattttcctctgcaactggggatcagatcatttatttgcctgaggaaacaataacttggcaaactctctctcctctctttccacgtcctaggcaagtgatgaaagaggagtgaggctcgcttcagctctgtcacagatgttgactcaccactggtctgccttccctctcccttgccaccctcttccttctgccaaagttagcatgctggatcagtaggatgcaaagctgcgcatgaccctttttggggctggacactgtcatctggccagataaactaacaggctagcaaatccagctggggctggttgtactttgcccacgtctgttgcagcatatggtgcgttcacttgaagtgactgacagagctatttaactttgcagtttgtttttctgatgcccctacccaaataccacacacactgtcagatattggtgaacagtcttcagtgtggttacaattcatggctatcataaggagaatactttaaaattggatttgaactccatagttcccaagatggcagagctggatggaaacatctggagacattccctttaattggccccataattttatacagaaagaaattgaagcagaaagattgagtgactcccacaaggactcacacagccagttagtatcaggactagagctagaaccttcgaccctgacttccaactctgtgctttttccagctcacgctgttcatatgtttcctttcattttgtcttcaaaatttggccccttggaaactttcctaggaattggacctctgagcctacagtggcttaatgcacacttttgggaaaggatagccatgaggcctctaagtggttttgatcaagtttgccaatatttacaccctagaatgatctgcataaacttcataaataatgtaaattcctacaaagtgagtaaacagtgagctacatggtcttttgaaaaatccgtgttatgcaatcaccctggcaaagttaacaacgcaatagagtgttgaaggtaaccactgattgcagtcactgctattgaccattttaagtgtgactatttttaaaatactgtatgcctcattaagctgggctctgaaaatgaggaatttgctttaactgcattgttttgaattgctgagagaagaatctatcaaccacaaggtgccctgctgctgaactcagccaaaaagctgttaataactccagcagatgtttcagctttttaggccaatagactccctctctccctgccctcccctttccagaatctgatgccaatatgactgaactccagtttttgtggttgttgtcgccaccgccgccgctgctagggctggtgatacagtgccgctgaggaatgatcctttaaacaaccactggccacagaacctcagccctctaaggtcagaatattattgcttttaccatcagaagtttaaatcttcagggggaaaatgaaggtaagggcacaaattcagtgtctttgttttgttgtctgccttcattgctagtcattttgtttagctttctgtggcttctcccaatgctacaagtccatttctcagactcatcagagtgctgagcttgctcaggttaagggtcattaatacactggaggccttactgatctgggagagaggttcttgggttagcagctttacaaagggggcctctgtgtgatgcaaagttttgtgtggttgtatgcctgatactgtgtggttcagatgccctgacctcagcagttctgcaatattagatgtgtgttttataaatatagctacatccctgtgagacaggtagcgtatgagggcacacagggtcaccacagtcccataccaggatttatcaacatctctgaactgggataaacctgacattgtcacttgaaattacatctactttccaaggctttccaaatgagaagacattagaaataaaggga

SEQ ID NO: 51731 - DNA, 5227 bp, Homo sapiens
ttgctcaaatggagtcaattttgcaacagtaaaatggtcttaaaataggattttactctagggggaagaatcctcaaccagatagtcacagtgcactttgaatgactaatttaagccattacattacgaaataagggataaatcatacttttcataacactactgcataggaacagttttaagagtcaagcatctacattaatctgagtctaaaataataggcccctgatttaaagtctcctaacattctttcacacttcataaaactaaaaataaaattgtctcaccaaacaccgacctattggtccggccaaagtactgtatttcaaggaaaattggagcaaagaggtctcaaaaccgcgacttgccagcaaattacaatttgcagccttaattggtctcaaatgcggggtgagagggaagagactacggtctgtagaaaataagagatttattcccctttttaaatcaaaaccagattccatgcttcagccgccccctaacccgccagccccgcccccagggtttgtttttccatatttttgtatatattttagcgaagatggcaggtgagggaaggttatagtgctgtacctagtccacgaagtaaacagagaggttagggtgggtttacttatttataaggcgttcagcctctcagctgtttctccctcgttggcatttggaagcttgcagtccttcagggaagagacagatttggcaggaacgttctttgtgcccgcctcccttttctattttttatttttttacctggaatagggggcagatttataatgacagccttagggaagggggagaaaaagtttcagccggcacgacaatgcccgttttttccacagtccacactgtgccacaaacagctttggtgccactcggagcccgtcccccgtcccctccctctctctctgcaggctcgcactggcaggcggaggcacagttaaattccagcaccttctccacatacccccgaactactacgcgctattactacggctgccctccgttttcgcttcgcctcctccccttccgcagtctccctggaggagccccgcggcgcccgaggaagaggactgccagggaagggacagcgggcgcccagctccagcagggcttggggctttctgcatcccgcgcagtttctctgctccaggcacaaacgcggcccgagagccggcgccttgcagtcacacacggatccacgcatacagtagagctgtctagatccacattcttgcacaccgccccctcctccccccgcgctcccggagtcgctgagctgagcgagtgacaggcgcgtcccgccaacccgcgcccggacgggcagggaggagcggcgcgcggggccaactgcggcgcgtcttccggcgcccgcggaggaggcgagggtgggacgctgggcggagcccgagtttaggaagaggaggggacggctgtcatcaatgaagtcatattcataatctagtcctctctccctctgtttctgtactctgggtgactcagagagggaagagattcagccagcacactcctcgcgagcaaggtaaatataacttacaactcttttctcctctttcccctcccttcggccgccccgctgcagccgccgctcagacccctccggcaccacgccgccttcgcccgggattatccattattatcctaattattatttattgtgcatgcaaggagaccaaaacaaacaggcgggccaaccgccgcgacaaaaaaaagcccgcctcctccccgcgggcctcaggtggaatgctctaacgacagctcccaggcggcggtggaagaaacgagaaagtttcaaccgaaccttgctgttctaataataacagtaataattactacttcaagggggcaaaggaggaaaaaaatcccaacaagccacagccttgatcctgagtgggcagtcagaggcgctgccaactcaaggttgcaacacacacattgggccaggttgcaatccccccatccccttaaaagtgaggcggcggggaggggggtggccgcaggagggggaaggcctgggggacaggggaggaggatggaaacgctactgttcatcccgggcaaccctccccggaagagttggaaggggaacgggaaaggagggcggggagcccaggctggcggcggggcgccaacggacgctgttgccacccgcttcccagggacttgttcaaagggctccggctgcggagacgtgagcggatcgcagcgggagaagcctgagctgacgcgcgaaggaggtagcggccactgccgcggggccggtgcgtgcctgatcggaggtgtcacctccactttccgcgtttcctccggcgtggatggggaggctgattggtaggcaggcctttaggcaaaggggctgccagggggctgcgccccgggcgctgcggacgtccctgcctctggtacctggcggcagcgcaggctcgggtgttaaagttcgggatgtccggcccgggccgcactgctggagggaagggaggaggcccccaaggaggtcggaggtgcccgccagcctccgttaccctgccctccctctccccgggtccgtgttcttttgcttcgcgtcttccccttgcttgcgccgcgggagctgcgggcgtggggcgcctgcgatcgtccgggtgctaggggcgcgccgggacccaggagagccacggcggcggctgcgggcccgggaggccatgatccggataatcctgtctgcctgactgtcacaaacaggacccgcgcaccaccgggcagcggcggtgtggttcgcccgggaaggggaagggctgcggtggggagggaataggggggtggcgagggcgggaggcggggagaccgggtaggagcctcctcccaacgatgacacgcactccttccttctcgctccctgctcaggagtttgctttattcccatcccaacctggtttaccccttcctttgctctccccctccacccggccgtcttcccttcctcccgtttgcgttgcaaaacacggccatgccatctgcaaaggtgtcgcgatgcacttccctaaataaccggtccggcgcgccagcccctcggcgccctccggccgcagggcgcacacggagcacagtgctcccggtgccccgcaccaggcctcgcagcctgggtgcagttacacggcggagggcggggcgcggcagtgcgggctccggcggacacccgcgccttggccggggcacttgggccggtttccggtacacgcggggaaatcgcctcctgccagtgtctgatcgctcgcctccgcctccgcctctgccgcctggattgcattattatttttatccgggttgccgtttgctgcggatggtggtgagcgcggggctggctgggctgcttggggggtggggtggagggaagttggacgtggatcaggcaggaaaaaaaaagtttggcagggcggctaagtagggtggaggggtgggagggggctgcgagctcccgcggctccagcctccgcgccctcccggccggcgcgagtgtgtctgcgcgtgagtgtgagtgtgagtgtgtgttgtgcgcgcaggagccagtgcgtcgggagcagcggctcgggcagctgctcctgcccgcaccctcccctggagcccggggaggacaaggcgaggtttggtggcgagggctggtgggggtggcgtgtgcgtgtggttgtgagtgtgtgtgtgtgcgcgcgcgagcggcggagaatcaggaagtcacagcagcgaagcgcacacagcacacagacatgtttgattgccgtgacatgacgcgcgcgagggaggaagcggcagcggcgggggccgggccgcgggctgtggcgcgggcctagagccgcggctcggagaccggttcccgtccgccggccgcgccgccaccccaagctccgcgaaccccgcgcccctttttgttccgcgtcctccaggtaaggagcctgcgcagccctgccgccggctgtgtgcggagctttccagttctttccctgccagccccctccggtctcccggctcgcctttcctgcaaagtcaggcaggcgggggaaatgggctccttgtcctccgatcgattgcgtggaaaactttccagcgggaggcaccatgagggggaagaaggccttgctggccgctgttgcttgtcagttctttctcctccgggtccggagagtgtgagtcgctgcgcccggggctgttgcacattcaaacttcgggcctaaacgtacctccaactctcgcaggttttactccagcaataaaataaatattcaaagtcgtccactagctcttgctaggcgtttggattttttaagggaatgaggaaggcttgggaatcgagggagtgggggtgttgtgcagaatccattccttattcaatgtctgcaccgggtgttatgtaattttagtggcacatgggtgcaaagcctagactgggcttctcccctcctttgtttatataacttttgggtgagttttgcaaggttgtctcttttttttcctcctccctaacctgatggaggttggtgctttggaaaaagcaaagcgacctgggctagtaatcttttggagaggtgtcatcattgtctcctttctggtcattatgtaggcatgtatgactttgtatgtgtactgttagagctcaaggaagacattaaggatacacagtttgttgactgcactgagcggttatttttaacatttctgcgttaccaatatcgaatttcaaacttccatttcaaaggacttaaaatttacacctggttgtgtgccttgcttgtctgaacagaatgcttgcataaataatgagattgttgcttgggcgttgagtagcagaaaatttctatccaaccaccaaagactcagaaaccattgagaaccctaataataatttaaaaagccatacccaatgttatgtgtgtgtatacttacatattcacattcaaatattttcagtagtattttccatctgttatcaggggggccacaaccagaagcttgttggccagcattggagttttaggcttccaggctacctctagcacactggtgaagtgttaagaggcgtggcagatttgaatcctagttgctgcattgttatgcaaaatgagacacactttttctttgaggaatctaattgctcttttattctcttggactttctttctttttttcctcaaatgcttctttacaatgcaaatgtttg

SEQ ID NO: 51732 - DNA, 786 bp, Homo sapiens
aaatcaagacagagtatactgctgagaaattcttgcctaagaacatagtggtttggccctcggggagtcctggtctgggggagggtggggaccagcaatgcatgtgtatggggaggttgctgtgcccccctctccccagatacatttttgtcattatgtttttagccacagacacatagttgtggaacaggtcgttcttttctgtgacaacgggaaactccctccttctcctaacacaaaataaaaatagattttgtgtgttattatgtgagcagacctaccactgccctgtgaagtccatctgggccctctcctccagcccaccctactatgcttactgctgtcgtcaccaccctatctctattgtctcattagtgctttggagaagaaaggggtagagagtccaggggatactggcagggctggtgagggagaagtggagttggccaatactggactttaaaccttaaccatactaacttagtaatgatgtgctgcttgagactagcacctctttctaatttatttccccaggtttcttcatactgtgggaaagtttaattacatacttgaactgtaaaataaaattgccacccgaaatgtagaggaagaataagaggccaggattataggcctcatcttagagagtcctccccttgggtttacttgggtgatggtagccacagcagatcctagggcagccctgattttgccttggaagtccattaatggactttccaacacacaggtttggatgaagtcttcaagatgctctggaggcagcag

SEQ ID NO: 51733 - DNA, 522 bp, Homo sapiens
tcaggaagaactagagtttagggaaggcatcacatatggctccccattataaaacccaaccctcttggcgtggtattctggcccttcaatgtgtgtccctgccagttgaaatctcaccacccaccatgcctgacaccaactctgctccatccagagtctgcctgaatctcagctttgtcctctttgttccctggctggaatgttgcatttttctctactgacctaatcttatctgttaaaagtcagctcaagtcctacctcctccgtaagtcctcttctgagtattctagcccatagtgaattgcccattcttgactcattgtttggaattctaccttgacactagattttatcttgcattgtgacatctcttatattgctatatagtgcttctagtattgatttaatacacacatgtttctcttctcccaaactaaacttaaagacattcaatggcagaatgcattatctaatattccgtatataccagtgatccccaaactttttggcatcagagactgg

SEQ ID NO: 51734 - DNA, 1091 bp, Homo sapiens
ggacatttgttcctgcccatttctatgcccatatttcctcctttgcaaaataaatagttcagactagaagaggcctcaggtgctatcgagcttagacgatttatgaccttctgagtactgtaagtgttacctgctttggcagtttgcactaagaatcggactttagagatttggcacactctgatgtttgttcagttggtaagtgtgctcagtttttgtggcatgtgtctacaaagcacaaaagccttggtttctctggacttctgaagtgcaagagattgatagcaatcccagcccattcccagggagagacgcagaaacaactctgtgaaaggttactttggtctctatgggaaccactctgtgcccttgacagagaagacagcttggggaagggaggcacatccgagagctctgaagcctgggcagaatgccccatgggcccacaatgccacatacctgtgaatggagagaagggaacaggcagtcccagtgtgcatatttggaatccaaagtcctatttgaccttagatatttggaagtaggtgggacctggaaatgctaacacccagaggccgtgcagtgtagtggaaagagaactggctttggaatcagaggttctggtttgactctcagctctgcccttactagctacgtgacttggagaaggtctcctaaccctgctgagtgtgggttttcttgtctgtccagtgagaagcattaggtctttcctgatgatctcatagggctgatgtttctggttacttttcctgcacacagtgtacaacccccgccccccgtgatgcgtcagtcacagtctaacaacaatattaaggaaggataatgataaagttaatttttgtggagaatataacattgatgatattgctacccactgttgcattcttaatatgtactaggcactctgataaggacttcagaaacattaattcatcacctgagatcacatggttggtaaatcacatggcagaactaaactcagacgctctgactccagagccaaggtcttaacccagtgcgtggttcatccctcctaagccaacaaccagatttcttccagtcctggcttg

SEQ ID NO: 51735 - DNA, 1668 bp, Homo sapiens
gtctggaattcctggcctcaagtgattcccccatcctggcctctcaaagctctgggattacaggcatgagccaccatgcccagccagcacaggtttttaaatttccatttattgtggggaactttttctcatccagatatctaatcagtgagaattttaccagttgctttctagtacacgaacaatgtgttttgtagtccccttgtatgagggaagcaggtcttcagttctaagtcctcacctttcacaggcccaaggttaagtcctttattgtgtatgtgtgttaaagcctaacccatagctgttagatcctatagccatgtctaatatcctctgtactgttctggtatcagctcatgcatttaccacattgactataagattcttccttctctgtggcacatggacatttcctcttttttttttcttttctttctgtttacctgtctgtctctgtttcagctacgtatgcaaaatagttttgttttatccagcagttctgtgtgcctcagcacatagaagaatttcagtatgctaaggaggtggagctagaaagctatgtcagtcaggtttgtagactactgactggtgcaatagaaatacatgacctttggaactgaaacctgagactgagctgtgacttcaccacttaccatctgagtaagctgtgcctagtcattcaacctctccaagctatatttttctcatcaataaaaaatagataatgttagtattgatcttcattacatggttttccttattgctctaaattcacttttatttaaattcaaaccattttctccatcccacttcctagaaaagctagagaagattgcaattttcttatatatcttattcaatattttcccttattaaacaaatatgttatgaaggaataaagcagttattgattgaatgatcttattacctttcctcaatgtacttttcacataccaatggactgagaaaatctctgacagaaaaaagacctaaaataggaaagaaatgataaattccatttcttggtaaatatgcaaggatggggttggggtggagttacatttctgtggagtttcacccctcacagttttcatctctctttctctccctggagagtgcaaatgagtgaaaccttatattagtttagacgttctgcttcgatacatgtttaagagccaataaacctgtcagagtagatttcaggctgagacaaggtgaatggcctcacagtaattctgccagcgcctcagggtaccaggcaacataagcagagaggtcaccaaatgcctgctcaccccatgcccaggcgcagagatattccacataggaatataaggacctttcccaaaacgttgtgtttggcatgtggtaaaattctttgtcaaacagcagagcagtccgataagaaaacaacaacaacaacaacgaagaaaaacagagcaaaaaatgaaggcacatagaaataacaggtcctcttagtgattctggtggtttgtaaactccacgtgaaagttattatttatcatggaaggcaatgtggaggtgtacacacccaaaagctatccacttttaccccacagacagacttacacaaaaacactaggttgtccatggcagtttaatttttttgtttttactttctatagcttgtttctagtaatgaagacc

SEQ ID NO: 51736 - DNA, 714 bp, Homo sapiens
gcaatcacagtacctggcttgaacttcatatcattgaaagaggcactgaagaggataggaaagacagtcttgaactgccaatgccacccctcccacaccccctggcagcagccgtgtagcacaaaaagagaatatgtgtgttggaggagggagagcacagtaatttagggaatttacattggaattcagtgctgccctgttacagtgggaagcaacactgggaagaactcagctgacgtccacagagggaacgtttagaccacccctagctagaaaaaaattgtccatctcaatggtcaaaactcaagttccagcaagcctcaccatcgcaggctaaagtgttctggggtcctaaataacagtgaaatgcagtctaggccacaagaacagcaactcctaggcaaatcctaatgctgtgctgggctcagagccagtggacttgggaagcatgtgactaagtgcaataccatctggggcagccaagaaagtgtctgtgctatctctccctcaaccctgcacagtgcagcttgcagcctctgaaagagactctttccttctgtttgtggggaggagagggaagaataaagaagactttgtcttacagcttggataccagctcagccacaatagaatagggcactgcccagagtcctgaggcacccattccaggccctagctctaagatgacatttctagacatatcctgggccagaa

SEQ ID NO: 51737 - DNA, 1013 bp, Homo sapiens
gaataaaatgtgttagtcacagtttgagtaaatgatctaattgcagggatcccatgagccaggacagattttaagccaggaaagaggcatggcagcaatgagattaaaagctgacctgttgctatctatcttaccatcttatttgcctgagactagaagctcattaggaagaagcaccaacatcttcatcttaaacctctttctatatcccttatggaatttataactgcatgagcttagttaacattgtttaataaaagaggagtccaaaccaggtgtttccaaacctggctcatcatcagtgttacctaaggagtttttaaaactgtgggtgaccaatcctaccctgtgcatgtctgaagggtagagatcagaggacctgcatttttactatgcttcctctgttaattctgatgtagccatttcagcaccatttctcagatttgcatttgataactgcattagatgaatatagccaatggcctcaattaatggtcaccccatatcctccccctttgccctataactgtagtgccatgccactgtgactctgagcttgccccaagtgacttgttttggccaacagaatttcagcaaacttgatgcaaggagagacttggaaaagtgcttgcctgcatgtctccattttctctcttcaacccctgtcactgcaatgagactatccaaggctagccaggtgaaagggtatgagagacacataaaatagggctgagtcatcccagccaaggccacactagaccagccatcccctagcctacttaccagctggctgaagatgcataagtaaacccagttgagatcagtcaagacccatttcagacagcagtatcacccagtgaactgtagacttgggagaaataataaatggctattattttaagctactaaagattggggtggtttgttccaaaacacagcttactgatacaacaaccatgatgcagaccaactggagggatggaacgtctaaactaaaggctggtgtcagagag

SEQ ID NO: 51738 - DNA, 1168 bp, Homo sapiens
gcatacacatatgtatagatgtgcatgtatatatgtgtgtatatatgtatatacatatatacatatatacatatatacatatatacatacatatatacatatatacatatatatacatatatacatatatacatatatatatacatatatatacatatatacatatatacatatatatatacatatatacatatatacatatatatacatatatcctattggttctgtttctctggaaaaccctgactaatacaagtaaatatcaaacatcgtttatattttatcacaatcctggactaaaatacccagaagttctaccctgcttcctaatacttgccttggaatcagagtgttaggtttcccaggtttcctgtgtggttcctctaaggactcctgtgggtagtcagcggagaaccagaactcctagttgcattattgtggtagccaggaggtgacatttctcatattccctttttaagagggacagattttatgagtcaccttgggtggcatagcaattttgcagctgcgtaatgtttgtaagaaactgacagtccctcatgaaccacagtgacccaacttggcagggccccagcacctatttatggcctgagatacaggggaagaggtcacaggaggaggttctctcttctggaattgagccagacagacgataacactctaggtcagagttaacacagtctgattcactgcaacacgttctctgaatgacttcctaggagcctaactgaactactacaaatccagtgttgatatccagtatgtagccacttagaaaaagataaaaaataaaataaaaaagagaaggtcaataataaaaaagaaggctttaagagaaataaacaaaaaataccaagtgtagcccagtgatagtgggaatacagacctggaacaacccccttgctcagttatgtgccctgttcacattactcagaagacctcacactgcagctgccgccaacagtaactagtgcctcgaggacaaattcttgtttttccttgcctagttcaatacctagcacatagcaggagcttaaaaactattcactgagtcaatgagctactaaggacatagagcccttcacatccacgtagctattcagccaggattgtttttcatcctgtcattgagcttcacaagcccagt

SEQ ID NO: 51739 - DNA, 386 bp, Homo sapiens
ccttttcatatttataatgcaatgtcatttctgcccagcttagtgaactgttgcaagcctgtggctttgcactttcccatctgctgagaagagttgcattccaggtacttaccagagatgacctctaactctgtgctgctcaatatttcgcaaaacttcagttgaaaataaatagtataaatggaagattgcctggaggttctttctttccctttatagaattatactttggcaaaatgccaagaatgagggacgttatacaaagaggtctgacacaattcagtcgcagtcactgcagggcattttaggaacctgatcatcagagctcaaaatactttttatgagtaactgtgagaaaactcacttctgttcttaacaccagggac

SEQ ID NO: 51740 - DNA, 3230 bp, Homo sapiens
aagtaccccccaggtgcacgccccgtcagtggggaggcggtggcaacagcaacgatagttgcatcagcgctaactgctgctgctgctgcgtgttctgccggaggctgccgggagggtacagtaatgactgtagggagcgcacagccgctgcggcggcaggttccctggatcaggaaattaggacaggcacccgggattggaggcgagggcggcgcgcgagccaaccagcggtcgccccgggcccccgtgagccccaggcgaacgcgcggagcagccgggcccctagagcggtccgggtggcggcggcggcagccacgaccacgaccgcggtcactcacgcacgctcacactcgcacgctccccgcgcgggcacccggctgcccggcgcgtgcaagaggagcgcgtcgagggaaaggagggccgaagccgccgcgctcccgcccgcccgccgcgcctcccgttgaccacgccccctccggccccctccccgctgctcaccccgctctccggccgccgccggtgcgggtgctccgctaccggctcctctccgttctgtgctctcttctgctctcggctccccaccccctctcccttccctcctctccccttgcctcccctcctctgcagcgcctgcattattttctgcccgcaggctcggcttgcactgctgctgcagcccggggaggtggctgggtgggtggggaggagactgtgcaagttgtaggggagggggtgccctcttcttccccgctcccttcccccgccaactccttcccctccttctccccctttcccctccccgcccccaccttcttcctcctttcggaaggactggtaacttgtcgtgcggagcgaacggcggcggcggcggcggcggcggcaccatccaggcgggcaccatgggcacgtccgcgctctgggcgctctggctgctgctcgcgctgtgctgggcgccccgggagagcggcgccaccggaaccggtgagtgaggacgcgcccctccgccggcgggcgggacccagccggggcaccgggagaccccgaggcgtaggtctccgtttgcccacccgcctcctaggaggcgcctctcggttctcctcgccttccctccctcccctccgtggtggcgcctctgagctgtcagcgccgaggctaaagggagccgggcttggggaacagcggggttcggggtgccccgacgcctcgcctgaactagtcttctgcccctcactccgcctcccccagagccgctgcttcgcctcgtttctcgccctcttgacgggcgccgaggtgcgtgggcttctgagcattgaacaatggttctgcctcctctgccaggcgcagtgttgggaaggaggcagagggccaagacgtgtgcggcagcctcgggcgcaccctcgaaccccggggagtgcgggagcggacggggggagaaggtgagcgcctccggggacgcggagcgccaggggccggccgggcttcagagtcttccggcggccgcgagctggcgcacgttcggtgggcggcggccgggaggctccgcggagccgagggcacccggactgcgactcccccggcgcggggccgcctctccggcgtgcggggtaggggagcggcggggctttacgcaggactctgctctgggcgcttctcctctcccttttccccgcctcgggcggcgtttggaaaccgctcgggtctcccgtgtagctgaacgcggagggggagtggaggggagacttaatcaggttagtttgctgaccctccttcccggtgacgtttcctcgagaggaattgagtcctaggctagtgactgtaattagccttcattctacacaatagctcaaaggagcagcgcgagagcgagcgtgtggccctgtcttgttgggaagggcggcggtgactactgtcgggtccccagactctgccgcgggggcctgggggccccgcctggtcgtcagccacgttcccacttggggcctcgtaactttcctggacaggcgacaggaagcctttctgagaggactcagtcggaatcctagcgcgtccccgaagtgatcttcagatgtgacgccgaggggcttgcttgccagctgcagggaattgggactgaaagccgcccaggcccttaacacccgttccagagtccctggctcccgtcgccgggtggcttcaggggccctgccggcctgcagtcacgtgctcctgaagtgagagcgaactttaaagcatgtggtcaaggagcctgtcgggcagcgcctggggtttttacgtctccgaatgcccctgccctttggttgccactgtccggagcgtgtgaactgggactggcctttccgccctctgcgattggttagcggtgcgatcacgtttaggttggtcacatggttccgcggactcttaagtgggcagcatgggcagtgttattttcaatggaaagtaggagactccacaggctcttacgggctgttctctcaaatgccttcccctgcctggactctttgaagaggacgaatgtgtagtgaacatggaatctgatgtgtaacaagcctgagagcctagaaaagctctgcttacaagagtttccaaacgctagcattaatcattaatagatgagtaatactaacttattaaacgatttctcagtatagtgccatgacttgcattatgccttttgtaacatttcaaaacgctaaggtataccagaaggagggacaattatccaggaaggtgagagaaaagtttcgtttttgctgcatgtcccttccactagaggttaactttaccttatagaatgctaggaatgcacctaaactactgacatgagttagtcaaagccagatgttcaccttgtattgggcaggtgaggatccttttcactttgtcacatgtgaaatatttgacatgccatgaacaatggaaaaacaaattcttcaaaggagaggaagcagattcttccagaactggaggaaatttgggctgaggcagttattgaccctaaaccaatcccaaccggcatctgtcttaagttcaaagtctcagggcatgtgggctgactttctaccctggagcttctacacataccccttctgtccactggcacatggtgctgttccacaatactcctggacaagacaggtgaacactgagactctggcaaggaacttaaggctaacaagaagttggtatacctgattgcacaattcctgggggttctgggacattttcct

SEQ ID NO: 51741 - DNA, 671 bp, Homo sapiens
cattgtgtatgtcataacccatagtctggtgtgcacttctgagacaaaccaacccaaggccactgacagtgcaatgcagcataatagaagatttagaaaacctgattctagtcccagacctgtcaataattaaccatgaccctgaataattaactgtgaaaccttaatccctcacttccagtcctgctttctcacctctaaaaggggaggctggacatgtaaaagtctgcagttcagtgagtcttccttcccttgaaagcagggagctcatatgtatagaggatatgtgagctttcttcagtggcaggatgatacgatgttcttctgaatgagctaggcaaattctgcttctctgatcatattccaagtgatgaaaggtcatccctatagtagataaaccatgtgtacagatgaggctcatggttgatgatttgtccccagcaaatgacatttactttggggtgactaaagcaggaaagcagaagagtaaatccacatgctgatgatatgatacaacacttgagagtcaaatttctattcatctaaacatctttaaaggctagtgcatgaaggcactggagctagtacactctctgatactacagtttgaacccacaaaagttttttcgaccttttgtatattaacaaatactttgataaaagttatgtta

SEQ ID NO: 51742 - DNA, 1037 bp, Homo sapiens
caataaatgttggtctttgcctcttctcagtggaggccagcttcagcatgggggaccctgggattgcatacatgatatatatataataatattattgcttacacaccctgtgccaggcactccttcaattcctataacaactctgtgaggtagataccacacatttcaaaagtagaaactgaggccaagagaatttaggtgatctgcccaacttattcagctgggaagtggattcagacccacaagtctactgtagtccgtttccttcagcttatctacaccacattacctctcttggatgcctgcttgtattttgactctgcagaaaaaggctgcatgacctctcacaagagacagggcagtgagtgacaggaggtgcatcatcagcctcaaaaaggaggcatacccttccttttttcgtgggctggatggagctgtggttctcatcagtgccctcagttttgtgcagctggctcacttctccatttcattctaatcagtcaactgcactattccaggttcaaactaacccttacatcatcaaaacaaaaatatttacactgctaagctaacggccacctcagcacggatcaacaagatgaccatatgctttactgccgtctgctggaaaattatggcaacaactacccaaatacacaaagcaaagagtgcccccctggagtagtgcaacgcaaaaatgtttacaactgtgaccaacagctctgcttaaaaggcttctagtaatttagccaatactctggggatcagagggagtacatgaggcataaaaaacagtccccaaggaattttcacagggttttctctggtaactgataactagtcccatggtatctgcattttaaaacagaagcttgttaacctaaataagtctccaattagtgggatttaaatcagtatgacaagagtaatgggaagtatttcatgcaggggtgaacatatttttggtgagtgatgtcttacaaaagtccctttacaaaataatgagagtgtttctccagacatctgcaattaaagca

SEQ ID NO: 51743 - DNA, 519 bp, Homo sapiens
aacactgaattatatcagttaggatatttaagccacgtggaaaggagcagacaccagaataacacagaagccttggtgggctaaaaaaaaaaaagaggaaaatggctgttgagtaattgctaagggtgccttcaagagaagaatttaagcaattctgacgtaaagtttaggaaaaatcaacagagatgtagaaactaagcaaatgaaaataaatgactaattccagaaaaattaaaatagtagaggaaatgtaatggctgctcactacttgaatcaatatttaacaacatttatgtaggtataataaggtaaaccctgaacactgatttcatcatacatgatgcaattctactgggaagggagggaagaggagtggggaacagtgatggtaaaagttcttaatctgcatttcctgtaataggaaatcaaaagaaaatacctgcaactgatagatgtatttagacatttagcagagcgaagaataatcagtagttctggggagggtgaggcaggggtgca

SEQ ID NO: 51744 - DNA, 2242 bp, Homo sapiens
tcatggaagtgccacgcatttactttgtcctcttgggatgctcactcttaaaaaagcaaccaccatctcgtgaaggagcccaagcagcctagaaagggaaactgaggctgttggtccccagccaacagtcagtactcacttgccagccatgtgagtgagctaagcgaaaagtggacactccaaccacaaaccgagcagccctagatgactctgactctgagcatagaggggcaggctccaccagaccctgatcaagtcattgttttgaaaactactaagttttaaggtggctactatccagtaaaagagaatcaaaacagctagacgtgcaggaggacaaactcatttggtgctgaatacgacaagacaaacacatcagacccaaactggcagattttagggttctcagcacattttaattaagagggagaaaaaccactggacattaagccagactacttttctggcataaactcaactatacatcaactttttaataatgaaaaagattattccatatgttatttttttctttaatatttatcacaaggcttctcttttacaaaaaaatttagtgaaaaatagccccaggtccccattcttaaaggtaaggtgagaagtgacagctctactgctatactgattgccacactagccatcagagctgccacttgccgcaagacatgaattcatgatctgtcacttttttccagacattgtaatgaaaagcccaaactgttttaactcagtaggggaaaaaaatctctccagtggtttaaataccagatggaatttggattttgtaagtgaaggtctggttggagataggactgagaggggaatggcatgcaaatgctaatgctgtccttctctagagagctgagtttctacagagcagctgtaaggcttacaaaaaaccagaaagcgccaaagactggcttactctttggtcacatgtatttcaatgccaaataaacaggcactagtccaaaactctcttacgaggataatcttcttctgcttattctttcttcaaacatagagataaatgtcatgcctttctactgaggtaatgatactcaacaattggggccccctaccccctctcaccatcctcattagaatggcattttaaggcattgaccaagccaggttagaagcctgcagcagcacaggaaggaaaacagagagagtgagggggcggtggggggggctggcggggggggtttggaaaaaagaaaattaaaagagttctcaggcacaaatatttctaggggaaaaagcattaccagcaaccactgaatcatttcttattcacagacaccatttctagacacttggcaaacttcatttgagcttaaatggctggtataaagttcagggatgccaggaattactggaattccacatgagatacaagaaaaggtcaaatttcatagcctaccttctctcccattttctttcatctttttatcttgctctattaaccacttcagaactagatgtcctgcaggatgttctgcaatgtgaagctatgaagggtcaagaacagttaattttaaaagttgttttcattcatacaaatacatttgaatgaatacatactatttatgccaccacatacagataaggactcagccacttttaaagttccacaggcttaagaggtctttatctaggacaaccatcatacttggggggaccacagatctattctgatccccagactgaaagacagttatgccagataacacagccacggcacagcgcttcagtctccgcttcatttaatctgctctgaacagtagcagcacaaggctcatcttaatgctaatcacgtcttggattgaaatatgtcattctcagacacaaataaacctacaggacagaacactatagcacaaacatcaaaacccaatgctgcatgctgtttaagtacacatgaccaccgaaggggattatctgatgagcgaatcaagaaagcatcttttcagctcaaccttactcctcttcaagagcaataccaagcgttcccagttatttgggctactccttagcaagtatgggaggcaaccggctcagtctccttatagagaaactttcaaggtacattcatctttcccatttgttaatatggtcaggagccagggcttctctaagatccatggcccacttctcttccccaatcgcaggtgtcagaagcaccttgggcactcaatacttggcaatgatttcattcata

SEQ ID NO: 51745 - DNA, 2481 bp, Homo sapiens
ctctatgttgttctttatgttattgttgtttgccccacaaacaacaatatactatttttccctgccctatcgtcctccatctcagccaatggcacatcatctactttactgctcaagtaagaaatctgagttacccttgacattttcctctctactctgccacgctgaaccataagttagttctcttaaatgtcccttacgtcaccaccctaatgcaaactattaccaatacaatctcttgagcttccaaatgtaatacattttctaaagagaaccagggcctattcatgattctcacttgcttacaagtcttcaatgttttctacacatggtaataggaacggaaatgttttcctattgtacagaaaaaaaaattccccatcatgaccttcaaggccctacagaacctagttccactctatccggctaactttatcttgtactctaactatactccttcctagctcccatctcaggaacttagcccattatcgcctctgcttgaagtactccctgagcttccaaatctccgtttaaagatcacttcttcagactccactatctgccaactcagcatccagttcgtttcctcccagcacttagaatctgcgtacattcaggcaaaccgcctagcactggagttggggtttgtgaagtagcacagacaggctgatcaggccgagcacgggctgggattccggagtgaagctagtccactctaacccggcacgcagggcaacgtggtgggagagaggtcggagtcccgcccttctttttttttttttttttttttttgagacggagtcttgctctgtctcccaggctggagtgtagtggcacgatcttggctcactgcaagctccgcctcccgggttcacgccattctcctgcctcagcctcccaagtagctgggaccacaggcgcccgccaccatgcccggctaattttttgtagttttagtagagacggggtttcaccgtgttagccaggatggtctcgatctcctgaccttgtgatccgcccgcctcggcctcccaaagtgctgggattacaggcgtgagccaccgcgcccggccagtcccgcccttcttgccaggctccagtcagtcccaaactcctagcccagaaagaggccagaggagactgcccagtggacaacagccccgagagaccttcccgacttccagcgcccggcagggtgcgaacccctcccaagagcgaccgctgagcctgccacactcaccgcacacgtgggaccgagacagctcgcgcagcggatcccgaccgcctctccgcttccgcttccttgccttgctccgcccccgggccgctttttttcatcttccgcggcggatcagggactaagaggtggagcttcccagagaatacaaaaattcggaatttctattggtccgctgctgttatgcctcctcttgaggcgcgaggattttggcccttgcaagaatccgtcgggcggaggacgcgacaacggccacgggaaatgacgtcattaaccctgtggcttccgtgctggaaagagagggagagctcttgcgaggcagaacaggctgctgaaggacagacctggctggcgcggttaataagaggcctgcatcccgtagcctgaacaaatattgaagtagctaaagtttctaaagtgtgttaatttgcatacttcctcagcagtccagcgtggaggataaaaggggtatcttgtgagtcgatttgaattgtaatcccgtttttttcacttgctagctgtgtggctctgggaaaattacagtttttatgagctttggcttcctgatcaataaaatagaaataattaagtgatacgtgcaaagcgcttagcatggaacgctctcaataaatgtttgccatttttagtgtctgctcgtgcctggaaactgctgttattccattttatacttcaggaaataagattgtggttaggatatatgccccattttccagatgaagaaactgacaccacaaacttgctcgtgtcaagcaacagaattttattctttaactgttctagaggcaagaattccaaaatcaagctgttggcagagccctgcaccttttgaaggctctaggggagaatgctttgcttcttcagcttctaacggttccaggcggtccgtggcctcttgttgcatgactccaatctcggcctgtcttctaatggccttctcctgtgcctgtgccacttctctgtgtgtttttaggacactgaacattgaatttagagtccacggggataatccaagatcatctcatctggaggtccttaatcacatctgcaaaggcccttttcccaaataaggtcactttcacatgtcctgggagttaggacatagacatatcttttggagactattcaacccactgcatctgtaaagttgaggaactggcacttgatccctggtgccagacttcagattttactgtcttccaacttactccgttttctggcca

SEQ ID NO: 51746 - DNA, 1489 bp, Homo sapiens
ccagtgagaagttaagaagttaagaccctcaagaaccttttctttaccctagtttttagtttagagtttgttatttgttttgttgttgttattgttgctgtttaggcagtgaggctctgcctttgttataatagtaaaggtggattggaaagccatagctatgctctcttctacccaaagtaaagtcagtcaggtccaggaagagaactgtgaccacagagccagtctatcaggatgtatacacccagacacaggatgggaaatgagaataagagaattccagcccatccctagccctggcccaagtgcacatatagagcagcaacattttttatatttgttggtatgttcccagagttcagcacggggaaaacacactatatttaataattattcaataacaaacaatgcccagagaatattataaaattggtagaatcttctaaatggggatgtgtatttttttaaataatgaaaaaaatgtttattttttcaaagtgaactgatatgatcacttttaataccattagtgtatcattaaaaaccaaaggtgaaattttaaagtaaagttgcatgctattttctcgttctaaaatgatcaaatgtgattcaaattgttcaaatattagttgctactatgttaaacattaatttttgttcaaatatttactaagttatctattacaagcttattttctattttagttgccattatcttagtgcaggaactattcaggttagcatttctaaaagagatggggaaaccagcatcttgtagtcatttcattaccatccccaataattttattttctacccatctttgtgaagtctttaaactgacacatttactatttgtactatctaagcacttagagaagagataattaaataaactctctatgaaattaatcatctcaatttcattgcctttcccaaaataaattcccagaaatatttccaaagagaataaacaaatatttttcactactttaaaattaaaaaaaaacagtgaaatgggcaaaatgtgaactgaaaagagaagaacaaaggtggaattagcaggaataatctgcaatttcactaattaagtgttcaatgaattaaaatgacctgaccatatcaggtttaaaatgaccttgagttaatttttaaatggttacctagtacacatcagtatgttggcagcaatgaagtctgactgtaataacattctgtaccagaatttattctgtcaactgaagggaaaaaaaattatcccccaaatataaatatatgcatgatgtatttacattcataaacactagatgaattaaaaaacttaacactctcttactgatgcatatttaaatatatggaagcacctcatattactattcaaatattctattacaaatacatttgctaattttgtgtactttttttgtaatttgtattattttttaaaaaagtgaataccaaaacaaattatataccacaggaaaacgtgct

SEQ ID NO: 51747 - DNA, 1184 bp, Homo sapiens
cccaatttaaggcttgcaagtatttagcactttctattcatttgaattacactttcaatatttgtattttccattctaatttatgagtcagtatatatgttgatatatcagaaatatagttcaatctaaaagtatattatttagatctctccccctaaaaacattaacagaaagtaaaatgaatgtaatgcattatattctgactctctcaattcatctgaaacagcggcattaaattttaaaaaatgataaagaataaaaaagaggaacttctaggcaaaaaatgcaagagctaactaatatttcatcatactttcgtttattacatctccctttttgttgaaggtgaggctaaatccaaagggaacagttttacaagaaggtttatctgtggggatttacaccttgttaaaagcaaatgacaagcggttttcccccacaggaaacatactcctgttttatataaatgtatcctttcatatttgttaccacaaatgaggctgcagagagcatcaggttacattgggaagttcaattgccatattcttggtttctcttaaattgactgtttcaaataattaacagggttagggctcaaactgctcatctttagcacaataccgaaactaattcaagtctgagctcactgatttacttctaattgtaaaacacagacacacacacacacacacacagaaagagagacacagagaggagagagagagaaataattagacaaaatcttggtaattacaattcctgccacagtcccatactattaaaaagtaaacaacataaccttccaaaaactcagattaagaaaataaaaaatcagataatagcatagttgccagtattgcgtctggttgctatggaataaagggcagtccgttcatatattcattctgttcattcactgctacttaagagcgctgctacacttttaaagcccagctgggcaagtctcagcttgtaccacctatatcagctgccagtattttacttttgttccacaaaagagtgacctacaagaacaaagatttccatttttaaaattcataattaaatgaatgtttacaaaaattcttaaaacaattaaaagcacctttaccctcatcaaaaaagtaaagacgtgcataccaggactgaaaattatttacactaatacattgattatgacatac

SEQ ID NO: 51748 - DNA, 3014 bp, Homo sapiens
agctgatgatggtgaaagaagagcagcccattcagcaccaggcaaagaggggcaaaaatgaagggaatgggcggtgggaaaagttcaccaacgtatgaggattaaaaataacaaaacccataacaaggccccacaagtgaacaacaacaacaacaaaacaccacctcttgggtcccccccttgcacactgttgtctatttcggctttgaaagaagcaggaaacagcagcgttggaaaagaagaaaattaaagaaagaacaaattcttatctcttcacctgaccctcctcctcagaccagacctaagggaaagatccagcatccgcatcggaaaactgtggctccctctcccgctcggctcgcagccccccaagctcccgctccatccctgaagtgcggccggcgcagggccggggccggcgggcggcgcggcgcccacacccccgacccagccgcggcgcgcagggtccattgtaaacaagcccggggaacagagcccctcggcggcggcgccgcagcggcagcccccgtgtcaggagtgagaccccagcacagccacactcggctcgcacacacgaacacacacacgcacggacacacgcgttcacacgcagccacacgctcccacacacatgtagagaccgaagaatattcaccttggctgtggattattgtggtgttgttggtgggtgatggagatggtggtggtggggaggaggaggaggaagaggaggaggaggaggagaggagtagttgttgttgatgggtaacagtcgccaggactacggtgactatggcgcttgattcacaaggcaacggttgctataactcacaaaagagagagagagagggagagagagagagagcgagagggagagggagacactcgcacggggaggggtgggggagggaagaggggaggaggcgggcccggccaagccgccggaaggggagggcgcagcgctgtgactgacggcccccaaacccgggtggggtggcggggcggcggggtgacggggcacgaggccgggattccaccgcaggactccgaagaggtgcgcctatgcttggctggggctgaggtcaccaagagtcctctcggagggacgttactacacgcgctggcgaggcccaggagtcgtggtgcgaggggtactatctgtgaaacgagggctgcctgtcccagcagccagctttgtacagagacgtcccggagccacgagagagtaacggctaacccgggggagggggtggcgagggtgattccaggcactttgtgaagaaacgagctatggcgagggaagaatccactttgaagagcggcccccgccctgcccgatacgttacttccggggcggggcgggcagaggggcccggatgtgccgccgctttttagtttctgaggcgccggcggtgttcctggtagcgtcagcctcctggcttttccttttcctggacgcttcagggctccgcggcctgcgctagactggagggtccgcgtcactctcgccctcctgctttccgcgctctcacccgctcccgcctcctgagggcacgacttgtggaggagcgcgggcggcggggcgtgagcgagctgcctctgccgccatcttagagaaggcgagcgtggggtgtgcgtgggcgcgagtcggcctcccgcggtgccgccgcagcgtggcgcggagaggtgaggtccaagcgtgtccggccctcactccataacgaaaaagcgaggtcatcactccctatctacaagggatgggagtaagtgcctgtagagagcaagaaattgccctgcccggaggctgagaaagcgcatttggcggttcccctcgacggaaggcgtagaggggcggggtagcttacacctgcctgcgataccatcctgttagtttctagttctgttagtttcagcccttaagtgctcacccctctttaaagaccgaactgggagttgagctcaagcccggatcctgttacctgccgtgctctcatcccccgttactcagcctactgtagctgagggtcttgctgtttgtggctgtattgagatagacgaatggcttccgtctgtgttgaatgttgttaacacaacctgccatctcaaacacccgttgataaggcacagcctgtaatgcctcatggttcaaacagactcctccaattctctgcagactcgagtccagcaggcacatgcccccaggccctgccaatacccaaaatctcccaacatttgccgctaagctgcttaaccaggacaatgacatagtagaagtagagccttaggaagtcagttctcctcttgaggcttaatttttgcacctgcaagtaagggatttgggccggcatgcgttcaccagcgctaaaataatactgagctcattctgtgtcccagaactggtgctaagtgttttacatacattatctcatgtaatcccaacaacaccagtgttaggtaatattcgcatttgaggaaaaacaggccgagagtcctaaaagtcggtggttttagtttatggctgcgtgccatagaatacaaggttaccttgttttaggaaccagctactttgggtacgtttttaaaagtaatattgttgcctttgataatctcatgagttagagatgttcttacaataataatgtgttgcagtagtgaacagtggtgagcctagtgctaaagctaaaaggtttcctgacccactgtggtagtaagggcttctagtcagacaaatgattgtgtggtgaccagtgtgggtcccatttgacatacagatgggaaatgaggtatacgttccagctttatgaaaactggtagtcgttatgaatattctctttattatatttactgataaagtcctcattcctataatggtgtgtagggctgtatgttcacactacatggctctctgaatagctttgtttttttaaattccattgtctgttatagtttgcctgtcccgtctttcattgtcagctgttgctttttatttttgtcagtgaacatagttctattat

SEQ ID NO: 51749 - DNA, 3919 bp, Homo sapiens
cctgaggtcaggagttcaagaccagcctggccaacatggtgaaacctcatctctactgaaaatacaaaaattagccaggcatggtggtgtgcacctgtaatctcagttgcagaagaattgcttgaaccgaggaggcggaggttgcagtgagccgagatggagccactgcactctagcctgggcaacagagcaagactccatctaaaacaaagaaagaggaaatttgaacacagagacacacacagagggaagatgacgtgaaattacagggagaacactgtgtaaatatgaagatggccatctataagctaaagagagaagagcctggggagcagatcctcttctcacagccctcagaaggatcccaccctgctgacttccaatctccagaactgtgagacaataaatttctgttacttaaggcacccagtttgtggtactttgttatggcagccctagcaaactaattcatctgccacattttctatgtatttctcctacagcatttgccaccatctggaattgtctggtttatttattacttgtctcttactatacctatccattagaatgcagtctccatgcaggcaggggtcttctcttgctttgttcatcattctttgacactcaggatgatcctggcacatagtgggtccacagtatgttgaataaattaatgaaaagattgtgttttggtggaccgataattggtaattatttatttttcatgtactcatatgaacctacacttagtcacagggcctaccaaccctgggcagatgagagaaaactagcacgtggtgaatcaacagaattcaccagtagtgaggtcagcactacccactggtgccttacaaaaattttgctctttgcccaagtttttcatatgaacatagtttgaaagatccagttgtttctttcaatgtcctgatgtttcgccaaaccaaattcaattgattgaaatatagcctgctgatgcttttgtaaggctaaagaagtggatggcaaccttccacccctttgctgaatggtgtaattggcctgccataaagaattggggaattttaacacattccccatttggctgagctcaccaattattccccggttgctatcagagccacagacttttcttctttggggtcattaagcttgtcaaaactaatttgtcaccacaactgctgaacctcattgctctgacagcagcacaaggatcaccctaaataggcccttgcattataagaaagtaaatggctcatgagaacccgctgtgctcttgctgttgccttagaatggtcttctgaccccagaagatgtggaaacagtatcccataagtaacacaggtcacaaaaccttgtactaatcattttggtgttattaaaaataaacaaacaagtagaatgaataaatgcttggaatacaggcttgaatctgatatgtgaccaaaatatactattctccagctttgacaaaattcaaatatattacatgttctctccatgcaaccatctcatggaagtcaggtggaattaaacatgtcataaatcatgggtctctagtaagccagtcagaataacattcgttgaaagtttcttgattgtaaatgcaaaactattccaaaatcaaggttgccaacattcaataggaagaaggaaacttgctgtgaggaaatagcatcccgttttgaaacagtactttgtgggctctcccatattgagaatagttacacaccatttgctagagttggcaggtttagtgagtctacacacaagtctctgcacaattagacaaaggtaagaacatatctattaatttcaaaaagttgaggggatcttcgctgactaccaatcaagcatcatgagaagttgcattaactcttttcaggctaaagggtaccacttaatacaaaaaccaatgaaaccttcaagaaaattagttatgatcacaaagtatcttgacataaacatggaatatgaaagtagcattactggcccggcatggtggctcacacctgtgatcctagcactttgggaggccgaggcaggcggattgcttggggtcaggagtttgaaaacaccctgggcaaaatagtgagatcctgtctctacaaaaaataataataataaaatttaaaaaattagtcaagtgtggtggtgcacacctgtagtcctagctacctgggaggctgaggtaggaggatggcttgagcccaggagtttggggctgccgtgagccatgctggtgtcactgcacttcatcttggggaacagagtgaggccttgtttcaaaaaaaaaggagaagaaagaagaaaatagcagtatcaaagaacttttgttcttttcttcctaaaaagatgcaaccctaaatagaactgagtttagaataattggctgcaactaagttttcttggtggtagtatagattagacacaatgacactttctttaaataataaagagaggctagaaatacctggtgcccacactcatgcctcactagtttcttccccagcaatcttaattttctctttttaaagggggtaccagttccctaatgaaaattaacactgtaagtgtacatctggcaaaaggattaaatctcttgacaaaaagccaagtcgttggttgtttacttatatttattcaaacaaatctgtaggctcatagtttgtcactgatgtcatgcctttgagcagttttttgtttgctttttgtttgagaagagattacaggatgggttgaggagagtaaatagggagaaacaagagaaaggggggaatgtgaagtccagaatttcatgggagtcacagattcagctgagtgctaatgatgtcatttggtcttcactctagcaaaagggatcccccaccccgaaaccctgcactttcaggaggagtaagctaaaaacttggcaaatggcatagtaacgaagtcctgaattggcagccaagatctggatgtgaattttaagttgttttctccccaaatgtccaacaagatctgctgtgatttaagggggggggggggagagagatttattgaggtataaaaagccacatttcagagttgccagtgctaatcaataactggaatttgacaaaagaccatgttaggctcaaaaacgaaaaggacacacatataaaggcaagtataattacatggtataaataagggagaggttgccaaagactgcatgttgccaagtgcctcaaatattcatgttctttgaaagacttatttttgtgtctacggaggatgaataaacctcacttaaaaaataagactcttcccaaacctttgctcatttctggaactgaacccttttgcaggttctgaaatgtttaactttgtttttcattaattcgacatgttcacacatcccctgcacttctggagctctgaacaaaactggcagtgagagtatgctggaatattgaagtgacgactgctcccccagtatcactggccctgctggagatgtgccgcttgttctcataagacattagggcaaactctgcatccttccgaagtctgagttatcacaggaaactgaaaacttttggtgcttggccaagtggcttcccatctcccaactgttagtgactcagccagagtaaaagtcagctctgtgcacggggaccatcctctaatgcagagaccaaataagaggaaaattaagtgctgaatgatagaagtttcctctttgactctcaaagcagggaggtcatttaaaagttaacttctgctttgttcttcagctttagaaatgcaggtaaagcacagattgggttcattgccaatccagattgataatcttatcgtgaggctgaagtggcgtcaggcctcaccgagacaccaaggatgatggttcctggtacagaaactgtaaataagcccttcggagacagtgctggcaagg

SEQ ID NO: 51750 - DNA, 487 bp, Homo sapiens
atctctaccatgaccaattctgataaggtcaaacacttttatccctcaggaggtatcatacaacattttctttagtttcgtttgaggtgtatgaagattttccacttgtgaataaaatcctcagcaaatccttatagggtgtttttcttgtgtgacatggagccaaccagctaaggctctcagtaaggccggctgccagggtaaatcatatctttcctggctttacacgtgagccagatgttggggattttctgagctacaggatggtggggaaaaaggtttttgcatttcctgtgttctcactccagctctcaagctttcaagattcatggccagtcaacagtgtcatgaactggcctgaaaatattccagattaaaacccactgacaacatacctgactctgccattgcctcatactgtttgtcagatcaggatctctttgtactgctgcttcccctgacagttccgagggcagtcagagaggca

SEQ ID NO: 51751 - DNA, 1068 bp, Homo sapiens
ctctgcctccttccaacatctcattaaaatgacccaaagaatataaaaaaaaaaaaaaagaaacaggcgaaacttaaatcctttaatgaattttaagaaaaaaaaatcacatgtcaagccatttctatttaatgcctatttcaatttcaagacatttctatttaataaaagagcaaacagcacttgtttgtaggtaaggctaaccctatctgtaacaccctggcacagaagcgaaagagactccagcagatcattaacactcattgctgtggggcagatgggagcctatctgacctcactagggtttccagaagcatccaggcagggaggcaccgtgggtgggaaatcctctggagtgcatattcctgtcttatctttgatgctgataggtacgccttctgcagaacacatgcatttttccagccacctcctggttgtgaaacaagagtataaaagcaacttaccagcccagaggagaagctccctgccactgctgctgcaaccccacttctctccctactactctaggctgctggatttctgaccaggtaatgtaaaactgtactaaaactcctcctgctttcatctgagccttacagaacccatctgcatcagttgtcaaattattgactgtcaatttcaattccacccttctttgtcctgctctgccgtactacagctggaccctgtaacatttctcctttgccagctggagaaatattaggctttgccaataaaggaagctagagagacactgcaaggtgaagtggaaggagtaattctcatccttgttctagcgtgcttgtctgcttgctttcattgcactgctgcagcagcatgtgggacgcccagtggcacttacggtgcaacaagtttctccagtaccccagcgggcatctttccgtggatcagccccggctcactgacacccaggcagggagcttcttgttcaacagctctggcccaccagcaactcacaaacctgtccaccacacagtgacatgcagccagaccctccccaatgggatctaattctcaattttgtttggacaggaagttatccttctt

SEQ ID NO: 51752 - DNA, 963 bp, Homo sapiens
agactcaaaataaggagcttagaaaatggagaagtgttactataaaagggctggtagtaagcatgaatttaaatgttctaattaaaatttaatgtcatttgcaagactgtaaaaacttaaggcaaattttaaaaaccgtttttatttaaaatgcaaaatgtaataaaaacaataatttttaaatcataataatcaaatcctaaaacttcagcgcaagaaagttatagaaaaggtgccacatttcttatcttacagagaatcagtagtattttattcatgattttgaaaactagagaaaaataagtaaaatatttaattagaaaattaatctgaatgaaaaaacaagatttataacttccaagttgcaaaaggcaaaaagggcaaagaaatattttatgtaggcaaagaaaaaaggctaatgatgttttttaaaatgtgtttgagcagtgaatttatatcctttatagctattttctattttgtttacaatgaccaagtataacctgtataatcagaaaccaaaaataaatattagagaaaatcctggggctcaaagagcaagaatttcacaagagacattcccatttgtcatcacctgcaaagtcagtcagtcaacatgtacatacaaatggcctcagaagaccaagtaaggagacagagcctagtcacacagtgaaaacctcgaaaaagagcactgtcaagggattttttttctttcttgactacaggtttttgttattttttgtgcatgcatgcatgcatgtatgcatgtgtgtgtgtgtgtgtgtgtgtttaatatgtctattcaatttcttgcaatgcacacttgggcaataaatcctggtctgtccactgattaaagggtatcagaaaaataagggatttaaaaaaatcaaccgtaatgtaacccccttgccctacccatggagaactaaggcccagaaaagtaagtggcttgttcat

SEQ ID NO: 51753 - DNA, 1009 bp, Homo sapiens
atattaaaaatcatattttataatatccttacctaaagggttaaggtggtaagtagatgggattgcctgtatcaaaccaagttttttcctagaatagctaatatcttgaatcacccagcaaggaaagttgacactactggaaaaaacctgtttaactggtttacttcattccaaatctgtacttccaaaaagtcccttcacaaggatgtagtctggctgtgtctctctactcttgattttttttctcctcatctcaacacattgtcattggacatctactcaattttttaaaatatcaggatgagagagttgtaaacaaaatgctcatttgaaaaacagcatggtaaccaaattggacatagatttttcattttcattagtaacaatctttcagtgtagtaaaagctggtacatacccaaaggggaaagaaaaaaaggaacccacaagaatctgtgtcgttatggaaaagtgaaaagcaaagagtttgagaaaggcaaacactgccatgactcatttataaaaaaatcataatgagctgaatcattctagacattctttttacatggatgcactttttcaaactttttttgtcaactacctggtcaagtctcagtaactatacactctgttcccatttctagcaaacaaaaatatatacgatctcaatctttaacaaattaagctttacattgcaaatttcccatctttttcattgatatatttgggatcgaagtaggaagaaaagtgtcactgtcacttttcttagctgtaggggtcataatttcctattttgttttccccaaaattaaatcaatagcccaaaagtgcctttgtcatcttttgtaacattcttcccaagagccccccaaaacaatagaacaaacaagacattggagcagtcactgtttccatcagtgcagccctatctcaaaaatgctgggggagtcacagcatcattagctgccaggaatcctggtctagtgcagacttatgggacactaaaatcca

SEQ ID NO: 51754 - DNA, 481 bp, Homo sapiens
aacagcatccaaggaatactacttgatggcaaaacataccaatagattatttcataaaactaaaatggcacatattgtaaggtgtaccattattttacgtaccagtaagaacatgaactgccagtccaactagtgcatgatgtccagatttcagagatgttgtaatgtaaaaacatgcacaccttagagccaatacaaactaatgtgatcactgaaacatttattttaacccttatcttgttcatgctcttctctttgcctggaatgcccttaccctaacttatccacctagtgagcacctctgcatctttaaggtctcaatgcaagggtcacctcctatatgacctcctcctccactacctgttaggcagatctgaccactgcttctttcatttgtccacatctcccatcacacatgtgcctcagcacctatagtgcttcagggaactaaactctttacatgcctgccatcttctcactt

SEQ ID NO: 51755 - DNA, 3113 bp, Homo sapiens
tgcaaaacctatggaaggtaaggaatgctggatataacatcctacctccatggcgctcacaacctctgaagagataagatatactcacctaggaacaatcggataatgtcgctagactgtacagtattaagcatgaagctaaatcatagagacaggagctcagaggaggagggcaatccctttgtactaggtaattcatcaaagaagaagagtatgaactacaaacacgtttcccaaagtccttcaggatgtccaaagatgttaaatgacaatgaagttggcctcatggagatgtccacagtccagtaagcttgggaacccctaatacaacaaagttaaacatatctctttactgtaagtcttcaggagcctttaaaaatgtaaatgcatgtgataaatctcccagaagaccaaataatatttaaagtacatttgtttagggaggtttttcccaagggactcatctaagactggcattctaaggaataccctttagaaaagaataagctaaaacatgaaggaagaatgagcacacaaatgagaaggaagtagtagggtgtagacacagaaacgaaagggaggaggcacaatgcgtcctggagaaacaaagatgagctagggctgcctacaagaggagaaagggagaagacagagcttagagggttggttcaatcagccctgaagaactgatttaaaagctggacattacttatccaacagtggttcaaacctggctacatattggcatcaccagtgaagcttctcaaatgcaaattcctaagctccactgcaaaccaactaaaccaaatgatgctgatataactagtcacctgatgtgcatctgggaccttgtgctataggtagtggcgcatcccattaggagcagagttcacccaagattaatctggaagagatggggagaaaggctggaggagcacatgaaccagctgtacagacggcatagcagccacagggtggtaaatgacaaaataagaaagcaatggttatgaagcaagttagagtaaggattttataattagttgctaaagatttaggcgatcacatttaaatgggagaggggggccatataatgtctatttggtgacttcattacaaagacagccaataaataggtcaaatctgaacccagggagattcgcatgaatcatgcaatctcctaccaccttgtcttcaggagttcagcttgaatcttccatgtttatcccacaaagaacataactttcataccaacattcttccaaccttagtcagcattcaggaatgctgtccaccaagtatggaatcaccagcattactcactgcaatttatccctgtattaaatggaatcacatttatacccaagagattaaaatgtatcatattcctttctgtaccactcagtgccctggattcctgtgcatggagcctcaatcttgctccccaccactgggcactcccagtaagatgatattattaggaacctacatctctgagccacttcataaggatgcaaagataaattaagcaatattcctggagtttgtattctaaagtcccatccgtcagctattgtatatcaattatcaactaattagtagagagtgctcatgctgacccctctgttctctcttgtaatgatttgccaagttaactgaaagctgctctgctccatagagactcttagtatagcaagagtgttaaataaagttcaccaacaattagcctggaaaaccaaagaggaaatgtaagcacattttactgcttctccctcgacaaattttctagcaatcccaggggaagtaagcagatacatttgttaactaagcaaacaagtactctgaaaaactgaaacaccagcagaggcacaacttagtaatttattgctcacagatcaggtatttgtttattgtgtccctgctctgtgctacactatatactctagggattgtggacacacagatgagtcaaatcattcttgcctaccatctaatttaataggcttagatcaagcctcatctggtggacacatctgtgaaaatatataaaagtggaattattatacttactgtggaaaaagaggacttccacaaatataagaaagaatgaatggaagggagggagaacgcatattgtcatgggagaaaactgcctcagtttcccaaagacacatttactgggtgttaggcttggtcctaggccgtacagctagcccttggtcaaagatcttacaaccaattggagagagtgttaactaacacaggaaacaattggcaaacacctaatcttaaattgagttgcttcactgctgagtacaaaaagagctcaaatgaggaaaagatctgaatacactggaggaggcttagtagaggagtgagacttcatctgagccttttaatggcaggaggagagggggcaatatgaagagttggatggccaaaatgaagtgaggtgcatgtgctgaggaagtattatggaggcagcatgggggaagccgtaaagaatgagacactagggccagaatagcttcccttaccagctgtgtgaccttgggcaaatgccttaagctctctgtgcctctatttccttgtctgggaaatggggatgataattgttcccaccttcataaggctgtttggagtatgaaataagtcacgtatgtagaccacttacaacagtttccagcacacagtaagtactctataagctgtaggcattcatattcttactaagatgttatcagattgcacacaacctccaaaaccaggcaccccaaagagctacagtagacttgcaagcatgggtatgttgtaaggagggagcaagaagataacagtctatttccagtacatttagaagcagagcaaaggctgaaggcaggaaaccaagctagtaagatgttgccataatctcagggtgagaccaggctgggaagagcaaacggagcaaacagggtaaagcccaacttatcttattaagaaaacaagtaagatggttgctgaagtgcctttaaggaatactagattcagaacctttcttccataaatcaaggttgtatatctctcaacctgctttttcccctgccccaagccaaacaaaagcagaggctgggtga

SEQ ID NO: 51756 - DNA, 571 bp, Homo sapiens
gagagagagaggtgggattgcccaaagtctgggaagaacaacagtttgatggtccctgagtagcaagacagctcccaaggaaggcagtgggggtaaaaggtatggctgcctggccaaaatacaaaggccagaccttcgggcctgggctcccagctccagcaaaacctcctgtgtccaagcaatgcacagagcagcagactcctagaggctatgtggggcttggtcaaagggcatctcagcagtaacctgaagaaccaagaacacagaaaagctcctggaatgttctgctctctacaaacaccctgggattctgtgtcaccttggtagtgtatcaggccaccccaactagcaataactgagattaaatttcccactaatgagtaagatggaatcttggcatctgatttgttgtgatttaaaggaaataatttaaacaaccatttcttgtatacataaattggtagaataagtcatactacagatttgctgaaaattggagaggtaggaaggctgaaatatctaccttttggctcagaaaatttgtcattgtataaaatcacataactttaac

SEQ ID NO: 51757 - DNA, 5143 bp, Homo sapiens
gtgggggttgcagtgagccgagattgcaccactgcactccagcctgggcgacagagcaagactgtctcaaaaaaaaaaataaaaacaaaaaaaaactactctcttaataaatttcaggtaaacaatacagtattgtcaactatggtcaccacattgtgcatgagcaatctccagaacttattcgtcttgcatacactgaaacttcgtactctttgaccaatatctcccattttccccacctcccaacccctgacaaccactattctaccctctgctgctatgagttccagcattttggattccacacctaagtgagatcagccagtatttgtctttctgtagcatcttttgtctttttctatcaagcacactgaactatctatggcgaaaccatctaaatgtttgaaagagattttccaccatcttcagaattctaggatcaagccagtgagaaagaaaagagaatagacgacgtctcccttcctgtttaaacatagtgagcaccttagtatggaaagattttcccattatcttctttcaaaaatgtgtcagcatggtttgggggagggtgggacgacagggcaagtgggagagctgttattggacctcaggggagaaggcaagggaacaaagatcgagaaaccttgctccataaatgctgtcctgtcatctgacaccacagcgcaaggaatgctactaacacctccgtccaaaggaggaaagaatagagtccgaaagagatctgaaaagaaggcggataattcagctcaaccgacttgttttttgacacgtagccttgaaaagaacaattttacctcagaaacttggcaaatacaaagtgatattttttgataggttataacatgcattttactaaatgcatgaagagagggcgagggaaaaaaaggccaggtatctgaagacaggaaagttgtcaggtttctcgtttctgtgtcatttttgtttagtcggtcaaatgaaaattcaaaaccatataattagatggttgtttatacatgattaagcatgagctcattggactctacatgccaaaaagtcagagatgtggttaagggcaagaaggaactattaataaaaggaaataaagctgtaatacatttttcacttatgaataaaaataactcaaaggtctctagatggaaaaagagaaacaaaatcaaccatgagtaggggcaagaaaccagataattttataaatggttagaattcaataaaacataagccactggtatgaaaaggctttttttcctcctccatgattctaatcctattttttgcttctcgtaaacataactcacaatgagaacataacaaaacttacctgtattatatttctttagaactgttctgggaaatatttaagcaagaacatgctgtttatttacaagagttacttgttcttcataactgtcttcaccagtaatcctctccggaaaaaccaatagctgtcagctcccttggaaaaggcagtgtccttttgtttttaacaactgcagaattttcttcccatagcgaagtgagcccattgaaagcaaggcttaactgaccataaccttcataaaggtaaggcagatgctcccagatcccccacaggatctgtgattttagacttgggctctgaaaactggtgaatcaactgctcatagaccaaacaccacactatggatgaggtcagtgggcaagtctttgggatggcagagaaaataaactgatccaggatcagcctacttactccttgttaggtaaggtttttaagccaatactacaacgtcccactactgggaaaatacatcaatacagggtacctctggagaacacgctggtaaatgaaaaactacacccaaaggtggttcaattgtgtgtgttattttctataagcaaacatatctttaggttgccaaggctagtaccttttgcacacaactgctgtgatacatatagtacaaccaattgattggaacaacatgatctaaaaccaaaaatgaccaaagcccacaggatatcgcaacacacagttcttaagaatgaggctaaaatgaatctaataacattcaaaaagcccataatgcctaagaggcatgaacaccgacttttacagcccgactctgagagcagtctccaagtcacatcagtgccctctgtcagagggacctaacatctcaaacttccctctctttcctctcccttcctccccttctcttcctgccagcttccctcctccctttgttccccctccctccctcactttctccctttctctccctctctctcctttagtatcagccagttctgactcccagagagagtaatcttctctgggaagtgcatacccgctcagtagaatttaaacaatatacttcatttaagcctgtatgataaactacaaaatatagaaattcctaaaaaggtcatttccaagaaactaacatgacaaaaaagtacaaatctgaaaaggcatggacaattgagacaaagcacaacattcataactaatttggcaattttaacctataaaacctatatattatctacatgtcttacatgagataggtactttgttctaaagatactttttaattattgacctgattttgtcaaattcagttcttaacatattcatttagtgcaagaagctacccaaagctgggaggaaagtgcactttcatgaaacaaagtctttatgcaccagaactttatggatttgtgtctttaatgttgaaggaaggggggacaccttactaacttaataaatatcgattatttgaaaccgttgaatatctactatagttctagataagaaatttgataatttattcctaaacaatgtgtggcatgtaactcaaaactatttttcatcaataattagtattaataattaacaagggtaaacaacaaaaataccttttggaaatatttcaacttggccctttcctcattccacaggctgcctattgccagtctttaccctcaatttagggttaatgactaaactgtcctcatctctgacatgcaacactactcagcagcaatcttcccaagtatgtgctcacaaatacataagattgaaaagaataaaagtcttatcaaagtcactggaatctggcgaactgatttttaaattagcaactgcagttacgatccactcagcagtgaattagatttttcagcagtagggagagaaccctgaataaacttcatctcaaacgcctattctccatcctaaatatgcaatttatgtctttaatgcaagaattagcctactaataaaaattaaacagttctctagataaacacagcaaagaggaaggatgctacaagagctattcatttaaaacaggccagaaccaatgtactggattttatttgacactcattctgaagagtattacgttcgacttttaaaaactatcttgctattatttctcaatttgattgtcccaaagcatctttagagtcaaatgcactagatcttataccaaattaaaggcatttcaccgtatgcctctaattttctagccaccctgacctagcacctgacatttagaaatttaagcccactgcaattaatctcctctggccattcatttcttccccaaattgaacattatgcaggcaatatcctaagaagttctgaaagttcaacgtcatactatattttaatttcttacagcaaatacaaattctaaaattcctagtcctcttccttcacgtacctccattctattattggaatttcaataatggaatttcaatttggaatttcttaacaaatttcttaccattattcttcctgaaaaatgatcaaaatcatcagcaaaagcatctcatgcttaaattattcatgttctcaggctgtttggccactgacattttaaagtgttagaagtaagaagtccttgcactgcggggcttccatatgcagtgtctgcttgtgtacctgtgtgggtatagattgtttatatcttgcccttggctgggggcctcagacagctgtgcagagtacttggcatacatttccagggctacttgctctttggttttataaaatgcaggcagcaggaacattcaggaactgccaggacattcagcaaaggctggagtgcagagaggaaagcatctgacaaatgcagagtaagaaacaatgactcccttcaaggggaactgctggtgaagtcagccagcgctggccagcgcgaacaatacttgggcaggtcattaacttgcctgggtcagagcaggtgggtgaactcacccacccacctttctggaagcaaagtttcacttgctgagttcataccaaaaaaaaaaaaaaaattataacattctaatggctaaactagggatgtgtctgaaaatagctaactctgcaaaccctgcagaagacatccagggaattcacaaaggtaagtcaacttactgtcggctgtttcattttgcacacatctctataatagctacgtatgtattatgttgaaaataagcaaacacattagcaaaccaggattttttgaagtgaggtggttaccactgtattatgtttctccctctccttttttttcttttgcataggaaagagtaagttactggttaactacacaaaggagttaacatttaacttgaacaccaggaatgcttgagctcttaatccctcccccctttttcttattatagcaaaaatagcttcaggaaaactcttactaattattgctgattctagatgagatctggctacatcggtttccttgctacactcacaggagtttgatttcagcctgaattcaccactatggttctttcagacatactccactccaggcagcctgaaatccctggtcaccacatccccacgtccccatactctccatatttccatcctcaaagatcagctcaaatgctacctcctccttgaaagaaaccttccatattccttcctccaatgccaggtttacagtgctctattcctcctctaaactcccacatagttattcatttgtcttttgtgctgtggatcaattctacctcatgtatctatatctcacctttccccctaaactggcaggcccatgaggacagggactgtacctaatccacctggacccctacccatcaccccagaatatta

SEQ ID NO: 51758 - DNA, 2514 bp, Homo sapiens
aaataaaatgtaaaacaactaaaagaaaatgtatttgaattttttacttcattttaggatgcagaaggcaaagataaacagatataactacaaaaatattttagctcaaaaagcaccacaaacaaaatgaaaaagcaaacaaaagaccaggaaacatattaacattctatatcacaaagagttaaagacttacataaacagtccttgcgaatcaatgataaacattcatgtagggggaaaaacaaagggcctaaccaattcacaaaataatctagtagataagacataaaatgaacacaatattctgccagtagattgagttgagagtgtaatatgttatataaacctttggggaagcaacttggtaacacagtcagaggtatttaaaatgttcatctgaccaaataatctaccctatggacatatttagacatttagaccatcatttttaaagatatttggtacaacgtaagttcagtaaaaaagaaagcaaacttgactaaacaaattatagtacactttccgtatacataaaaaatgtctgctgcacttaaaaattatattttcaaagaatactgaactacatggggagtttgtaacacaatgtggaaaaagagaccatgaaactttatttagaataaggcacaagacacatgcatgtatttgcttactaaaatattaacaaatgatatctgcatctacaaagtacttgtagataagtttcttttattcttttttcggtatttaaaaaatgttctgcaataaacatacataatttttctacactgaaaaaataatgctctgaagaaaaaaatactagtgttaatgtgtaaaacactaaaaaggtcacgttactggatcactgccaaaagatttttaaaaagcaagttaaaaagcaagagaataagcatgattgtgcagcaaatgacatcagcagtggattacacctggaaccactgacccattacatggcgcattttgtccataatcaagtaactttcccaagctcgtgacctggccgtggcgtagattcttaggcagttgtgcggtgtgactgctttctaaacttttctcttacccttttcaatatttagcgtatttgttttctttgctgaactcaaaacgtttgtgccttcataggccttttaaatgatgaaatatttagcaataatttgcactcacacataggacattagtcaccggttatcttttaaccaaaagccctcctgaatttcagagagtccgagccaggtacagtgtctacttctccttcaaatggagaacccataagtcgagcaactccccaggcccacagttctccacttaagtgtgcatcagaatttcacggacggctgtacaagcatagattgctaggcccatcccagagtttctgattcaatgggtgtacggtgggacctgagattttgcatttctaacaagttcctgggtgatgctgatactgatgctgcaggtcctcaggcccctctgctgtgggaaccactgctcaagatcataggaacacctaagcatcttcccactacatgctactgctattcatttatcccctattattcacattaacaatatattatttggtatctgttaacaaatttaatcatccataacccaaataaatccctgaactcctcataccagtttcaggtggagaagtacattcaaaccccaagtccagcaatggattaaaaaaaaaaatcacctcttgtgtggccattcctcttgattgacaactcttatacccttgagcagccctgaagccttccttcactcttccattctctcacatgacaaaacaaactctcctcacattcacatagaaataaggttattccctcccttcttcctccattatcttaattctttaatgcagtctctgccctttcctacacgaatttctctacttcctttcctctccttcccttaccgattagctgattaaacctcaggagagaagcactaaatcacacaagtttttgtccctgtacacttcatacattcatcctccttatccacccaatacacacttagcaggtgccagctgtataacaattcctgtgttaagtattacagacagaatgtggaaacaaaggtgggatcatctagaggtaagtagggcacagagatgcttcaaggacaaagtgtatttggtctgaatggtgaattcaggtctaaattttatatttcccaaaacccttcaacccactggaagataaaatatcttcttcagagtttcattcctttggtttcaccccattaaaatttacatatccttgtgaagggtagccctttaagggtcattatgcttaagcgtcagtaagtttcatgcccttatctgatgaggaggaccctggatatgctgaagaacagaaacaacccttaaggaacaaaagggtatatgataagagtgtctctgaaaaaaaaatgccctctcccagcttagcttgcagtggttctcaaagtgtggtacctggaccaacagcatcagcatcatcctgg

SEQ ID NO: 51759 - DNA, 1232 bp, Homo sapiens
aatcaattatctaactgacatttttacaaatctaccacaacttcgccttttattgcatatgctaaacaagcagatgctaagtctgtaaactgtgaattaacctcctttttaattaattgttcctttggaaatactggcttttaaatcccgtgctgcagttgcttcatcttggagatgtgtgccaatctcatattcaggttcgcgggctatattccaggaggcagtacacgttgattccacttttaattatttaatgattcatctgcattttatttatacattggcatctgacctggtttaattttagtttattccaacaacacgcctgcaagaatctagatctgaccgtcttcacagcaaatatgactgacgacgctggaagtagtgacacagctcagaaataggtcaagggtgcaaagggaagggatcagagtgtacttaattgacaggggcaggccctcctcaagcacatggttttctgagctcagcactccttccttcttttaaagagcaggcattttaagcagggagtttcctcaatagttatttccaggactttctgaatggtctctctacatccaaaattctcccttgctaactggacctgagaattcctccattagaacctcatactctcagccccaagcctctttattaaaagcaaatgcactgaaggtaatatcaaaatctgttgataatgttattttgtcagaatgaaggatttgacagcagttttctgaaaggacaaagaagggagactgagagctttagggagttgggcactgggtgaatggaggcagagaaagaggtctgaaaagaaatgtctccttctccacagttctggaacttatcccatgctaggccttctcctagtcatgaatacataataaaaagctggacctccagctactgaacacaaataactttaacttttatatatcctttgagacacacacataaacacacacgaggttcttaaccgtggtggctcacagaccctgaaaatcagaaactgccattcgttactctcctggcaatgctggaatgatctatccttctgggactaaacttctgattctacccaagtccccactgtactggataagaaataaattttcaaagtccaagtactttcccccatacataaccaccataacgctgggagaaggcccagaggaagtgaagcaatgtaacaaacagggattgaatactccttttacatcaattcatgc

SEQ ID NO: 51760 - DNA, 1438 bp, Homo sapiens
tagccagcagtcctcctgtctgtcctctttggaacgaaggtcttctgtgagtgtgaatgtataaatgcaagtgtcagtgtgtaaaaactccatcggggcactgaagtattccccaagctagaaaaaaaaatctgttatcttggatgaaaaccaagatcattatcatttaaccactttgctgtacttaaacatcaataataacatggctgtgctctggtgaaaactgattaaagagaaccaaaagaaagaaacacaggactgagtcaatctcactatgcagaaagcatcccggcatactgatgaacttctttttcaaatggtgccaactgacagaaacaacgatcacctctaatgaacaaaataactatgtaaaagagattctgagtatggctcaagctgcttactgattaacgcttttgcacacaacactctacacaaacctgtgtagtcattgttcctagtaaaacaagcctttgttgacaactggagacaaatgatccttgccgaccaagttcactgttctcacacagcttaatagctggagtagtgctccctggccacagctaggaaaacttgacgtggttgtcacaaaaaaaaaaaaaaaaaaaaaaagaaagaaagaaagaaaggaaaaaaaagaaaaactagagaagaggggaaacctttgttctgaaggtgagaaggagcctgaatgatctcatgccctaaacatgtttgtggtttacatcagtacgtctccttcacttattaaagttgtgagtttttaaatagttcctgctccaaacaaacagattgcaatacttaagaattcccactttttaaaagtatttcccttttcctcccttttccacatgggttgggaggtgaaggatttaatatttgtttttaagttaaacagtttttttgttacagtatttgcaaatattggctgtaactgtaagctgtagaggcatacctcattttaagaaaacctgggtggaaaaaaatatctgaaacttaaagcacagcagtctaatttccaccacatgaccaaacataattcacttcagggttaccgtcaatgacaaggttcccacagtgcctcatttactcataaatattattgagcccccactatgtgtaaggcaattttaggtgctgtttacataaaacaagattaattttattaaagtttcatctaatccctaagtttttaggccccaaatctattacataagacaatgcaaactggaaaaacaaatccttccaactgagactaaaacttcccttctgattggcagatgcctttcttacttttttccataacaattcattaaaaatatttttttgaaaccaggatgggctcagcatcgtctcaggtgagaatcatttccagttgcactaaatctagggaatccttcactctgtagcttcattaggcacatgtggccactcttac

SEQ ID NO: 51761 - DNA, 2039 bp, Homo sapiens
aatacacatttatatctaatttgaagatttttaattaaatttctaccaagctaatattatataaaaaacacacaattcaaaacaatactgtaggcataatgaacttcatttgctaatgtatgcctatgtacacacaacacaaaactagaacagcagtagggctagggttaattttattttattctttctattttcagtactttcctaattctacaatgaaaaaaaatacgtcttttttgttttcagagggaggaaaacaacattatttaaataaagaggtactagagacaatatcagaattcaaaaaaggacttaaaatcatacataaaagatccataaagaatagtgaaatctgaataaagtctacagttttagtttacagtaacatatatataccaatgctggtttcttaattttgataaatgtaatataaggtaatttaggtcatattggtgagtaagacggtattgggaaataccttaaagttcagttaccttagtcagagaactggcctgctaggaagtgttgggaatttgtctttggggctttgtcttcctattatctttgcaactttgctgtaaatctaaaattatcctgaaagaaaaagttactttaacaaaacaagattcataatgggtaaagaattcacatatctggaagatggcctttgcttttgaggacatcatcaccaaggggaaccatgttcacttgtaaatcaccccttagaaacctcagaaacatcagttagttttgagtggcagaactgggggtgatcttatgttctcatttattgatttgttttattaattgctagctacatgggtcaatgtaaatatatttaatactttgaagctacctggaaacaaaatactgcactaccccagcaggacattacttgcattcttttctttcttttctcatttatccaagcaaccttccacattcctaacatgtggcaataattcaacctctgtacttttccaatcgtatttataaacacagtttttcagactttactatcacaaagccccagaaataacctagcaaaccattttactccagaaacgccaatggacccttgtgggtttgccatctcctgcctgctgctgcctccctgcataactcctccccaaacattccagatacttctctaattaatgaagacctcaccacttggatcttatctctttgttgcaagatgaacatttttagtattctgcaagactcagaaacctagaaactggtaatatggagaaacttcagatttcatgagatccaaaggtcagggtctccagttgctcatttcatttatttatttatttatttatttatttatattttctaagaggagttaattgattgcagaaccaagagcccccagtccactactagcagtcagatcccttccaccttcccctttacatatgggggattgaaaacagatcctccccatgaaaaacactggagagtgctcatctaattcaaactcctcatttcatagggaagaaaatacaaggaagttaggggtgggggaactaagatgggaggagtttaagttgactatattcttattttatttaccaagctgttgacaactcactaactccccccaccgcccaccccataatcctatcccttcgtcctcagggcaaactgagaccaaagttaaatgggtgtgctttcagtttttgcttgcaatggtgttatgcaagagtaacccaaataacacaagataatgcttaacctagcgaaggaggcaggacctgttcaaacttgctctattcacagatggggtggggtgggcagcaccctcttgtcactgtgacatgtgagctaagaaaatgtatcccaattgctggcttttgagcctttctggaattagatgccattttgtaaaaaaaagtaaatctccttctttgccatgtgaactaaggtgtaaaacggagaaaatgtgttttcaggatttaaaggacctacttatgctcttaactgctgagttattttcaccagcagactttgtctttgtgtaagccctagac

SEQ ID NO: 51762 - DNA, 2293 bp, Homo sapiens
tgagaaggccagtaacaaaaatgaagtgacaatggcccagagagagaactcaagagggttactctactcagcaaagaaaggcagcccttagaatgcccctgagcgaatggatggagccacattacgtaactcactcacttctctgcctttcatctttgtcaatggccataaacccgcaatttcactaaacgcaattcccatttcagagagtctttaaagcaagcggcactgcctcacaaacccatgaaaataggtccttttcactctcttatcttgaatctcaaaaaaacatactcttgctatgaacagatatggacttctttgagtttttaagagccaattatagcacatcgcaactagtgtaccctgtaatactgtctccaaagagggctctccagcagatgcagggggtccccatgatacaaagggctgtgttctaaaagttcctgtgtaaggtggttgtctagtgcttagaacatattttcatggagaggaaaataaaacagcaatgaatggctagaaagagacccggtctagtccaaacagtctccttaaccatgtgtctgaactatgtgactgaagagtgctctcggatctgggagccatagtgcagtgcaagggggagaaaaaggaaaaggagacggaaaactctccggctacctcctggatgggaggtgtcactagccatttcttgaggcccccaacaagatataaggtaaaaatcctcatttgagagaaactgcactgctcactgacacccgctatttttgcaaattcactcagtggctcacagaaacacttgacagagtgctgagtggcatggatttgggaaggatgcagggcagcaaacaagcaagctggagagggcagcgggatgggggcccaagaggctaaatcggaggttctcaaatgttctcagtccatgtcactctggcgtctcaggtatttttttcattatacttctaggcagagaggaatacctaacagttccatgagttaaataggtagatccaaacaactcaataaatatttacgtcctaacaacttagtaactatttgaaaagaaaaagatataaattgatgagaaggtggtatttttatttcattcttatatagccaaaattttcaatgagacctatgtgctgctgggcactatgcagcttttctaactttggaattagatgggattctgccaccccatttcctgcttcacattgatttttataccacactggctatttatcacagcatcccctgaaagcccagcttttcacagatatgacttcaccgaaaggaatgtagtgatctagtgttaaaactatgaactaccttaagcccgtagttcacatggtagctgacagatgttgattgtttcagtgtttgcctcaaaaaaaaaaaaaaaaaaaaaaatcccacagcctctccatgaattcactgtggcaccccagggtgccttcagagaatagtttggaaaaaggcaaggctagaatgtttccagtgcaaccaatcaggagtatcctttctggtttacatttcacagtaagaaaaatgtaacccacactgaaatggccatgggcttgacctctgaagtaacctctgccctgcccttttaaaagtgttccacattcaattcacagcatcctttgggtaagtgataaacttctcagtggctcacagacatattctgcagactctgggacagagaggacaggtgattctgtgttgatgggtgagatcacgtttttaaaaacgacttcactctacagtataatgtagacaattattaagaactattatggtttagatgtttttcattaattgacatgtgagataaatgttgaaccaaatacagactaacagagaaagaagatgccaggtgtatgttttattgataatcatataattttgcccctggcaagactaaaagaaaaataaagtctaagacaagcaaagattgcattgaggccaaaaaaaaaggaggaaattcaggtttgtcaattcattcattcattcattcatccattcattctacagatgttttaaagtttctgtcattttccaaatactgtatgtcaccagagacacagaagtgaaaaagccagccacaacatggcctttgaactcctgtcaaggtcagtagtgaccttcatcttccccaatgcaatagagtattttgtggcttcatcttatctgacgtctcagcaacatctggcctagttgatcactccttccttcctttcacttgttaacttggtttctgagacaccctctaccctggttttcttcctacctc

SEQ ID NO: 51763 - DNA, 2281 bp, Homo sapiens
tgaaataggactactagaataaaatagaagctattggagtgcatcaaatatattaatggtgaactattggttttacttcacttatttgtgggtatacctatctgcccatttgtatgcatatacatcttctgggtaagacaaaaaatatattgtagggtgagtcacggccaaaacagtataaaagtcactgttaaaaagcacttggactatttgtctacccaagtacttaccaagaacagctgcaggtacagagttgaacagtcaaagtaaaataaataacaaaatatagctagaatgaagaacagaaaagatctaagggtttgacatttttggctttataaaacgtaaggattcaatgatacaaagcttcattcctaccactgctatctttcactgtgcagtaagtatcaattgatcaattgtgctcaataagtaataactgatcaaccaactgacagaataaggatcaaaattaccgaaaattttggatctttttcattgcaggggataggtaacttccctggaataaaactcccctcttacactgctaaagtgggtaaagtttaaattaacacacaatgtctttgagaactgagtctttcaaaatgtgttcttaatatgagttagccatcagattctgaaaagaggaatttgaaatggaaaaatgaacacattcctgatgatgtcactgctgaattaattacctgaactgcaaacactgaatagcacatggccagggtttgagacacaaaggcttcttcttcagaagtatagaagtaaaataactggctggagatgtttctttcaagaaaaacaaacaaacaaacaaaaaacaagcccatcctcacacaagagggtacataaggaataaaatgtggcaaatgaaaagagcattcattatcctttagtctgtgtaactaaacacttagtccatatgactaagtatttgcaaggctaaaaaatcacaatccttcaaaaagggtaacaaacatctacctatggaagattctagaaataaaatttatcactcaaaccaaatattcaggcatcttattgtgtccccatcacacatgtaactgagtgatatttttccttcagcatagttattgcttaaaagtgaccgatgtaactatttctggctgttggtagacagcagttttacagaagttaaattatgttcactgacatcactgcggaagtatgaacatccacaacaatgactaggcccttaaccaacatgacaacatatttattaaaaagattttttgaaaacctctgtgaatgactcagccaagttacagacagaagtggaatctatcggtcatgctgaaaaggttgggaaaacattaatccatttcttcacacacaagaataacaaaacttcgtaactagccctggcatctggttggttttctgtgtacaatattcagcaggcctacaaaagaaatttgatggagctggcttagaactttagaaatcactggtattcagaaagtctgatctctttatcatggagcataggacaggatctgatcttgcattgtgacgctatctgcccatctgcagttgagcaagtcttgctgctcctgaaggaatgtgcagtcattcttgttcctggctttgaagagatcatgtcagacaagggtggccccaccagctttccttgactcaagtctgccctcagctactgagaacctcataattcaagttttacaaattccttttcttcccaaagtggaacatgattggatctttgtttctgttaattctacaaaccgccttagagtccagctcgatggtcttttccctcctcctttattttgttctcttttcccccaaatccagatcctacttatcctctaagcccaccccaaacacccactttaggccctccttgatccttttttagtctctataaatctgacctgtaaaaatggggataatgatgctactgtgcatagttcataatattacagaataatgggccaggtgcggtggctcacgcctgtaatcccagtactttgggaggccaaggtgggtggatcacctgaggtcaggagttcgagaccagtctgactaacacagtgaaacccccatctctactaaaaatacaaaattagccaggcatggtggcacatgcctgtaatcccaactacttgggaggctgaggcaggagaatcacttgaacccaggagggggaggttgcagtaagccaagatcacaccattgctttccagcctgggcagcaagagcgaaattatgtctcaaaaaaaaaaaaaat

SEQ ID NO: 51764 - DNA, 4353 bp, Homo sapiens
tgtattctataatctgggagaagagtaaattaacactccaactccaaagatcaataattataatatgagagagacaacagtggaaagaatgaatgtcctcaggcttaatttactagcaggaaagaacagtcagaggaaaaaaaaaaaaaaaaaagaccgagaacactgagctctcttctggaatggcagaaggaccactttctcctgcataaatgaaggcagggctaatacaaaacgttttctgggtattatttaacctctcctacccaggctattttagctcagtaggaaattcacccactaggtggaccttggagttcatccaccaccccaataaagattgcctttcttatttgaagtgatgatcacttcttccaagcaaaccaacaaaccctaggtattcaacctctgataacctgcctactaaggaacttcagtggaatcaggggatcaacgatgctgtccccaaactggcctaaggtgaaccaaggggagaagttaacagcagcacttaaattgatctactcatactcaaggattactgagtcttctgggcaagaaaagaaagcaattacaaactaccaataaggacaggtgttttgaaaatagcgaaaaaaaaatgtcccctacacttcctttcaaaggtagcctcagagctagtctggctgcgcagatgaccagtgaaaataaatgaaaactgcagtacggttatagatgatccttacacctcagcttgttctcaattgcaaaaaaaaaaaaaaaaaaaaaaaatgcatataatctaacactctcctgtctaaattgcttcaaactttctcagaacgaccttcatcgtggcggattctttttctgcaaacctttacaggttgcacctgcttcacacagaaccagcggaaacaaactaggaggagataaaagagaagaagtaggaaggtttaaaccaacacaagtcgattttgtacccaaaaaaaaaaaaaagtttagtctaaaaagggaggtccagtgaggaacaagacagagggtgaaacagaagtctggcttactcccaaggcagaaatcatgactcatcaaagctttcagaggggacagaaccagactttgcatttgtcttgaggtcatcttcgagccaagaaatgctctcttaaccgggacctgagaactttaagggtctgcgacaactggctgtgaggccttgggcaaaacctctaacgtctctggggctcggtttcctcatcaggtgaagccagggtccactctagctttaatagtctctcctcgagattcccggccccatactaaagggacctggtccactggggggagctgcagaacttccctcttctcacaaactccagggccctggggccccaactctcgggagatgctgaagtcttggaggaagttggttctgccggctcggggagagggtgcaagagcaaccctctttgtgaaacggggccgcgactccacgagtcctgtctctacggaccctactccctgtgattccggaagcacctccctaccccttccccaggtttacatgctccagagatgagggccaagcggataccggggcaaactagcgtggggctcaaggaggcacacagagcagtggtctcagtcctcgagaccactcctgccaagaggagggctggagaagtcgggagaggtgccgggagcgggggagaggcgcgtaggacaaggcaggaggagggcggcccttatcggttccctataggactggcttcgctgccggggtcggagattcctcggcgcggagctaggggcgggtccggaggcggaggcgacagcgcccggcggggtacgcgcggctgcgaccccgtcactcccccgccgcctccgcccctaaccctcggccccgtgcgcgagcgagcgagggagcgaacgcagcgcaacaaaacaaactagtgccggcttcctgttgtgcaactcgctcctgagtgagtcgggggccgaaagggtgctgcggctgggaagcccgggcgccggggacctgcgcgcgctgcccggcctggccggagcctgtagcccgggggcgccacggccgggctcgcagtccccccacgccggccccccggtccccgccgagccagtgtcctcaccctgtggtttcctttcgcttctcgcctcccaaacacctccagcaagtcggagggcgcgaacgcggagccagaaacccttccccaaagtttctcccgccaggtacctaattgaatcatccataggatgacaaatcagccagggccaagatttccagacacttgagtgacttcccggtccccgaggtgacttgtcagctccagtgagtaacttggaactgtcgctcggggcaaggtgtgtgtctaggagagagccggcggctcactcacgctttccagagagcgacccgggccgacttcaaaatacacacagggtcatttatagggactggagccgcgcgcaggacaacgtctccgagactgagacattttccaaacagtgctgacattttgtcgggccccataaaaaatgtaaacgcgaggtgacgaacccggcggggagggttcgtgtctggctgtgtctgcgtcctggcggcgtgggaggttatagttccagacctggcggctgcggatcgccgggccggtacccgcgaggagtgtaggtaccctcagcccgaccacctcccgcaatcatggggacaccggcttggatgagacacaggcgtggaaaacagccttcgtgaaactccacaaacacgtggaacttgaaaagacaactacagccccgcgtgtgcgcgagagacctcacgtcaccccatcagttcccacttcgccaaagtttcccttcagtggggactccagagtggtgcgccccatgcccgtgcgtcctgtaacgtgccctgattgtgtacccctctgcccgctctacttgaaatgaaaacacaaaaactgttccgaattagcgcaactttaaagccccgttatctgtcttctacactgggcgctcttaggccactgacagaaacatggtttgaaccctaattgttgctatcagtctcagtcagcgcaggtctctcagtgacctgtgacgccgggagttgaggtgcgcgtatccttaaacccgcgcgaacgccaccggctcagcgtagaaaactatttgtaatccctagtttgcgtctctgagctttaactcccccacactctcaagcgcccggtttctcctcgtctctcgcctgcgagcaaagttcctatggcatccacttaccaggtaaccgggatttccacaacaaagcccggcgtgcgggtcccttcccccggccggccagcgcgagtgacagcgggcggccggcgctggcgaggagtaacttggggctccagcccttcagagcgctccgcgggctgtgcctccttcggaaatgaaaacccccatccaaacggggggacggagcgcggaaacccggcccaagtgccgtgtgtgcgcgcgcgtctgcgagggcagcggcggcagggggaggaggaggcagaggcggggtggctggaccctcggcatcagctcattctcccctgctacacacatacacacacaaataatgtttctaaaaagttcagttgcgactttgtgcctcgcctgtcctgttcatcctcgtcctgggccggggaatgcttctgggggccgaccccgggatgctggctaattgctgccggcgggttccgtcgccggtgtgaccctggacggcgcggacggcgtacagggggtcccgggaggggcagtggccgcggcactcgccgccggtgcccgtgcgcgccgcgctctgggctgcccgggcggcgcagtgtggacgcggctgcagggagaggggaagggggaagagggagggaggaaggcagccgggcgaggagtgtggatgtgtgtgcggccgcgagggccggcctgtagccagctgcttcctgagtgtgagcgccggagggggagggggaagagtgggggcgggctcgcgggtcactaggctggccaattcgaaggccgagcttgtgtctccctcttgacgcattcacacacacacacacacacacacacacacacacacacactccccgtgcgccagaagtcgaggaactccagaacagggtaacagcagggagacacttcgccttcttcctggccttatttgttaaactgacttattttaacatgaaaaagtgttagtgtttagacaggatttgatgtcaggtcataaaaaaataaacaaacaaccaaaaaaatccggtagtaatacggagagaataacacagtgaaaaatggcaaaagggttgctttgaaatatcggatcggatgcacatgacagcttcgaaa

SEQ ID NO: 51765 - DNA, 2278 bp, Homo sapiens
gttttcatttatctaatttcagtgggaatactactaggcttggtctgtatccatgatattaacataaccaaaagaagcctggtttccacagtactttttcttttcttttccttcaccttgggacacaaactcatcagaatatttgtcagcagaagtaggggatgaaaaatagtaagaggtcaggatatgtcattctgtcagttttccagtttctctctgttcatctcttttaaatacaagtattcaagcccaagatggcaatagatgggctcaaccacacgtaagaaaagaaaatactcataaaatgaagcatgcagcaacatcacaaaaacaaagaaaccaagtggtggaaattgccatgactattccattgtggctagttattgcaacatgcctgacattcacataaaaactcttcctcattaactccagccttaaggaacagagcaagatggcaacactaacccttcaatgcatcatgggaacttctgttcatcagattcttgtgctgtacaactgcttcccaggagcaagacaagcctgggtggagactgcaaaaaacctttccaatgtccctcaaatatcattttaaatacaatggttttgatgcatagaatggtatcctaggggcttgcagaagcttctaaaacttcccaaatgatgggaacagcttagctggaagagaaaaaaatatagtgctacacccaactttaatcaatagctcatggaaaaaaacactgggaaagttaggagtcatcaacctggagatccccaaaatctcttcatttataagagcccaagagtgggaatgtcattttatttaggtgtgattttcatgaacctctaacattcctaaaatatttaccactgaagaggtatagtgctttggttgaatttttttctttttttttttttctggccaagaatgtagatctgcaatgttcttatattccatgggttatagtaaaaatgcagttgttcttgtaccagtacaaccctggaatgactcagaatgagatctgtacctcttctgggctgaattggtcagcaggggtgagggagggtggtaatgagagacagtgagaaaggaaatcatgtagttccaaaatgatactctcccttacccatgagctctccatcgtgcttaggaatcatactctggcagcccttcagccagataggtgggaactgcagcccagtcagtatcttccctctctagagaccagtgttgtatgtgcctcaaccgctgactcagggcagctgactcagcagacaggcccctgctgccagctccagtccagttctcattcatcagagaaatattcagtgagtacacactctgtccaagtattgggactaaaggaattaacacttgtaggcattgtatatgggaggatattacagaaaactttttgcccagtgtcttagttgtagcaaaccctcaagaaatggggactctttgcatatattacctcatctaattctcaaatcaaatgtatgatgtggctatgaataatctcctacttagaagcaaagaagttgaagctcagtaaacagttaaagagagtcagagacagagccaagtatgccagtttagaagccccaagttcaatcaacattactgtactacagaataattgtgcatgctctttgaatgtgtataaaacatattgcaggtgtataaagtgcaaagcatcttgtggtcagtgttagatgagcacaatgaagtttgtagggagtgtggaggaggcaggaataatttcctgcaatgtgacatggagtagcttggctgtttgagctggacttcaaagaatgagtagagaagtgataagcaaaggagaccatttcaagtataggaatcagcatcaaaaggggcacagaaggcataagtcctgcatagcaagcagctcactcaaagctagagtacaaaataggaacatccactgtctcacagcaatgaaactctcccgaaggaacatcctgacagcaaaacttcagaactgctatttgagtcaccctgagtgctctgacagtaaaccacttacaaacttgcaaagaactatgatcagattcctcctcccacaaagtgtccgtgaaaagaaacaaatttgaaccccaaaatacagataagttgagctaatagcaccagtgatagtatgcctagctattaaaacacagacacacacacacacacacacacgagctggcaacagtccagttacgtagaaatgcagtggaaaaagttagtgtttgccaactttaaggggggaactaaatg

SEQ ID NO: 51766 - DNA, 3021 bp, Homo sapiens
taaataatggggagaaaagggaagaaaagaaatggaaaatagggaacgagggtgcagagaagaaggtgaattatttaaaaactagtggaaatgaagaaggcagcgcagcactgatacctcagaataattgagagcaactagttagtttggggcagaattaagctctggaacaaaagcaattcagtggcttttcagactcctccccaactcacctcaagtcttaaatatacctgcaaaggggtttgaaaaaacttggagattttccacaaatcctaacttcttacgatgttaaaagcactcaggagattttcacgtgtatacacatttcttttcttgtttaaccctatacagcagggaagagtgtaattttattgtccatggaacaaatgaccaattgcccccaaagcagacctgccccgggtaagagtgttgacttccttcaggctggggacactgccccaagctcatgatctacattttttttcacttcattctcacaacatccgaatcaggtaagatctagcacaacttccattttacagatgagaaaagagaggcagagagaggtggaatatctccccactgtcacccaactcatgtgggactagccaaacttctacctattaaccattgctctattaccttttcagggcaggaaaccctacttccaccagacatgtatttgtttattcactcaggcaggtggtatgttggaagaagagtggactttggaatcagaaaacctggaatcccaacttcaccgctaaccgagagaccttgagctggttcctaaaccacggggaacttcagttccactacatgagttattgcaaaggttgaatcggaattgtgacactggccagcacacgtgtgaaaccaggggcatcccctattgataaggagcccagcccaagagcttcaagggaaattgaccccagccccagctccactgatgggctcgatgattcagagaggaatctcactcccttggtcaaagtgaatggctcataaatctgggcctaagtcaatccgtgcaagacattcccctggccatagggattggttaaaaaatggacatgtaacccagtttgggctaaatgagatgtgaacaggaaagttatttgatagcttctgaggaaggtagcttctcttctttctagagagccactggaaaggtagccttttctcctctgtgttgtggagagaaaaaaaaagtgaaactgtctccctctcagcccacacagaaggctcacacttggtgaagggaagggtggagaagattacagagaatagccctgatggaaccacacctgatttctacctgacctcttaattttttcatttgtacaagtcagtaaatgccttttaatttttaaacaaataattacagcaacttatagaggtacctaaggtattaagttaccatcatgaatacaaagataagcaagacaaacttcaaggggctcaccacctaataaatattatactttgcttttatgacatcattttagtcttttttgttgttttttgtttttgtttctaaataggatcttgctttatcacccaaactgtaatgcagtggtgtgatcatagctcactacagccccgacctcctgggctcaagtgatcctcttgcctcagcctcctaaggagctgggactacaggtgcgtgcccagctaatttcttttatttttgtagaggcaggggggtctcgctatgttgcccaggctgtgggtttttcagggtaaagttatggctcattctctcttcaggaccctgctaccatttggtcaatttaatattatgcaagagaaattccatttccctagtagttacacaatgcccgctttcagaccagctagtcaaccctgtgagggtcagatagagtagtttatccatttggttgtcagacaactgcctcgaacagccaggccatttctacatgttctcagttactggttaacaaatgttgccccagaattcagcacctaataggaaatacattcatttccaaattcctactgaaataggatttttctcattcctagataaaacagaggcacccagattttcctggaatggcattcagaaatagagaaggaatcatagagaaatgtctgcccaggcatctctgagtctcatgcctttttgctgttgctgctgttatgactcctaccttggaaagtttcagtcatccttgaacatcctccccacccccatgctttcctgtcttctgtttcataactaaatgccatttaaaactctagctatagataccccttgctgatataagcaacagaagtagagagtccttagattctagactgaatttagggcccaacagttagacaattggaacttgataataacgttatctcagcagattgcgtaagtcagaaatgttctccctgtcactgctttctttttccttccagcaagaagtggacattaaggagaaagtgaaggtggcaagttatgagtgatctgtttaagacacagtttagttatggcaatgataacaactcacatttattaggggcttattatgtatcaggctgagcaaagtacgtaagattcttgatctcatttaattctcacagtgtagaggctaatgagtggtggaggtgagaggaggacgcagcctcccttggctccagggcacacactcttagctgtaacactctattgcctccataaagtatgcttaattgtaatacatgttgatgagatatgtgataaacataatttatgtaaaatttaagaacaagatctattgtataaattatacatgtaatgacctgtttatacgacgctaccgtgatactgaacttcctgtagttcctcaaagcctgctttgcaaaccctccagagcccccaagcctgctgttttatctccacaggatgacctttactatccacctcctcttactctgtgaggctttctctgatagggagaataatgtccccccggccccgccctgcatcccaacaaaaaaaaatccacatcctaactcctggaa

SEQ ID NO: 51767 - DNA, 1250 bp, Homo sapiens
cgaggggccaggatgaacccacaaatttaaagaaatgtatatctcccagttctgttcactgaaagcacctagaatcaatgacatctcagtagtcgtgagcacacctagggcccagagtttcgtttctgaatacatccctcactaaaaggaagcacggagaaatggctgattccaggactagggcagggaaagtacaaagcgagccgtaagcatcttgtgacagaacgtaaaccctcaaaaatataaggggcagtgtcaaaataacataggagccagcttgaaagagctccctctggccaattatgggcaattttagcttcaaaataacaacaataagttataaaacattggcagcaaaaagagtccagatgttcacacagagataaaaaaatatataaataagtaaataatggggaagagaaacctcttttttacagtgaaatactaacaaacatagaagaaatgtttgttttaaaaatcacaaacttgcagcctctgcagtaataacagatgaagatgacagtcttcaaaagatgctaaaactattaggtgaaagtttgttggtgaacaggatattttcagagcctcaaaatatctccccacagattacttgctgattgcaaaggggggaagttcctgtacagtgggttcatcaaagtgacatcatgtgcctcccggagtgagctgctgaggacacaacagtatttacatggtattcctgccaaaaatgcacaacctgaatctaatcataaggaaatgatcaagcactcaattggaggggcattctgtaaaacagctggcctgtactcttcaaaaatgtcaatgtcatgaaagacatgaggaaccattctagggtaaaggagacaaaatatacatgacaacaaaatgaaatgagtgatctcagctggattctgaatgagaaaaaaatcacaaaattgaatattaattgtatattaggtaatggtattgcattaatcctgaatttgatcatcatactgtggttatgttagaaaatatcactgtacttaggggcaacattctaaaattttatggccattatatccatagctccctctcaaatgatccagatgggggagcaggaagaaacagaactcaaatgtggcaaaatgttaacaactggtgaatctgggtgaaggtacatggaagctcattattctattcttgcaacttttctgagaacttgacgtttttctaagaaatgattttaaacatttttaaatgttttaaaa

SEQ ID NO: 51768 - DNA, 816 bp, Homo sapiens
atctgtttcccaaggagctttctggatataacattcagtccttctacaaattacagagagatcacagaacctctcaaaacaagcaacaattaaaacgtggcagctacagagtatgtgggtagacagaaaaggttggctgtcaaggagctggtggctggagaggcaaggaagctggtcagtgccctctgtcccctccacccttcctgaaacaattgtagtgcaaatgcatgttcattaatcagcaagtccaagctagggcagacttttctggctctgtttgcagtgccagggctcttgctccagcgttgtcatggggaagttattgttgtcctcctggcaacaggttacctaggtgaacgccaaacagcccaacctggcctagtgagcactgggcctgttcagccactgtccccatgctgctttgcctgtcttctccttatactccctcaatccacactactgcccttatgagtcacagcattcattctcacacacaaaggtgctacagaaggccacttacagcgaacctggggcttgtccaaggccattttgtactctgacctttaaaagcatgcccagccatgggcagtcatgcctgctctcttcaacccacaactacaataagagcagctctcagaagagaaatcatttccaccttttttttttttttttttttttgaaacggagtcttgctctgtcacccaggctggagtgcagtggtgtgatctcggctcaccgcaagctccacctcccgggttcatgccattctcctgcctcagcctcccgagtagctgggactacaggcgcccgccacta

SEQ ID NO: 51769 - DNA, 686 bp, Homo sapiens
tacaacactacctcgatatgtttgggaggataaactcaacacctcagtcatgatttagtggcttggcttatatatttggtggcatagatagaattctgtccccaggtgtgtaagtcacatgaagccagtcctcaatgactggatttgtcttcttcactgaagtgaattgatctgttgttttgtcactatgtagctaaagccagtgggagggtgccagttatttggagaaaatgtttcattttgaagtaccaaagacagccgatgaattgtgttcatgaaatacatgcttcactctactttttaatttgctcctgtttaagttaactgagagtttcgtctttatttttaaagaatgacatttatatagacgttcaaactgccaatctgttacataaacagccttgttttttgaagggctggcgccgcctagaggccaaataggtgcagaggtttggattgctaaccggaaagaacctctccaacctgttgcttctggtccttctgtgatccgtctctgttgtgtgtatttagggtcaggtaaagctaatcagacttttcattgagcaaagtttcccaagcaagggtggagatgccacagtgacatttcaaagccagataacaatgcaatgatgggatttgggaagtttggtacaaaagaagcttctcactgggatcaaaacgtgccc

SEQ ID NO: 51770 - DNA, 795 bp, Homo sapiens
aaaggaaaagaaaagagacagaaaggtaaagcaagtttttggtgggtagtttcctagagtgaacttaagagcaaacattctctcatttggtattgaccaagacacaaagactagggagaagtcaacatttaataccagctgacaagcggctttgcttcttgctcatcagtgaattcaccatgtcctcacggcttggcttagcatgaggttgatattcccctagaatctctggatctattccctttttctacagccttctccatacttttaatattttctttcttacatggccaacttttaattaccacaggggaacagagttagtatgtattttttaaatctctgaataatccaaaacgtctgtacccagatagaagtttaggaattacaaatcaaatgagaaaaaaaaaaaaaagtatgtcattttcctttatttgccatgactgatgtcatctgacttttgagctgaatagaagtgagggggtgggggaaaacttcaacttcccaattaaaaggcaactcaattccaggatgaaacattcttttattttgtcttacccagtgtctttggggcaaattcctcatctttcaggatgcatcctccatccctgttctccttgcccggatggttcctgggtctagggttaagcttctgtgtatttgtggtggcaggacagcaggaatgagggagtgagggtgatggtccatgtgctcatctccacatccacgctattaaccaccatggacacttgaacctggagaccgttgtcggaaccagatcccacctgattcttg

SEQ ID NO: 51771 - DNA, 1098 bp, Homo sapiens
accaacactgacataaccattttctttttggtagatatatagtttgttcttgctgttttgtaatgtcaaccaatgttgtaatgaacattcctatacatgcaatttggggcccttgtgtaaatacatctgtagggcgaatatcttgtagtgaaattgctaggtcaaaaaagtgtgcattttaaatatcaataaattttgttgtcctcaaaaaggtcatctaatgttacattctcacttacattatgtgagaattcctgtttcaccaaccaggtatcattgaactttgtaatctttgcctatctgataacaagcccaggacattttgcttgtgactttaaagtgagttttaggagcttcccccttttctccaaatcaagtttattttttattttgtaatgtggattggtatatctgtcaatataggtttaggggttggggaacaattgatattttcaatgtgacaactctttttgtgaggaaactttgcacaatatctagcattcctggctcctgtccactaaaacccgctaacacctccagtcattgtgataatcaaaaaacattccacacatatccatcttaggaatgcactgcctaattgagaaacactgggctagaggtcttaatctttttactgagacttaacagtcactcatgagccatcctgaacaaatgtactggatatagccagatgtcctttgaagaagctattctgaaagttaaactctgctagagatggctgaggcaatttttaattccacaaatatgtattgcaaaaaaagagactgggctttaactattgaggtcattggcctcaggagggaaagatagacatgcagattgtagccttatgcaagtcacaacattgcccaaatgggtaggttaaaattcggatgttacaggatttgctctatctgtaaaacctctgaactaagtattggaaatgactttgtaagaatttgcaaagactagaacagaaataaaagtggtgtaaaaacatattggaccaggctggccaacatggtgaagccccgtgtctactaaaaatacaaaaatcagctgggcgtagtggcaggtgcctgtaatcccagctactca

SEQ ID NO: 51772 - DNA, 667 bp, Homo sapiens
catggagaggaagatgcaatttgagaatcaagtccactgagtgccacatttgcagaataggccaggagttttaaggagtttaaaaagaggggacatcattttcttccatcactgaagccatattctattaccttgagtatcttatctgagaccatgtatatcccactaacctaacgagaagaaggataattagatgattatctagctagacaagcatcttgaacctcaaaccattactcgtaaggtgctgtgatccaaggaaagtataattagtcaccacttagtatcacgttaagcaagccaataaactcgggggtaaggcaggtggggaataccagagcatgtttaccatttgatctgcttgttttctctccctaatgtttaatccttctgattacgtcagggagaaagactccactaggtgctcatctggttgaacagccgctgatctcttttgaacaagaagcatggggccccagtgtactagtccatttttgcattgttacaaagaaatacctgagactgggtaaattacaaagaaaagaggtgatattacataggttgagtatataacatagaaagatggattgcaccttgcaattacaataaaactagtccatgtataacatctagttataatagccacctgaaattgttatatattttc

SEQ ID NO: 51773 - DNA, 938 bp, Homo sapiens
ttgccagtagtcacctatgcctatgtctttcgtgcaaaatatttgggcagggccctcataaataatcttagcaatagttatccaacttgaactttgatgattccatgaaactgagaagctaagatcagttaatttataactggctttatggtttcaagatcactatgttctgataaatcaaagaacaactagcaagaggatagatatcttcattctgttatccctaaggaaggccatgggttaggagccccaatggccactggagaatgtgtaaattactgacaatgctattctcctttcaaaaaaaaaatacaatccaaagataagcagataaatgctgttaacttaattcaaattccaactaggacattgagtcacttccagcatgccagaaatcaggggaaagttcatgtttatctctgggttcatttccccagcatttctcattaaagaaataaaaggttgtcacaaactgctctttcaagagagaagctgtgagaagtgaatatctgctcctcagtttcagttcctctaactctggaagatcctggcacacagaagagcttcacacattttctcaatctttccttcctcagttgaatcccaaccaagtatatggatcagaaattgttgggccttttttcctaccgttcttactgactcagttaaatcactagcaactcaatcgccacacccttcatgaaagttattttgtggagcacattcctgttttgagtcttagaatttcccttatcctcttctaattttaaaaggcctttgatgccaacagaataacttagcagcaaacttcacatattcgtgaatcatggaaagaggaattgtttggttgccatccagatagttagcatccttacttcgctcttgtattagtgaagccaggctacctactggaaaaaataactaggagattttggtgt

SEQ ID NO: 51774 - DNA, 3326 bp, Homo sapiens
gatcttcctcggacacccaacgaccttaaaatccctctaaccttctttctctcaaagtttactttctataaagagctgataaactcattcatactaaagtctacagggttgtaaatcttaatctattatcgcttaaaagatgcttgtatcaatttacaccaaagggatgaagctctaattgtggggatttagtcatcagaaaatctagtaggggaaattctccctacccacaatcagagtagattctacaatagcaaaaagggttccaggctcacttaactttaggaacgctgataagaagaccgcttacagctgcggaggtactgatttggtaaagggagggaaagagattgtatacgtgagagtgaaaaaattgggtagaaaaatggaagagcatcagaaattcacttagcaacaccaaatatatttggcaccactaacctagtttctcctgtgtttgcctttccaatccgttggaccttaggggatggaccgcccactttctccccagagcggctcccgggtccggttctcagttctaatcactgccccaagcctccatgctccagggcctgtggtcacagagcaagtcccaaggagcagaagtaaagttctaagagaaatcaccatctccttgtgcagggaacactcccaagcccagtgtccacagacaaatcacctccagcgactcgaagaggagaataatccctgtgggggcactggaggctccgcgtgaaagtttccaaagccatgttctgccccaggactcctttctctcctcccagaagcttcaggctttcgcggctgctggcacatcccagcctgagtagccgagcaagagggacccaaggcaggatcagcttcccccgacttgaaagggcacccgttctgcaggtgccggcgctggaaatagctggtgtggagaacggagagggagacgtgcaggatgaagtccgcgcccaggagggcagtggctccgcctctctgggttagggacagaagaaaacccttaacccaaagccctagcatgagtgaggcgtggaaagcgagacagactccagtggaaggctgtggggcgggactcagggttcccggagaggccgccccagctcctgccgcagcgctgggcgccctaccacgcctgctccctagggaccccgggcgtcccacgcacgcacccaccctccttcccgggcctgccgctcctccctccttcctcgctggttggcccaggcgccgcagagcgcggcggcagcaggaggagccgggcgcgcctgccacgcaaaactaccgggctggcagggcggcgggcgcggtgcgcgatcccgggtggcggcggcaacggcggtggtgacggcggcgactgcagcggccggctctcacctctcccctgtgcacccgcatctcgccgcgccgccgagcagccagcagtccccgggtcgcccagcccacgcgcgcacggccgagcccagcgcacaatagcggcgacagccatggggaaaccggcgaggaaaggatgcgagtggaagcgcttcctgaagaataactgggtgttgctgtccaccgtggccgcggtggtgctaggtgagcggcgcggcgggtgggcgatgcgcgcaccctcacgcgctctctgcgcccaggccgcgtgcggctgagggtgggcttggcgctggcgcactccatgcagggtccctcgatgccccctcggccttagcctcgggccccctgcgggggctttcccccaagcgctctaattactgcacaccaagaacaaagctcctctgggactcccatttgagtgctccttgagctgctggttcctgctctacccaaaatgatcaaaggggcttgggggtagaaagggaagcaagtagctcttggttctgctcgtttgaaaacagggttcgatttttttctttgttaatcccgcaccgtatctccccctatcaccgccaccttcctcaccccacacccccagcctcgctgcgcgggcagagattgagtgtggattacagttctcagtcgaattggaagaggcaccctggcctccgggatgggccggacccttaggggagggaggctgagaacgctgtcgccgctcatcctgggcagtgcgtggaaaggtgccttcccacgcggcgagcgccgactgcctgcacccgggctctgaaaagctgccagattcgtgcctgaattctgggatgtgccactgtggcccgcgggaggtcaccggggaagagagctaagagaactcagccgtctcttctcctgccttccttgctctccacgttgtttttgtatttaagataatgtttaagccatccttgcctgtttttaaacaagggtgtatttaagtgatccacccctcacagatcactggaccaggtggatgtctgagccattgctcagaggtatgagttattcctatttagattctgattttttaccaaggttgtgtgtttctagctccggcccggggatgcacttccttgggattagcgccatatctgtcgccttcccagtgatagctcctcagcaggtgagggctgttgcaccctctgaggaatgtggattcctcggcaggctccaccttccccttggaaactgcagctgtgtttgctgaaaaggcaagtggggacagcttgtttcctcccaacctcaggtaccttcctctccaactgctgctcctaaatctcagaatatatggtgttgcttgcttctcctccgaaccgccccctcccctcagggtggggatagggcatggaaatggcctttggaagttaatgggattcttggggtcagattggattctccagaaccttggggaaaggaaagtcaggtttctagtaaataaataacatcctggaatggccctagcagaggctatttgtaggaggaaaggagagaagtacagaagcaaatcttgactatttcccccaagaagtgccaagtggttttggaacttttttttttcggttttgaacatttttaagggaaagtttatcctactctaccatatttaaatagcatacgctacaaagaacgacttgatttcctttaggccaaagagaagagatggccttgtttgttttcctagtgataagagtcgaggattaattgttaaatctctttttgaagactgagagatgccagggcaaggtggctcatgcctataaccccagttactcgggaggctgaggcaggagaattgcttgaacccagaaggcagaggttgaagtcagccaagattgtgccactgcactcccgcctgggtgacagagcaagaatccaccaaaaaaaaaaaaaaaaaaaggaaaaggactttt

SEQ ID NO: 51775 - DNA, 762 bp, Homo sapiens
ctagcctaagtcatcccaaacatacttaactcctggaatggggaccccagaagaagagcaagtctggttgctaacagttttgaagccattttattgtgagcactgcatgaccctgaagctcccagactggagagcatctctgtaccctaaggaagatctgatcttctcaagaaaccagcaccagaacccacctgatctccagataattctctgggctaattagagaaaatggaagatccatctctttttccataattgggctacagcttggcactgaatcaaccctggatggtagagccttttcagctacggtatttagcaactcttacaccattcattgaatttatttctggattttccccctccaagtgtcctttcacatccttatccaaattctgcccacttctctccctgtctggagattatttctatgataagaaattaattagcctgtctgtactacctgttccaggagactttgaacaactgcgtgggtaaacactagatgtggtcaccaaagagtcggaaaataagtttttactttttcattagcaaaagttaattgtcaaccaggagatgtaacaggcttgctccatttctgctgccgcttcttggatttctttcttgcatgtggagaatttcctgaggtttcaccagactgaagagattctgagttcttgaagtgatggagataaagatcttgttgtcataaaacagcaaagagcactgtgattgggtttgaaagatttttgattgtgttat

SEQ ID NO: 51776 - DNA, 4418 bp, Homo sapiens
caggagaatggcgtgaacccgggaggtggaccttgcaagtgagccaaagtggcgccactgcactccagcctgggtgacacagcaagactctgtctcaaaaaagaaaaaaaaaaatagattccaagagtaaacaaaatcctcaagtgttactgtgcaaagattatactcaccatgtttgatttttttggtctctggtggtcatcccagatgcattcacagtcatttctggacctttaatgtaatccactgttgttattaaatgagctgatccacatggagttactttttgaaatcatgaagttccttatgaatgtttgttattgtgtcttaaattctttaaattcttaaaatatgtcttaactcacttaaagataaaagtaaatgtttctgtggtccttctgggagtggggaaagttacaactccacaaatgttaagagagaagggtgaacagttagcagtcaggcagcatggttgggagtcatgaggaagagcattcaagatgacacaagttttgtaagcagacctaaggaacgggctgaagaatgttgtggagacccaggtacttcgacttagcattctgagttcagagttcgcccaggagttccaggcttgtggcaggtttagaaaatccaggatgatcggccaccttctttctcccagaggtcgatctgatcttaagttgtacctgactaaaacctgctgcaggagagatggtcagattttatttacacacagggagatggcttcctaagattgtgtagtgaaccaagaaggtgtttacaggcatgtgaaactggctattgtaaagaggcagtgatctgggacacgtgatgttagttaaagtggaggaaaaggtgtacccttcaagcagaggattccagggcctctccaaaccgtacaagtctgagccaagggacagaaattccatcagtggcttggaagccaaatatttgccctgatactgaggaagggaaagagtggaacgtgaccgtgggatagataaagggtcttcacaggaatgcaaacaagatgataggtagaatcacccatgagattagcaaacaaatcactttaagaggaaaaaagtagaataaagagagtcaaccacaggtagaaaatgcaagactttggaatccacaagtcatagatatgtatctcgggaaataatccaagcacacatgcatggtactgatacacctgtgggagagtgagagtctggttgtcccgagactgatagattcacccacctgctgggctctaagccagttggatatttgctcgagagactagattcctgtgggctggtcctaactttcccaactaagctcaccctcacttgagcccaaaggactcctaagactccatccccaggaggcatccccaggtgaggagctgggcacttgaattgtcatgtgtacagcaccatagccattgtaaaaggagaacatctcacaagtcaggagttactggagagactgtttatgacacacttctgggttcgatggccctgagacaataaattcatccacattcctgtggcccagttttcatgctttgctcatgacatcctccctcagtgattttctcctgcctttcataatcaggtttgatgagcaaaggttagaaagtgcagtggcttcctgggcatgtgcattaaatagcaattaaaatgcagtcctggttcggctcaatgcagcaggtgtcaatcaaacacctacagtgtgtcaagcttgatgccggggcggtggggtacaggaatgagcagacaaatgcttctgccttgggagcttgagatgaaagggaaggagagcacgaattagacctgtttgagggggtaatagaaattcagataaaactgagtagggtccagaggagagattctttccacctgagaagacagcctaggaaaggctttctggaggaggtggctttttaactaggctttaaggggtgggtaggagtttattaggcagagatagtggcaaagggctttcaagggagggcgatctgtgtgaacaagagtgtgaaagcaaaaaagcatgtaaacaaaaaagcatggagcatctttaagaaatagcaaggagtttgctgtgactggatctgctgggattggggggtgagaaggacatgcaggcctgtattggttagggacctggcaggaagcagactcaaaagagtttcactgagcagaattgaatcaagggactatttatagagttcagcagggtaaaaggaatcagcaagggatggtgaggcacccagggatgaataactgggaagctattagctcatctaggcctgaacagacaagagagggtgatggggtttccacagtacagtgagggctgagttgtggcagggaaccaaaaggcagggcctatgtggctgcagaagaacaggggaagggagggcgggagaaaataaaaaaaaaaacccaacctctgtctctttctaccattaagatctacagctactgcctctcatttgctaaacccagccaaaaccagaggcaaggaaccctggatcagccctcccagtgcacagagcaggacaaagaaagacagagggtgaatcggagggcaaatggagagtgactagcacagagccatatggcatgaggtgccatgctgaaaggttttctcgggacatcaagaagtgttgaaaagatacaaagtctaggaatgatggcagggaaattattatttatttactgagatggaatcttgctctgtcccccaggctggagtgcagtggtatgatctcagctcactgcaacctctgcctcccaggttcaagcaattctcttgcctcggccttccaagtagctgggattacaggcatgtgccaccatgcctggctaattttttcatttttagtagaaatggggttttgctgtgttggccaggctggtttcaaactcctgacctcaagtgatccgcccaccttggcctcccaaagtgctgggattacaggcatgagccactacgcccagtctattttgataacatctggtgatactggtggctgttgcttaagggcattatgggaaatgagaggtaagaatggcttccacagcctctagctatataccagcaggaccatctcctgctgttcacacaagcctagccctaggcctctacatctagaaagcattgcccgtgcatctaccagcctttcttccatgcaaggagggcaaatgtggctggcggagaaggcacctagaataccagtggcagcttctctgtctccccactataatttaggactcttctaattgtaagcaacagaaaatccagttcaaacaggcttaatccagaaaggtgtaaggaggcgggggtgacatataaaatttatggctcagataccataagagtctagaaacagtacctggcttccagtacaggggtttaatatcatctggacctgttgtctccttacatacagtctctttacacctgtgtcattttcactcccaagcaagactcttccctggtgttgatacagctgccagcacaggtcaaggtttctttttcccagttccacacccagcaggagagataaagtttctgatccctattagttcaaacaagactccatggccttagccttaggctaactcagccctgagtcagagctccattcctcaatatagtcttgggaccaaaggaacatggtgatctgattggctagaccagggtccctccctcatcctaccatgttcccccaagcttctggactacttagggcttcagctccaccgtaaacaaattgagagttagaaggtatgctgttcactgcagggacaagggatactgtcccttagcaagagcaacagacctgccttttatctgttatgttcttgagctatttcctgaaagcaatcaatacaacactcataagttaaattttattgaattcatagttacaaaagccaggaagtcgtttagttattaaccacatggtttgaaattgatggaattgagacagaaatcactttaaaaactgagagagggtgtcatagtctgttctggctgctgtaacaacatcccacagactacgtagcttataaacaacagacatttatttcttatagttctggaggccaggatgtccaagatcaaggtgccattagattccgtgtctgctgagggcccacctcctggctcatgaatgatgccttctagctgtttcctcacacagtggaagtggcaaggcagctctctgggactctttcaaaaaggcactaatcccattcaggagggctctcccctcacgacctaatcacctctcaagggccccaccttctaacaccatcacattgatgattaggtttcaaaatatgaatttgaaggaggacatacacattcataccatagcagaggagaagaaaaattaagcatgttttgccttaaactct

SEQ ID NO: 51777 - DNA, 2480 bp, Homo sapiens
acagggacagaacagcacctccagtcccgctcccagaggtcccctgagcatccttcccggatgctcataactttgctcaggaagaggttgcagctcttccactttagcctctgccacccccgcctgggccagaagcactccagtgggcacagctgcgcctcctggtgtctgctgtggctgccactaccccggtgacctaaggagttccgctctttgctcctccatcctaagacaggagcagaagcttaattctccaaagtgcagctgagaccacacttctactcaggacataatctttgctaaaggtaaccaaaagcagatgaaacaccaatggtgacatccaactgctccctgaaggggctcccagggcctcttaacagggatgcccctctgcttagctgcttgcctccaggaggctagagttcatctctaaaggtgttccaagctttcctgcaccccagatcccagaacctgacaccaagttctaagaaggaaaaattccgctatcacacaggccatcctgtcctgacctggagtgacctcttcctgggatgcttgccattgtggaatatccacttcagagaaaacccccctcacggccacagggggatagcctttcctcgtggaccccatcaggagccttccatagactccataccatagtacctgctgggttattgcaaccaccctgcttgtagaacctgggagtctgtccaggtcaggctgggccaagtccatgccagttcctgtgcacatttcttcctccagagcaaggagttgctcattcctaacccttcctgtgatgtcgcagctctggatttcctaaaaacgcctgctcaaacaagggcacacacagctcctcaagaaacagcaccagtttgcagctcagtggatgtcaagccaagcagatatcaagccaagaaaactccctcctttccctcctctctcccccaggccactgagtgtgagtcctagtactgattctgcttcctggacaagtcacattattaaacactagacgtcaggagaaaatatttgcgttttgtttatcaatgactttcagtttccaccagacactggttgggtgactggatttacaattgaggatcttctccaaagataaatttaacactctacccttggaagatttaaaaaacaaaaaatgctccagacttttagatgattgttactccagctttcatgttaggatttcaaaatttttagggcttgacctcaaccataggatcagaggttttctactactttttgttgggaaagggtgggaagacagggtctcattctatggcccaagctggaatgcagtggtaccagtatagctcactgtagtcttgaactcctggactcaagccatccttccacctaagccttcctagtggctgggactacgggtggcccacaccaccatgcctggctaattcttacttttgtcgcgatagggtcttgatatattgccagggctggtctcaaactcctggcctcaagtgagcctcccaccttggcttcccaaactgctgtgattacaggaatgagccaccacacctgccctactttttaaccaagtaaaaaagtttaaagccttataaaaccttaggtatattcagtatttattaaacaacagccagatgtagaatgcatatgtgagttggttgcctttcaagcaaggatttttctatgaagggcccaatagtaaatattctaggttttacaggtcctgtgtattttgcccaactacccaactctgtttgtcatgggaaagcagccacagaccgtatgtaaatgattgagggtgactgtgtgccaatgaaacattcatttacaaaaacaggaggccagccaggagctgacccctgcccagctagactctgacactccagatgcaatctagttgaggttgaatccaggtaacaaaataaactaccacatcaggcaaggagtatgaatgcactgaagagactgaagaatagagggtgagcagaataaagtgcagttggtgatagttttagagcaccttatttgtaaactcaggctttacagcagatgacacacttaaatctttggggctgaggaaggcttttttttaaaggctatgtattcatttactcagaggcagctgtgtatctggaaacaatcccacatcctcctatgaaaagaaccatgccacgtgcctccccgagacaaggttcagttttattcagctaacatttgttaactccagctgcatgaaaacagactaacagaaaaccaggtataagagggtgaggccctaccactcacatggtcatggagctgaggtcatctgatagtcaggtccaggagtccctcgttagcaagaattgcaagacttgaagacgcatatcactttgttgtacaacttgctattaaatgtaagctactgttcataaacataggtggctaagagcatttaatgtcaattttagctacgagggaggagtatgcat

SEQ ID NO: 51778 - DNA, 671 bp, Homo sapiens
attttgcatgctcctctttgcctcttcctttccctttgaacatccagggagtactaatcaaggctgcagagatttccctatgccctggattaacaaagtaagatcatatcctgccttgttttctctggggaataaaagaaacattttggaatttaaaaatcatgaacctgtttatttaatcctcatagcagccctatgaagtcatcaagtaggtgggaccttaactccatctttagagataaggaaacaggaggttgaagacagattaagccactttttcaagatcacacagatcataagggcagcagctggaactggcaagttttgttctggcaacactctgctgccaaggggccagagcctgggagagggatccagggcagtcagccatacttaaatacctgttagtcattcaatcagcatgtttactgagcatctcctatgtgctgggcactgagtatacattcgtgaacaagcagatagctaggtctcctgccttcatggagcttaaaacctagcaagaaagagatataaaataatgaaccaatgataaaaattgttgagatatgatatgcacaggatgccaagcaaggaaatcaggacaccctggtttagggtggataatcagggaaggattctgaggaaaggacttaaaagccaaatgaagagtg

SEQ ID NO: 51779 - DNA, 591 bp, Homo sapiens
cattcttgtgtcccagcctaaacataaattctagggataaaatcagagtttgttaactaacaatgttctaatacaatgcattttttaaatcctccccaaccctaaatcgcaaagtatttctgttggctgaagacaagtgcaaaatacaccatttggcacaccagctggggaactatcccaatgctgtgtaatctataaaaagtgttagcggctaaagaagcctgtgccaaagagattgagcaaagtcctgtaattataacagcagagggtatgtcaaaattgaaaccttgaatcatgcctgaaaaagtttctgctccacaaccacccctgtgcttccaacagttgttacttttacatttccaagggttttttcccacttccctcaccctgggctgtggaacccagtcttcactgaactgatttccaaggagtggtttatgaagtgcctattcttttgtgtatttgacactttgtgatgaaatccctccctcttttttggttgtaagttttctagatctttctaatcatttttttaatctcactgccagaggaatgaactctgggcctagaagctaaatagtcaattctcat

SEQ ID NO: 51780 - DNA, 831 bp, Homo sapiens
cccaaatgaggtggcacccttcttgcaaagatatcctatcattgagtcaagatttggttctttctagtgatgctggtggatttgcatttttctcctttccctgagtcttcctggaaccagttaccttccctgccaagatacccagatgagtcaaaggtccaattggaggtatgggataaaaagacactagggccagttcaatccctggacttgttctaaataacagaagggcatccagggtggtcatgtgtaagcattgtcagccttttctgttctgcaggtgtagttttcacaagattccccctgcatgcagttcctgtcaacaaagtgccagtatcaaaatggatcctctcctctgcagtgtgccttctctacctgtcttcctgccaccagtctcttccccaggctctctggaaattaagactggatgagggtggcccacagagaaatccattcctgggctgacctgtgttttctgaccccgtgctctgcaccatgcctcctggtttgctcataagtagagtgacctagattggtaaataaacaagtacaccatggacctgaacaaacacatacataccccacatgcacatggtacatactccacccacaaaacacccaagttctctgacctttgcccaaagagagcccacaatggcatttgcattgaatctagaaaatcccaagatagaggttagggctgaaaaacttactgaattctgaacctccctcagtcccccaaaaaatatctggaacgactctattcatgtttctttgggagaagaggaaggaatttagggagacttaggggagtcattgctactttggggg

SEQ ID NO: 51781 - DNA, 950 bp, Homo sapiens
caaatcctgcctggtcctaaagacatccgagtttgcaacaccttttgggaatcacacttgaaatatctcgtttaaggtctcattgccccagtaagtatggaaacttcaagagggcacgggttgaattttacaccccttagtgtgacccctcccgaccccacagggtcctgcgcaatactgagcacacagaaggagtttaacaaatacaagttgagtgggtccatgcgaggctgtgggatcaattttgttaactgcagggctgggaggagacccagtgaacaaaggacgtcatcctatcccttaagcaacaacaaatgagctttcataatgaagagttcccaccatgaatgcaacgcttccagcaataacacctactgccactgcctacggtctgttcctggaagtcatcccaataaaacaagtatgatgtttatctcagttcaaaattccaatttcagtgagtgtccgttcctggagaaaaaggaacaggaaagtttatttgggggtggtggggaggaggggacttcctaaaaatgccgtttacaaacataacatttcaatgacaggaaatacgagcagaaagcctctcttgttggcctaaacaagaagtggttaattgttccaacttctgtcaagagaccttagttgctctgttattctgaaatgttctgagttcatgtttttcaaaccctttaagttgaattatctgtgatgcctcagggccaaccaggtggcagcaaaggggtgacaggaagtggtacagagaacctgaggtttggaaacaagacagagcagggtttgcaaactggctctgacgcttgcttttctgagcctcagtgtccttagcaagaaatagggggagcaatgctttcctcaaaaaattaaatgagatgagaataagaatagctaatgctcactgagtgctcattttgtgccaggcactgatttaa

SEQ ID NO: 51782 - DNA, 536 bp, Homo sapiens
tggaaagaccctagttagagatcagctggcagtttctgataggtaaagtctctagctaaagattagttggcagtttcttattggtaaaatctctagttagaggttcattggtggcatctgtttggtaaatgactctagttttactgtttacattgggcttcagtttgcttacctaggaatttaaagcactggagccgccccagcctaatgacttcccccacccccaatttttttaacagtacacacacagagtgaatgccgtgtaaatattggaattacactgccacaagccaaggaactataccagaaactaggagagaggcctggaataggtccttccctagtgcctttaaaaggaatatgtccctgctcacactctgatttcaagaattgtagcctccagaacagtgagatgatatgtttctgttgtttaagccactctatttgtggtacttttgtatagcagctctaggaaactaatatatccatatctaaggattttctcaagtatgatcttggggagtaaataatcaaca

SEQ ID NO: 51783 - DNA, 3144 bp, Homo sapiens
cccagatctccctcaatgacattgtttggggcaaaatcattagacttattaaggttaaaattgattccatctccaaattccaaaacaaaaatgttaagagattgtcagtgatgacatagtaataacatcaatattctatgaatagtttagtgtgaagaaggctggtaatgttttgactatttatatcaccatgttattcaccagaatggaatctagcctttatcactgtagctaaataatctaggtatgatctgaggaaacagtaaatctgaacagcctttttgttacaggattttagttacaggatttaactaatttcattatttttttttcgctatttttcttggtctaacacagttttttctaaggtccacagtttattaataatccctttcgtaaatgtaatgcaattacctctaacacctccaaaaacattcagaaatgctctctttgctccagttaaaaaaatgccatgggagttccaagaataggaaacatcaaccagggtatttagcactagattgacagaacttggctcagacctgcattacaaaagcaagtgttccgactgcggttttgcattgtgctgaagtgctttcggataatttttttaaaaatgaaatttaccaaataatgctgtaagaactctgttctttataagaactctcaggttatcttcagacaacaaaagccaatgagaaagtcaagatcaccttttcaaatctcatgctctcctgaatcataatggggaacgcagagggaaagctgttggtctccaggtactgattcatgaggtagaccccgaggtacacatcttgtttgccaggcaggaacactcctgggcaagaaatcttaaaaagaaagaaaacaacaaacaagggagagaaaacagactttgctttgttttgttacacggggctctatttctcttaagctcctacagacactgacattttccccatcacctcactccctcacctgtacctcccaacgccaacatcctcccctctgctctcctcacattggaaattccaactccctcccacgtctccaccaggtgtcacaatcgcgctctcgccggctcctctccccgcccctccgggatggtagtgcggaagcggaagaggctgcagggccgggaagcctctgtttggtccggccaggtcccgggatccgggccgccagctgcgatgccaagtccccggaggagcatggagggacggccgctgggcgtctccgcttcgagcagcagcagcagccccggcagcccagcccatggcggcggtggcggcggcagcaggtttgagttccagtccctgctcagcagccgcgccacggccgtggaccccacctgcgcccggctccgtgcatcggagagcccagttcaccgccgcggctccttccccctggccgcggcgggcccctcgcagtcgcccgcgcctccgctgcccgaggaggaccgcatggacttgaacccgtccttcctgggcatcgccctgcgctccctgctggccatcgacctgtggctgtccaagaagctgggggtgtgcgcgggagagagctcgtcgtggggcagcgtgcgaccccttatgaagctgctggagatctcgggacacggcatcccctggctgctgggcaccctctactgcctgtgcaggagcgacagctgggccgggcgcgaggtgctgatgaacctgctcttcgccctgctgttggacctgctgctggtggccttgatcaaagggctggtccgcaggcgccgcccggcccacaaccagatggacatgtttgtcactctctcggtggacaagtactccttcccctcgggccatgccacaagggccgccctgatgtcgaggttcatcctgaaccacctggtgctggccattccactgagggtgctggtggttctgtgggccttcgtcttgggcctatccagggtcatgctggggcggcacaatgtcaccgacgtagcttttggcttttttctgggctacatgcagtacagcatcgtggactattgctggctctcaccccataatgctccggtcctctttttactgtggagtcaacgatgacaccatctcattgattatggcaccaggaagtctgaaggtttccacattcgatgatgtcaacctaaaccagcagccatcccgcttgtccctcttaggcatttcaggcttcctttgggatttcaggtgtcccatgatcttgatgtgctgctaggctggagcacacactggccattactgaacacagccatattagggaaagcaaaaaaacccaaaaaatcctctattgtatatttattcaacaactgtttatgtttccaggacaactgcaaagaaaacaagctgaggtggttatactgttgctgttaaaagttggtatcagtaagatttgtgttttgtgataatccctaaatcaacataccacttgtaaactgaacttcgagaaagaaacatgatgttcattctgtaaatatacatgcagacaggtcatgtactaatcctagtccttttcctgaggtagattttaaacagtatttttaaagtccaagacataggtttttctagtttattccctgaagatctgttgccacagttgggagatttcttcttaatcctgattttcttggtaagcttttttactttattatctctataatttattatctctatccatatttgtggatcgggtagtgggaaaagagattataatacttgtctttctctcctctccctccatccctcaaaagatctttatgcatttcccactactcccttactgtcttttagcattcagagaaaaagccaacttgcttaaagaggaatcacttaaaaggtaggcatatctaagatgctcatagaagaggaagaatgggacatggccccatgcttatttttgtttacaacgtaacatggcatgagagagggcagagaaactaagttgctggggaaagttagaggaactgaaagtttgggaataggctgaccacatattatgccagtgaccagtatgacaggagatggggccctgctgccagtcatctccactgaataaagaataatgctcctctttcagggtaataaagtggggaaaaggaacgtcttctcaatgcaagaacataagctttctcgt

SEQ ID NO: 51784 - DNA, 1915 bp, Homo sapiens
gagggagacagatttatcacttagcttctcaagagttccttcttcctgcacaatttttagagcttaaaactggtatagcactactaataaggtctagccctatttgctgtcagcaaagtgggacaaatccaggaaatgttgatcacctttcacacccacatgtatgatgaaaccacaccatttgccaattgtatggaagacaaccagattccatgacaatttcctgttagcactgtgcttgtaatcatagccagtagaaaagcccctagaggaaaagcggcatgatattctgttactaactacatggaaggattggaaaatggaaactgaaataagagggagtgacagacccccaagtagaaaccatggagtcactctgccacagcacttcacttaggaaggatttggtaattacgaaatagtgattgattgatttcccttttggaattagcaagccagagctatcactaaggggaaatatcatagaaaatatctgattggttcatagagttggcaaataatcaggaagtgatggagctttttaaaattattccctggttatttaaagaagttgaaaatcctttcacaaatctttatccaggagaagaaaataaattctacctggacttaatgcagggttgtttgaaaagaaattaaaaattcatgataaagataagaaacatgttagctttagaacagaaaaaaaaaaaagtgggaacaggtggagctgaattaaaggttaggaagtcagggaaaaccaatatggagaaaaagacaaaggtgcgatctgtcccagaagataatgatgtgtttgtggtaagtgggggatgtgggggagggttgttgaaaaccacctgagactatttagagtccgacttgaggttaaggagggggagttcatcgatctcttaccgcccggatctgcagctccaccaccacctccagaggcatcgttccctgcgtgggcgaaaggactggaatgagaagatccttttgtgccgagccttggaccaatttttcttagtttagctgaatacctagagcaaatgttcccagaagcttccccagtcccacgcccttgttcccctaccgtcccccccagcccaggtccctcccaccgggacgggtctctcacactcgaagctggagtgcaggcttccagaaggcggaagcgtggcgttgccagggacactcaaacgcgcagtcttcatcgtggaacgcgcgcgaggccccagcgcagacgcgcgccctcacggtcgctgttgcccacgcagtgcccccagccggagagactggccctgtctggcgtgctagacggatagagaaatgctaacaatcccgatcttctttccatcagctcctgctatccccaattaccatgtcagaatgtttaccgttttcattctgaaagtagaatgagatcataggtctgttataatttaaatagtacacgtttagtagctgcacgaccccaagccttgtagtttctgtaacaattctcatttaatatagttgcctgttcctaaaaatactcttttgcttattaaatgttatgtttgcttcggaaaacatggccaccgtcaataacaaacgtgtgctaattagaaatataaggttaattcttaaacatatttaaaagttaggtatcccctgttagcagcaatagaaatatgtcagtctttccataacggtgtccagccttttctggggtttagtttaaggcaagcattgagtagtccaatgggtagttattgcatttgccaaaaccacagttactgtaaacactgtcagaggtggtgcgcagagcaagagttctgaatgagtaggggacattcactacatctaatagagaaaaatgaaggaaaggagcaggtagtggctccttctagcaatccaaaaaatctaggaaggccaa

SEQ ID NO: 51785 - DNA, 4673 bp, Homo sapiens
tgggatcattctttttgttacatacacaataaatgtccttatagtttaggtttcttttagctgaggtttcagttatttgcattgaaagcatataattgatatagcaggggtgagacatgatatgatttatgtattttttaaaaatctctctggcaacagtatgaagagattgtaaggagcaagaatggaacagaagcatggaagactactgcagtagttctgagaagcaatcatagtgttctggcctagggagtatgcagtaaagcaggaaagaacatagattcaagatgtatttgggggtaaaaacagtaggacttgctgttggtatgagaggtaaaggagagggaggaactaaggctgaactctaggttttggactggatggtgatgccattgattgacacggagaagacccaaagaagtttggggaaggcggtgagatcaagggtttggatgtgttaaatttaagatgtgtatgaaccattaaaatgagatgacaaatcagcgggtagacatgagtctggagcacaggggtaaggtcaggacttggatttcaatttgagaattatagatacacagatgttatttaaagccacaggaataaacaggattctcctcactggccaaaatatgaggaactctaaagttagaggtcagctagaagggaagaagactgaggagaagtagtgaaagaggtaggagaaaaactaacagcattagcgtttatatagggcttactttatgccaggcactattcaaagcactttgtggcttcatggaagcaaagagaaaaatgtttttcttttcttcctccctttccagtctctcctgtgactttcacccctaaattcaaaaggtttaggtgcaaaagtgattctcagcttttatttgtaattaattttatagtaatcttgtactgttataatcttgtactgttataatactataattatagtatacattcattggaaaaatattcaaacagcacagtacagggaagctaaatgtggaaagtaaagatcctcagaagctttccttcctaggctcacccaccagaggtaatcattaacagtttcttgcatatcctccaggaatgttctgcgcaaacacacacacacacacacacacacacacacacacacacggacgcaaacaaataccatccctctctcttctctctctgtatacgtacgcatatgtttaattctgcaagttgctttgtttaaaactcaataccttttggaggtatttatatatcagcatattcagatacaatttactttttttaaaaagggtaatatgccattgtattaatattccatactttaagttcctctatcgatggacaattagaatgcttttttttttcttgccacacacacacaaaaattgctgccagaaatctttgtagtaaatctttggatattggtgcaaaaataattgttgcatactttcttagtggtgaaattgctgaatcaatccgctcaagcctctcatattgtcaaattactcctcctaaaaggttatactaatgacattctcacatcatttccttacatcttggtacacatttggtattaagcgacttcacaagtttgccagtctaaacacatggaaaaaaatggcgtcatgttgtttttatttgggtctctttatgagtagggcagcaagacctgattgttaaacgttcaagttttgaagttaaactccctgggtctggatcctacttcttccttgtaaaatgtgtgatctcgggcatgctgggtctacttcctcgtctcaaaaaaagaggataaagagagtacatatctttaggcttaaacaagatacgcaggcatacaggaagcccttcttatgcgttcgctactagcggtactgatcctaatttttttgaagccgtgccggctccggtactttatttttggtgtgctcctccaaccaaccaagtttcgcagaattctgttgttgcctgtaattagaaatgagacgaaaattggctccgcttgttcaaaattctcctccctccgccccaactctgccttagaatcactggtttaaatgtcaatgtaaaggaatgagttgcaatttttaagcaacatgtaaagtgcacacctggtctgagtacctcccggcggccaggacccgccgttttcggtatagggaacaccagataacaatatataacgctacctaacaaacgtttctccacccacagcgccattagcggttaggtttgcagtgccgaagagctgcaagaaaacggggcttgaaacaggaatacaattgcagatccacccactacacgcaaagggcccgggacgcgcctccacagccccgccccaaccggaagtgacgcaccgcgccgactatttcttccgccgtccgccggtggcgaggcccaggctgtcgccgggtgtgcagcggcgtcgcggccagtagagggattctgggtaacggcccggacccccggctgggcttctggctcggcgcagcaggttccattcacgccaagtctgttggcagtggcagttgtagggccaagggcggttgtaggacccggagcagccggacatggaacaaccgtggccgcctccgggaccctggagcctccctcgggccgagggtgaggctgaggaagagagtgacttcgacgtgttccccagttctccccgctgcccgcagctgccaggcggcggcgcccaggtgagaaggggcctgcgttctgcggagggatggagtggtgctgtcgccaaacccctggaatgccgcgtctcccagaccctcttctacgcctttttctacgcccacctcactgccaggggccggggacctgggacctgacgcctgatgccatcccaccccttttatggcatcttcggagggcagacggggtggccatatattaccaacctccacctccacgcacatgttttctttcgccttggctgattcctgttcactcttggaataccttcctccatctccccttcctgacagcactcagatttggggcggctcatgctgtaacattgaccctttgtcctcttgtgagaggttttccccaagcactttattctgttaaaggctctagcatacttgtgcacagttgctaggaacagtgaatgattgtagttcagcatcacactgagtcctgacaaagatttcacatgcgattttcaccgatgttgacaactgagtaaattctttaaatctcgcttttgacgctggcgtacacctctcccattcgcgtgaccatctttgccttactgttttgttttttagttttgcttcacgtcattctccagtgaaaatatatacgcatatacttgtgttttccttcagacttctcttaggttcctggtattgtgttttcaatccagcattcctgccttcctgcgactgaaacgtatccaaatgtgatatactattaaggatttttcagggacctatcttaggggatacttacatactcgcatcaccttgtcctgtttttttctccgaatccgtgtgtgttttggaagtatatttcagaatcacagactaaacactaatatattcaatggatcataagtgtctgccgccttcttgcaaaatggggttcccaagagtgtaacagatttaatagtagttttcctctcaacttattttgctagatgttaatgagaatgagttaaattgcttaccagtaagcgtgacattatcaatcttatgtccagctaacagggttagttggcttcacacagagaaaaatgctgtttcataaccactgtctgtactttggccagctaagtcactggggaactacaagacattttttaggaggacagaatgagagttgatgggtccatcattagtcacccactaattttggatcactagtgtcatctttatatacaaaatgtattataagcacatgatgtgctagggaggaaagaagaatgaacagcagatgccattgtcaattttgaaggcatatgaagagaaaaaagggtgtcaagaatttcagtgcattgtggttgaattacagaagtaatctagagaaatatctgtatgttaatttcttacttgtgcacttctaaatttgtttagctggaagagattttagaagtgagtaagcttatctctctcattaaaagtgttttccctgaggccatgtaactagttagtggccaggttaaaactagaacccacttatgactcctagtccagtatattttcccacctactgcactgcccaccagagttcgagaccagcctgaccaacatggagaaaccctgtctctaccaaaaatacaaaatcagcctggtgtggtggcgcatgcctgtgatcccagctactcgggaggctgaggcaggagaattgttggaggcaaaggttacagtgagccgagatcacaccattgcattccagcctgggcaacaagagcgaaactcttgtctcaaaaaaaaaaattttttttgcaaactgattattaattctgagttcatgtgtttattacaaacctacttattggtcttactggctttaagacttaaatttttggattggaatatttggaaaaaataaaatgtttaattgattaacattttataatcctaaaaaaagctttggcttaattttatcaaataagggggatctagacttcttaatgtagtatgtgatatgtagttctt

SEQ ID NO: 51786 - DNA, 617 bp, Homo sapiens
acatatacaattagaagttaaaaggaagtataccaaaagtttaactttggttatacttgtgtggtgaaattataaataatttccgttttctttttcatgtactacaatgaacatttcctattataaacataaaattatatttttatattaaaaaaaaactctcaatgtggcagtagtcctaacttaaataccctaaactcttctgaaatgcaaccaaaatatgaaattttcctgaaacagttgaactttaatagcaaatgcttgacttgatattttagctaggctgcttctggtgactagtctaaacttttgtttgtttttagagataaggtcctgctctgtcactcaggctagagtgcagtggtgcaatcattgctcactgcagccttgaacttctgggctcaagcaatcctcctgcctcagattcccaggtagctgggactataggcacatgccaccatccccagctaattttttgtagagacacggtctcactgtgttgcccaggctggtctcgaacttctgggctcaagctgtcctcctgccttaaccttccaaaatactgggattacagacatgagccaccacacccggtctcttctaaatttttacttgac

SEQ ID NO: 51787 - DNA, 3745 bp, Homo sapiens
agtgtagtagcacaatctcggctcatgacaacctctgcatcccgggctcaagtgatactcccacctcagcctccagagaagctgggaccacaggcgcgagccaccatgcccagctaattttttgtatttttggtagagacgggggtttcgtcatgttgcctaggctggtcttgaattcctgacctcaagtgacctgcccgactcagcccccaaagtgctgggattacaagcatgagccattgcgccaggcctactctcctagactttggttaacctgaccccaaccagtagcagtatctgggactgtttaatgttacctaactacttcagtatgtcgcattaacaacatttagcaagcaagtcaaacaatctctgttctttctttcttttttttcgagatggggtcttgctcaggctggagtgcagcgttgcaatctcgactcacagcaacctccgcctcccaggttcaagcgattctctctcctcagcctcccgagtagctaggatcacaggtgcctgccactgcgcctcgctaattgtttttgaattttttatagagacgcagtttcaccaagtagcccaggctggtctagaactgctaaggtcaagtgatccgcccgccttgacctcacaaagtgctgggattacaagtgtgaactggttaaataaatcatactagattcagaaaatacatactacaaaaacagaatgaaatggatttgtccgttttcatgtgaaatatatcccagacacaaagtgaaaccacactagtgcagagtatatacacatagtatgctcacatattacatacaagaaaagatacacgttggccgggcgcggtggctcacgcctgtaatccgagcactttggaaggccgagccgggtggatcacgaggtcaggagatggggaccagcctggctaacacagtgaaaccccatcgctactaaaaatacaaaaaattagcccggcgtggtggcatgcgcctgtagtcccagctactagggaggctgagacaggagaattgcttgaacccaggaggcagacagagcaagactccgtctcaaaaaacaaacaaaccaaaaagaaaaaaagaaaaaaggtacacgtatctgcgcttaaaaagtaaacctttctagaaggaaaactctgttcccctccgaagaatgggactgaggtagggaacgaaagagggcgttgttttttatgctatgcacgtctatcctgtttgctatccttacaaaaaaaaaaaaaaaaagaaggaaaacaaaagaaaaaggccttgtggaagcattatttctatgtaaatgggtttcaaaatgagtttcaaaacgggttctattttgaaaagtaaggtcaacattttttgagaaaaaaactcctgcgattggcttttcaaaaacaaccctcttaagagagaatttacataccacaaattcacccattgtatagtgtagattgttaactgcctttcgtgccgagctgtaagaatttatttggcatgagaaacaaaatattttatagaaccatgcacaagaatagccttcgtgtctacgaaatctaaggatatcaaaatgagataattttatgactgcaacaagggtaaataatacttggccttgggaatatgggggaaaggtcagaactacaagatctcatagagcttaaccacaccaaaaaagaaagagaaaagaaagaaacaaagaaaacaaaacagaacgagcagactctagcagggctaatgacagtcttccaaaggcaccagcacgttgaacaagctgcggctcagctcgatggacccccaagagtggctgccactgggaggacttgggcctctgaaacaaagcccggtggtttcctttcatctctgaacttcgagctcgacctaactttccagtcccttcccccaccgccaccccataacccgcccgaagcggcccacggaggccggaggttttggggcgcagtcgctcagcagcccgaggtctctgtcccgggcggcgggagggaaatgccgcgcccgcagccagggacccgcgtgcccagcttcggcccctcgcccgcgaagtccgacccgggtgacagcgcacggccggccctgggcccagagctcccacctgtgccccgcagcatgttgtcccggagcaggtccccgctggagaggtgcttcagctcgaagtgtgtagtgatgcgcgacgacacggtgcccttgcccgagcccggggcccccatgatcaccgctcgcagcagccgcgcggacgcccccatggccgcagactgaggcccgcaccgcgcgggtaccagggctttggcctggcctgcgcgctcacccgctcggcagcctgcgccggccggctagcagcgccactagcaggcggctactgcggttccccggcgttcccggaagtgagccgacagcccctggggccgcccagacagcgcgggaccccgctgttgcgtccgcctctcggctaccccggcgcaccccccgcccccgaccgagcgcctgttcccgcccagccgcgcaagccgcgcaagccgcgccccctctgcgctcgctcggccgcccagctcccacctgcgcctctccgcggcccctctccaccggccgctgggcccggatcccttcggcgcccctctgcacccacccccacgcgccctccactcggctcagatctacctccgcgcctctccgcgaccccggaaccccgcgccctgtccggcccattcccagccggatagaccgcgctcccctctgtccgaccttggcaactcctgcgcgccccctccccacctctagtcgcccctcggagccgcttggtttcgggatccacccgcatccacccctccaacaaccctttcgtagccctcgcccctagtccatagcaggcgctgccctacccagtccttgccggacacaccgcgacccctttcgtgctcccttgacaaccctggccccacctccacctggcgcccactcgaatccgcccctcccttctacccccctggaccgccagaccccccgcttctgcacccactcccgccttcgcccttccctccttcctcctcctcctctgctgccgagcgccctctcttcccactccctctctgtgtagaatcacagggagtgaccttgagccgagagggcctacctcattttacaggagaggaaatccagcttccattgagtgagactcttttataaataacgtaaaagagtgtgtgaaactgtggaggcaggctgttgtagataggcggtcggaaaagctttgaagagatggcatgtgtgctgagtgcttaattagaatatggaagagagagacatgggcccttcctatgtccagttttaggaaaaggccctaaaactggaggtttggcatgtttcaagaatggaaacagaggacaaaaacgttcgagtgagtatcattttgcctgtaaaatgggcatagaggagtagaatggaggagttaaaataatgtagtacttagtgcaatgccagctacggggtcaatgttcaataatggttgtccatttatcatcattgctttgtcccggacactatgctaaggcagaaagaaggctctctgaaaataaaacacagttaccattctcctcagaggtccagaactgatttcaaagaagatagaaatgacttcagggtgagacagtcagtgaatcgtagctgagtgaatggatgggggatttcaataggtagacagcctggtacttagaaaaggcattagcctt

SEQ ID NO: 51788 - DNA, 1060 bp, Homo sapiens
agtgctgtgatgcgatctcagctcactgcaacctctacttcccaggttcaggtgattcttatacctcagcttcccgagtagctggaattacaggcacccgccaccacgcccagctgatttttatatttttcgtagagatgggatttcaccatgttggccaggctgatctcaaactcctgacctcaaatgatctgcccgccttgacctctccaagtgctgggattacaggcttgagccaccccactgtgcccagcagggctcatacatactcattactaagcaagaaagaatgaaaagaatgaaaataaatgaattaaacattgaattcatgtaattgggaaaaggacatcaaaataacccatggaaagcagaggaagggatgaagtaaacaacataaatgaaaggatgagaaaacttgaacagaactaactaaagaatgagcaagtctggacaagtacaacttatgcaatactagaaaatctgaaggtgtggagaaagtacttctaatctccaaagctgggaacataggaggtttcagctccaaaagaaaccagaaagaaaatcctggggaaatttggtttagaaaaaaaaaatgttcaaacaaacaaaaatagctgaggaatcatcctgtcattgcggggatgaaaagctgagtgtcgtggtcatattaacaggcccgcaaaacaccaatcaactttggctttgcaaaaggttgttgattacaaatgagtaactgccagtctgtgaaatctcctggcaactgtgcctggcatagtcttttcgccattcacaggcctttgtatggatctgttcctcactgcctaccttgttccaactgaaaaacactgaggtcaaattcattcaaattctaatttaatgaccaagtgtttatacagattagtttgaagcaaataaagcccagatgagtgctttgcacatagtaggcactcagtagggttttgttgattaaatactaagaattactgttttgtcacttttgtttgtttgtttttgagacggagtctctctgtcacccaggctggtgcagtggcgagatatt

SEQ ID NO: 51789 - DNA, 2060 bp, Homo sapiens
aaataagcaacggcctgctgtgggaggattcgggtctcagtataggctgccactgtcagctttgcaatattcctcgagcctttatccatgagtaggacaggatggctctaccttgcagggttacagcatggagctgcgggactgcgccggcagtgcgctgagcggcatccctgcgatagggtgagtgcaccaacccttgttgtctctcttagtaagaaagaggaggggtagataatagcatcttcaccccagtagttgccgtaagtagtaatgctaagaatccggcacgtcgtaggcatcaatctcagtccgccatctccccttgctaccacgccaggaggtacacagaggagactgccccgactggcaactcccgcgccggggttccctggccatcctcccgcgttccctccagccgcgcgctgttgccagggcccgggcaccgcccagctccactacggaccaatggcagcgcggcttgggcaccgcccagcttcagcggaagccaatggaggcgcggcgcgggcaccgccctgatccggcgcgggccaatagcggcgtggcccgaagcgggggccgccccggtcgggcggggaggcggggaggtggccactggctccgccccgctcccctctgacccggtgtctagtctctccgtcttcctgttccaaaccacgtggacgcgtctgggctgctggaggcagcccgagccgccgccgtcggtgtcgccgccaccaccaccatcggagtcacgagtcccgcgtctgtccgaagtcgccgctctcgggctgctcacgtctcttcggagagcgcgcacatggcgactcaggcgcactccctcagctacgcagggtgcaacttcttgcgccaacgtctggtcctgtctaccctgagcgggcgccccgtcaaaatccgaaagattcgggccagagacgacaacccgggcctccgaggtaacttggtgtgggcggcgcgcggcgtgggcgcgggggctgaggggagaccgagctgatgccgtgggggcccgcgcggtgttggttgggcggctcggcgtccggcgagcgcgtcggggagggcaggtggcgcgtcgcctccaaagccggaggggcaggcacagtgggggaggcggggtcggggcccgaggggagcgctcagctgcaagctgcgctcggcgtctccggggcgctggtagtaaacagctgcacgttttccagctttacgtgtagcaacaaatccctggcgtcgccccttcgcgtcccttcggcccctcttgccctcgccataaacctctcaaaggagaaaaacagtttgttggaccgaaatatggtgaatgagccgggggagagacattgggagagaaaagtaccttgggttggttctctgccctgtctcaaagcagttctcagaagcagctgcccccttggacaccggctgttcctgtcgccatgatttctcggctgccctcacacttgtccttgggtgtggataaagaaatttttaaaattctgtgtttgttttcagccgtgactgtgattgatgtgcgcaggacaggagctttgagatagacttttaacagtcatgggcctaattgccttgactttagaaaaggggtcggtgacaatcgctaaactgcaggcttccaagctcacttcttgctctgcaatggtaggttaaaaagaaataggcccatttaaacccacatctcattaaatggcgccggttttcaactggccttggtttacacctggccccctggcatgagatacatgcatttaaaagcttctgactggtggttatcccaagttgggcgagtcagtagtcaggtgaaaaaggaaaaaacctgtctgtaaattgaaaaagagtgtttgtggttggtcctggaagcttcctgagcggcgctgatgtgtttcattttgcactggctcttgttttatctgtctgaatgcattttttggatagttagatctctgcctctcttgggtggtgattggctgcacataaagggcagaagatgccatgctattgacggagataggttaggaaggaaagaagcagaatat

SEQ ID NO: 51790 - DNA, 7320 bp, Homo sapiens
tttttttttgcattttctagaagactataggaaatgagttctttggataaaagaatgagaagaggtataaatatatttagattggaagagagaaaggtgcctcaaacagtgggaaaaggccctgaagtgtacagcagtgtgtgtatctgttttgtgctttttttttctatacttgctaattatcttaaaagcttttctcactggcaatattttaaaaattttatatgctaacagtgacaaaagatcagttgatgaatttctcagaaatgggacccaaaaagtctgttttcatatgctgtaggagtatctgcttttgccagctgcatgactaaaatgaccttggttggtatctggctccaggccagggtaaaataaatatacttaatcctgaataaagagtgacttcttcagctcattccatggctccttcatttctagcttcttcttttctttgtggtttcctcattagttcatgtctgcatctactctctgtgtacaaggatgaaatgagtgattctgtccttaacaaactcctagtctcgtggggtggacagctgggaactcatttagagagattacaaggatgaatacccttgggctcgatagaggtagaagcaaagtgcttagtgttagagagcgtttcttgaggagggaaaatcagaatcagtctgggttttaggaagataattctggaggttgagtgaaagatgaatggagaggtgatagactagcttgggcattatggagatggaaggagaacggaaggggcagataggacaactaattggaggcggagtgagaggaaggggccatagatgacttcatgatttctgtcctggttgcaataaaggatcatgatcgtaaagatcattcccatttgacaaagggaagaggaaaattgcagtaggataatgagtgatgctttttattttggtcttgttccctgggatgttggcagcctaaccatataaggatttccagttggcagttagaaattattgtctggagcctcagagacaggtcatcacgatcttacctgctgatacttaagcctctaggagtatgagattgattaggctgaggttgaacactggtgggtttggctgaattcatctttcacgtgtttttcctttgacatgtacagtgtggcagtggtggcggtggtggtggttgttggtagtggtgtgtgtatgcatctgaattggttgttcatgtttgaaactccagattttacattatgatagggcagtgtgacaatactgaatggtggttcctccatgacagccatcagttggaggtgagtagcagctgccttttttggataaggtgtgagctttcagctggacacaggtcacagctgacctcatcattcatttaagcttcctctctgccctctgtgggcattagggtttctgccccatggtccaagggactgagaatggaagaaggagaaatgagtgtttaaggtgtgagtgggagaagaggagctagagacagagtgactgtggagatagaagtatttggagaagccaagcaggaatcaagttctaagaagtcagggataatccacagaatcactctttgccagagttgagtcagactgagcagtgagacatttttattgacctttgagagaacagtgttattggagtataaggacaggaacagactgaggaacgagtaggaactagagctattggaaagttaggagattcttccagaaggttttaagagctgaggttgggattttttttagactaggggaaacttgagcttgcttgtaggctgaggagaagctgtaatggaaaagaaaataattaaaagagctgagggtccttgccgaagtccagaggggataaggattgaaaacagaggtgatggaatgagccttatgaagaggaagaagacattttttccttagaggcaagagaatagaaagtggggagaaattttaaagagaagttttagaaggtctcctgactcttggtagtgtggcaccagagctcccagtaattatttgttggtgccaacaagctgctccaatggtggatgaagattccattcttttccagttccctcttagagaaggaaaagaagtacaataatgtctcccatgtactgggcattattctaggtgtacatatgtatgtatgtgtatatccatatctgtttaattcttctaccaacccagtgaggtgggtgtttcagacaaggtaactggagagcaggtttcttcctctcttttttctttttttagcatagattgattacatttttaccttttgattgattgactgcgctgtaatggtaatacctttgccctgagctgccacttagggtttgatctttgccttttctctctgaccgcagagtggaccgatcactttcccttaagcagaacttacaggccaccatcactctgctaaaactagaatgtgcaaagctgcaggagactggagagtgttcggcccagcctctcattttacgaaggaggaaactgaggcccaggagacagggaattgtctagggtctaacagccagtgagaggcagagtaggtcccaagccctcatctgcttttcctgcccttgtcccaccgcaccaagttgcctgtcttccatgtcatatggagagtgataaagggacaggactacacctggaattacccttgggcttcttgctgaactaagtaaatttggcttcactctttgtgactcaaggtataggaaggatgagccagaaggaatgctgtgttttttcacctttttttccctcgagagagccggtggctgcccagagtaactgcagcattgcatcccctactttttcagaatctgacttggccttctccccagctgctcttaagcctcgactgtattcttctttatctggcaacgccaaatgcatatattaagtttttgagtgtgctttatttttttatttttagagagagggtctcactctgtctcccaggctggagtgcagtggcatgatcgtggctcaccaaagccttgaagtcctgggctcaagtgatcctcccacctcagcctctcaagtagctaggaccacaggcgtgcagcatgcccagcttatttttttttagtagagatgaggtctcactatgttgctcgggctgtagctttaatatttaaaattagctaatcttcagtggttttcctagtttcccctgccccacctgatccattctaagcatgttcttaggcctcacaggtcattcctaagtctggtatttttctgatatcacaatatttagttggggcttcttagcctgttagagttagttgtaacttggagatggctgggcttgagccccttgccttagagataaggaaattcagatagttgtgattttcttgtctgaggcaacatagctaattagaagcagagctgggaccaggactagggcttttcctatgccttctgtgtggtgcctgccctccctgccagctgacagatccaagaagggaacaagtaatggagtaattttctttcccatgtagcagttgaggcaacatttgccaactcgttagataacagtacctgatttgaatgccatctttctactcttatcaggaatccacaaatggatcagaaagaccccagacttcctgggagctctgaatgcaggaggagataacagttacacgtggcaaagtcttgccattaactatggatgttgtaactaattgtagttttgagtttgtgctgcttcctgtagtttgaggctgtcatcaccccgactccccaactcccatgtaaaatcatcaccttccctttagctgcctgtgtggtgctcatcattggcattcttaggtgagctgttgaatagttaatttggtttgctttgactcggaatgctaccggctctaaacattaaataaccctactggacaaatgttaatgaaaaagatgattttcttctgtacgtttatacctataagaatgagtagggttctccaggctgggtgtggtggctcacacctgttatcccagcactttgggaggctgaggtggcagattacaagttcaagagattgagaccatcctggccaacatggtgaaaccccgtctctactaaaaatacaaaaattagctgggcgtggtggcacatgcctgtagtcccagctactcaggaggctgaggcaggagaatcgcttgaacctgggaggcagaggttgcagtgagcctagatcgcgccactgcactccagcctggtgacagagcgagattccactcaaaaaaaaaaaaaaaaaaaaaaaaagtagggttctccatttgttttctacaacagtccagtctctccatgctttttgcatgatgcctctgatgcacacgatgactttaaggtaggtgttggtctccatgtcatgaatgaggaaagtgcggctcagagaagcccagtggcctgtgaaatcacagtgttcctcaggcagagccagcccactcgctcagttatatgccagcatcctttctgtttaccacactgcatcatctacctggttgctaagccttacttgttttttttgactcttgtattctgctgaaggcttaattaaacttttcttttctgaaataatttcataggttgatgttcttaaggcaacagcactccctttgttgaaacaatttgggattgatggtgaatcatttgaactgaaggtaagaatgtttgaactgttgaccatatgttcctgtggaaaacattttcccactgactcattggaagagctgtgtgactcagtgtatgtgtgtcacatttgaagtcaccagttatcagaagactcacagggctcatgaaataaacactacagactttgaactgaaagggaccctttagtaataacaatagtagctgacagtgatgttgcacttcttttgcggtgggggccgttctaagcagtttacaaatactaactccttttctcctcacaacagctccgcccatgtgcctcagctagcaagcagtggagaatagatttgggccatattggctctctgatctaaatgatctggatataatttatgttcaggggctcccaacctggatgtccctgagaattttcagtatttccaaaatctagtagaagtagtttaagcatctgtattttgttgaattatatcaatccaatgtggtaaaccgtttagcatctctgccttttacattcatgttttaaacaggggaaatgacttcatttttatttaataatgttttggtagatccgttatttgcatgggaggagaaaaaggggtttctgattattaagaaatgggctcagatgatggactaggtcagctctatattttaaggataaagaagtgacctgttcagggttaaagagatgagtggcagagccacttgggtaatcgacttggactttgacacatgctgcacaggtactctctaggagccaacataaggtgctgttggtcttgaagggaatgacagattgaatatggaagagctatgccttgtaaggaagcatctgctggtgtaaaccttcctgggcagggtgtcagggtaatccattgctttgctgcatcctcgcctcatctttctcactctctgtgtagattgtgcgacggggaatgcctcccggaggaggaggcgaagtggttttctcatgtcctgtgaggaaggtcttgaagcccattcaactcacagatccaggaaaaatcaaacgtattagaggaatggcgtatcctttccatttatttggatttcttttttttttgttgttgttgcctcactaagataagaatgactaacagctttacttcttcccgaggttatttacattttagactacaactttgaaaagtcttaacagtgaaattgtaattgctggctgagttaggatgttctgttatctgcctcaccatgactagattgattgagtcattctttttttttttttttttttaattttccggttaacatttaggcaaatggctctgatgtatgtgatcctctctcaagggctttggtttgggggccatgaatatactgcagttcctccctcagaagacgtcatcattcggtgaaggaaccaaatatgaaaacacacagttctgatataacatgcaaaatgatatgtgcagtggggtgggggcctggagtagacagtggtcaattttgtctggaggacctagggaggctggagtaatcataatgaatgatatctactattaagtatttactctgcatctacttcagtagtcactttacatgcttttaagcctcacattgacccttgagttcacttacatccttttttgcagatggggaaactgaagcttcaaaagcttaaggaatttcttaataatgtcacactgctaataatgacagagctaggatttgaacctggtctgtgtgactctaaagtacaggcatttaatttttacttttgcctatagaaaggagccttgaagaacagaggattgcaaagtagagcaagaaaggaggagggcttcaggcagaaaagtgggcctgagcagaggtggcagtgcacagtggttctagggagtggcaagtaatgaagtgtggccagatttcaggttggtctatggcatttgatggtagaatggggcatgaagacaggcaggggccagtgaagagctgaaggtggctggaatcagatactatgcagaacgcaaagaaaggagggtggaaccctgtgaggccaccaaaacttgaaagcaagagttaagtaaggagggaagtaagagtggggaagagaataaacaaaacatagcttcctggaagctcaggtcagcactttaaaaggccctgaggagttagcattggggtgggggaaaagctgagggactcagcagcaggctgtcactgatgccctggggaagagtgctggatccctatcccaagggactaattctgggttgtggagtgaaggggagggaaacagcggcttgtggggaccactctttacagaaccttgacaggaaagagaaggagaaggaaggatgagggagtaacttgatgaagcgagagtcagggagactccctcccttttacaaaaagattggtaaggatttgagtgtttttgtaggttgttaatgtagatgaagcaaagtaatgagctgattaaaagcccaggtgctggagtcagaaagacgtgggtgccgacgccggctgcgccacttaccaatggaagcatttggccgtaagccttggttgcccgtatatctttagtcctgttataactgctgtgcgagactgtcatgaaggtaaaatgagatcgtagttgcacagtaggaggcactggtgtgtaagtagcattggg

SEQ ID NO: 51791 - DNA, 7778 bp, Homo sapiens
atggattcaaggccacaggcatacggtaagggtggctccaggtagagctgtgtggaggtgagtggaagggggttgggatgagttttcagttgttaccgagttaggatgggattgagggtaaggggatgggcggggtaggataagagagtgtgacaaggatggtaaagatgtgccttcacaggggagcatcataactgaagataagaaaaaggctgtgttccagcagtaaggtccttgctgaaggtgtaatgttaacacagtgccagctgcatggccatgtggctatatccagtggcagttggcagcctagagggaggagtagagaacgtgggaggaccaatttcatccaaggttggatgcaggttggcaaggtgggtgggtcctacaggaggacagttggagggtgggtgctggagcattgggaagtacattcctcactgaggattgtcacaggggctcaccagcctggacaaagcaggtcaagggatgagaaactttaacaggcttaaagatcagatctagtggaaatagatacatgtactgtgtaggacaagagattgtgtttagggagttttgttttgggatttcagatattaaaagtggtaaaattctaggtgctgacaggatctgggtgggagcaggtgttggaggccgtagagcaagacaggctgtgggatgactttcctggcgggagtgtgacaaggagggcagaccagaaagcctgcttgtcagggcgggggtgggtgcttaaggtcgggttttgtgttctcaggaggtttggcaatggtattacttggaggaagaaaggtgtagcgtggactgtcttttcagaggcctcgaatagcttgaacagtaagtggtgaagggcagggagtagggtgggctgcagagccatgtgcagagagagtgctggttaagatagaagctcaaacttgggttgctgcctgaagttctttttaaggatcatcaaaaccacaggaatacataataacaaagccttcctgggttatggtctgttctctgcatggctgtcccccagcccatgtaagcgcccagccttgtgtgtaccaggagagaacaggcaaaaggagaaatggttcctttcctaggagcccccaggttgatgcatagttacattgcccaggtgactttctaaggtgatattcaactctagtatccaaatccgaggagctggaataaggttaattaggttacaaagaaatggaaatgcaatgtaactaggtgtgtgtttttgaaaccaaatgtgccttttctacttgaattcattcttattaacagatgcattgtattccaccatatatagaacccaaaatcaaatcctgttgatggccattgagttgttttttgcttttcactgttgccaaatacactgcggttaatggctttaaccacaacatttttggcaatggtgaaaaaaagtgtaataagtgtataggaatacactttccaatacattccaataagtgtacaggaatacactttcagtactattttgggtttgtctggggggtagttgttttttttcctccttatttgagatgtgtttccttaatgctgtattggcggccgtgaactttgtttggaatccagtctctgtagtctggaaatgtgatttctggcagtgtgctctgttttgacacaatcttgtcataacaacatgggtttcatcacagtggggtcccccttgttctctctgggtgtgcagatggtcgtgtcctttgatgatgatgctgggaaatggggaagggctttccaggggagaacataaaagttaaaagagctgtagtgccgggcaccttgggtgtaactatgttcctccctggcttctccctctaatgttcttggaaccttccctgtgtagaatctgagccaggaagagacttgtgaggtcccaagttcctccctccctggaggcaggggataggacatggaaatcatccccaatatatctctgactggttgaggcttcctcctggctccccaggagagttgacacagtgccctttctcagatccctgtctgttaaccaaacatttcagccactgctctgcagagctgcccatttcacaaacacctcaaaggaatgttggtttgaatggagatcgccctcttctccagttttggagcctgggaaaaaagagctgcctttggaaaaagcttgagttggttttgtggtttttttccttgcaaggctggttgactactggactaagcttggaggttgtatttcccatgggagggctcagactgggagaaagaggcccactctcttgtgtgcatttgtggttttaactgaattacttccaaagtgcatcttttccctcttgcgttctacaagatgacctaccagccagggcccagagggagctggtgttggttcctgccagcagctgtgactacacagtagttaccttttacttaatgccacccactctttctcacccctgccttatgtggggcgtaagagaaaggaacattctgttttagttttgcagtgctgtcctaggagctcatgatttggtacatgagaattaagtgaaaaagctggcagtaaagggggataagttggaattcgtgggataatctagtttcttttccttgactgtaggaaaggtactttgagaatcaagctctctctccacctactgtaacatacacacacacacccctcttagctttctctgacatggaacattggggaaggggaagagtgggagtcccatatggactgtagctatggacttgtacattggtattggttcttaatatggttttcataaatgggctttaggaggttcataaacctgaaaaattttctgcaagattgtgagtatatatgtttctcaggagagggtccatagctttcatcagattctcagagagttctctgattcttgaaagaataagaacctctgcttgggatttgaatcttggataagtaataaagaaaagcaatagctgacatttgttgggctcctactacacactaggcattaagagctttacatgcattttatttcatttgtgcctccaaactctgtgaggaaagtgttatgattatccttcttttactgattaggaaatgacagcacagagaagttaccacaattaacctggagtgatgcagcttgctggagcttggacttgaacggagataatctgattctagaacttgggggctgttagccattccttagtaggacatccatgccaagccagatggttctaagcaactggctttaaagttcctttgccttcttcatttcattgcctgagttctagtataggattctgtaggccctgaattcgtactgtttgttaaccttcgtgtttttgtattgggatgggtgagaggaggaagatgctttttgggagtcagatctgtttaattttgagcaagtgtcttagtttttttgtcttagttgtctttaatgtaagtcctagaactcggagccatggccctcaacacagggttactgtgagcataaagtaaggtgataatagatgtgaaagaactttgggagccgtgagctctgtgggattatgtgctaggatggtgacatctcttgtgctttcctggggacagtgggcagcctcagacctcagaaggacagcacctgcttggtccaaagggtatgagattcaggactgtttgtctaagctgtctgtggtcaaaagtacattctggactgaagagatggtgatgtaactgggctgtgtgtgtattgaaaaatccctctttgctctttcctcatttcaggtttgtcctttgagtcaagttaaatatttattgagcatttctgagtacaaaagtggtgtattggagagttgggagggattacagaggtaaagcccttgcccttatagagtgtgtggtctcattgaagagcaagaacaaaatgtgcatatgtgaagagagatgtatggtaagttcaagtggagctaacacttgggtgccggctggagggtttcaggagagagattgggacctcgggctgggagaatggggcaaagcagctcaggttgaggaatttggtcagtttggatgggtggaaggagttgatggtgcagagctgaagatggacacaactgagcaggctgggggctctaacaacaagatatgggaggaccaggagccaccgagagactgtcaccagcatgaggaagattggtcttttagtatgaagttcaggatgggtcaaaaaagggagctagataccagatcaggtcatgtatcgtctctgagcactttgtttctgcagttcagatgaaaattaaatatgttattgtcagcagttcttgaacattgggctggattgggcagattatatacctcgttctacctgttggacttgtcacgtggggtttgtatcagggtagtgggaaggtcacatgttatttctccatttttttagttccaaatatatagccatctcttgaccatacattgcacattgaagtgctcaatacatacttactttttctttgacatgtgtggttggggaatgccagcttctgttataaagtctagttttaggcaataatttccatttcctcaagcaccaatcttttcacttgagttactaatatcttcctcctttcttttctggggtgccctattgtaggagtgctaattatcaatattttaaccataaggtagcaggtgtgaggaggctgtgttatccacaagtggagtaattaattcttaaatagtagaaaataggccctgtaaatgagaaaaacctttttatatatttataaatagcagcaaccatgttctttcactgaactttttctgcttctcccatcagcataccaggagtcagattgggatcgcccaggtcctgtgtggtgtctgttctgggcttaggttcttaagagagagactcattggctacagcagtgggaatggacagagaatagaaagtgttcttaggtgttgtgcttcagagggagcctggatcatgacccgcagagaggcaggtgtctttacaccttccaaaattgacttgaaccatttctaggggaagcgtgtgggtaggaagtcagggggtggggttgaggacctccagctttatactttccactgtctctattgtttgggtgtttttgccatgaccttttataataatgaaaaaaatttaattatggtactaattcagtaaattcagttggaaaacaatagatttggaagtcccagtttgttactacagttccacaaatacttgccagctttataactgatttttctctgtcctggaattcaagcagaatgacatccttaactccaggctgcaggtactctgtacgtgtgtcacctcagatggcgaaccggattgtggattctgcaaggagcatcctcaacaagttcatacctgatatctatatttacacagatcacatgaaaggagtcaactctgggaagtaagtatctgtgtttttgaagtctgtttctgcagctttttcacatgcctgttctagttgaagttaaaactgccagctctgaggttgcgcagccagaggaagaacaatttcagaattaatttctttctgccttattgccgttgtcaccaacaggcatttcttgagtgcctgtcacatggaaagcatcccagtggctagagctggaagctaagggtctggttcctagccttggggaattaaaacctttatctattaatacacaatgctttaggctttaaattccatctgcactctgttccaacaaaaaaattaaagtggacaggttcttccaccctgagtaaataacagtatagggttaaaatcttttgttatctaagtgtaagtcagcatctctcttcatcagtggaaacaacatatttacatccagagaaagttgttattgcagacgtgaatttggtttagtgaaagcctttgctttgctaaaaaataaaaattttaaaaattagaaaaaaattctaagtaaggaaaataagttcttaaaaaatgatgctctatgtaatgaagatacctgttttaggctttgcttgtgtatttagcaactaggaagttagagaagcaattaaagccactttcttaaaataggaaagtgttaaacatacagaaaagatcaaagaatagtacagtgaacacggagatatactcctgctgcctatagttaacgataaatattttgccaaatttgcttcacttgtttgtgggttttgtttgtttttgttttttactgaatcatttcagtgtgaatgggcatcatttcacttcacatctgaggctttgcaggttgtgtctcctaaaaataagaatattagagtctggggttaactgttgtaggttaagaagtcaacttcttcttaagtgatgccacagctgatcctttttcacagctgtttcacctgtggtttcttttaatttcagcaaaaagaggaaaagagagtaaaggaggggggtgagtgttttatacaacctttgacctttataaggcccaatggaaagatgaaggtagttttagaaatacagtggaggctcatagtccaaagcaacaaagctggtggcgtcataacgctggggttgggaaaggatttgtgggcaaagctggactttctggcttggaaaagtcaatgatgttcctaaacctttggtttatattctagtaacaacagtattttcctcatttatgcattgagggtgatgatgcctatgttttggggttattgtaaagatcacacatataagccattaataccttgcttgtcacatggtaagtcctacagaaatggtagctcctgatgctgttctttcctttactctcccttgttggccacaggtctggaattatgtgtcagctattttctggagaaaggggatttccgagggatgggggaggacagatagcagcagaagctgtctaaatggcttcatctcgatagtcccttctctgctttgcctctcgctttatcagaaagtgtcctggcatgaagcagagcaggcctgacagccatcctgccaccagcttatagtgtggctttttgttataccactgactcagctgaccctagagtgtggtcaagtccatacttactaatggtgagtagaagccttacacgtagataaagacatggacatgatgtagactgtgggccatcaactccaagccccattttaaaaattacatgtaaaaccaatgtgggatttaaatttgtgtttggtttttttaaatctccagttacagatgactaatagtgctcttccttctctgttattaaaattataaagtcatggatgggtatttctctcttctgattcagtgaagtatccagtaagtcaggcttgttcagatgtaagagtttatgttgtggccatggcctagaaccttaggggacagcacttcttggtggcctatgtcagcgctttggccagaatgcacatcagtccagtgtggtcccattttaactctcacagtaatttttttttttcttaattgggtcctttaccaaggaaagctgtggaggctggcctttgcaaactataccagtgcatatctctaatgaggtcacctgatgaccagcagcttggtcagcctaacttgaaataggcctgataacacatatttcccacaagttgggaagaaaaattagagtaatttacatagaacctaatatatattctttgtcttttctaaagttacttaaattgtgttaaatggaataattctgattaaatataaagtttatcgtaatgacaaatacaccttagaaaactcacacagatggaaattc

SEQ ID NO: 51792 - DNA, 766 bp, Homo sapiens
gctcttggtatataacaaatgctcacaaacttagtagcttaaaacaatacctctttatcatttcacagttctgaaggtcagatatccaggcagggcttggttggattctctgcttagagtctcataaggctgatatcagggtgtgtgtcacctgggctgggctcagctctcatctgaaggctctgggaaagaatgtgcttccagctcattcaggttgtcgacagaattcagggttgtaggactgaagtcacctgttttcttcccatttttcttgctggctgtgagctgtggacaactcttagcatatagacaggcactgtccgtatttctgttcacttggtctcccctaccttcaagctggcaatggtgcatggaatcctggtactttggattcaccttccgtttgataccagctggagaaaacattgcttaaaaatgactcatagcacaatagtcctacctggattatctccctatcttaaggtcaactgacaacagcaatactagatttgtgtttaaataaccaggggctgggaatcgtggattaccatctaagaattttgcctgccacacatactgcagtcttacctagtgccgctgacgttcgaactcagatctgcccatatagagctcaaatccagaactaaggggcacattgcttttggaatatcacatacctgccgttccttgtacaagctctggaaatggtgctgttggtcaatgtagggtggcacatagaggccaggcagattactataagcagtag

SEQ ID NO: 51793 - DNA, 2886 bp, Homo sapiens
aaaaaatccctacacgatctggtgccaggctacttctttggcctcacctcttaccactgccccctccttccgtgtcctccagccacagtgacctctttcctgatccttgaacttgccaaacactttcccttctcaaggtctttgccttcaggagtccctctgcctgaaattcttttcccagatagtcatgggactggttcattctcatccttcagatctctgctcaaatgtcacttattctaggaaatcgttcctggccaccgtaaaatagcacaccccctcctcactttctactccttttctttgttattatgtatatggcagcagaaaactatgcattttcttagtggcaattacacaccccgcacattatgcatttaaagcgttgtttgttgttttgtcgcttccatcagaatacaatccagtagggcaaggagtgtgtggggtcgtgttcacctggtatctctggggacctacagcccggcacctagtagacactcagtaaatatttgaatgaatgaatgaggccctttggcagccgggaagcccgtcacagccgttgtctccaccctctcccgggctacaccaggccacgccggtaaagttgtttctcctctaggagaaacattcgctaggccttgttgccaacccgcaggcggctgggcgcttcatcccaccctcacccctttccagccaaggtggctgatgggagtcaggctctcgagggcgcattgccacgaaacagcgtgtgtgagcgcgttgtccccggcccccggcgccacttcccctcggcctagcagcctggactggggaaggacgggtctgctgtacccgggaggtggaaggaaaagccgaaagcggagaagtgtgcgggaggggagtctccgcgcggaggcagcccggcctcctccagtgcaggctgcgcgctggggagccagccagggtgagtcactcccggccgcttccctggagggcggcggccacacacacacccgcccatctagtgagggccgggcccagcgctggcgcctagctccagccgggcaccagcgtttcgcgaggcgccgccgccttaacttccttgcgcgctcacgcccaggggccgtcccaggaatctccacgcgcgctcgccggcttcccgagaggcagctgccctgcgtggcccgcgcctgccggtcccgcgaccagcaccgagcggcgcacgcgcactgcaggacgcgcgtccggctctcccccagcctctatccggcccggtctcctgccattcggggagactgcaggccaaccgggaggctgagttcgaagctagcagggcggcgaagccagtgtcgcccgcggcgttgagaagacggtgtggccccggagagggtggagacaactgtgacgggcttcccggctgcccgaagtgggagtggtgtggggctgcaggaaggagagaggaagaggagcagaagggggcagcagcggacgccgctaacggcctccctcggcgctgacaggctgggccggcgcccggctcgcttgggtgttcgcgtcgccacttcggcttctcggccggtcgggcccctcggcccgggcttgcggcgcgcgtcggggctgagggctgctgcggcgcagggagaggcctggtcctcgctgccgagggatgtgagtgggagctgagcccacactggagggcccccgagggcccagcctggaggtcgttcagagccgtgcccgtcccggggcttcgcagaccttgacccgccgggtaggagccgcccctgcgggctcgagggcgcgctctggtcgcccgatctgtgtagccggtgggtgttatctctgcctggcttctgggtggggggcagcagctgtctctccacccccttcctaccttttggtcccgcctgccccctgctagtggcagcaaacttctgagccagaaaaatcttcctctttaagacgacacctagaacgagtcttgctggtgatatttgcttccatttgtgtcttataattccctcgctcccgcctccttattcctttttaaaattttctagacacttaaacagcctagaaaaagcatttgtttcccctggatttatgtggtagtagttaactgctgcttctgtttttaggtttcagaagcaggcaacaggaacaagatgtgaactgtttctcttctgcagaaaaagaggctcttcctcctcctcccgcgacggtgggtgtgctgtcctttatcgctgcagtaaaggcgaaggtgtctggagctgggagtgcgtgcgtagggaaggttggaagcgtgtgaagagaggcagggctcattgttgcttactcttctgaaaatgtcagtgctaaacttttaatgttgatctgggagagtaattttggggtgttttgttgttcgtcttggatcctttaagaaacatttttttgttggctttacacataacgtgactttgcagagaaacgaaaaacgttgtccattaccctttcttcttaagcagccagagattcttaatcctttaaagaggagtatttccaagcaataagagatagcttttgggagaacacgttagctattcttgctggggtttctgctaccacattgaatgtttcctcatggttttatctgcctaagcttgctgtgtcggttgaatttacccagtttgttttccagtaattactaatctgttaggagaaactccatttctctgaatgaaagggtaggagcggctgagtatggagaaggaaactggaagtgggaataagggaaatgattgcttttggtttcataataagtttgtacagtgagttgttgggctactgcaaataaagattttgtatcccttctccagaatgcttgggaccaaaagtgttttggattttttttaaaaattttggaat

SEQ ID NO: 51794 - DNA, 2525 bp, Homo sapiens
taccaggatgaagaggcacaatgctgaaaaggcctgaggtggtgagatttccctccccttctgccactgtgccactcgagcaccctgtgaccagagttagaggccactcactgacagcagggtgatttggcagttctttcctttctccaaaccctaacagtcccatgcgactcatctctaacagcagaccagaacctgcctgaggttaggagcgagatattatccatcttgatagtctccatggtgtctacttcccctaaatatttgcacaaagcatgagagatacaagaaaaactgtggctcaggccacttgccattacttatttttcttctgaacataggagtggatgactaaatttttacacctgctgcaaacatttataaagaaaacaactgtactctagtactattcctccacataccctgtatatcacagagctgtgtgctttcaagtgctcctgtttgtaaggggttaggatctcccctgaaaagagagagtcctcatgtcaatcatctgggaaagaaacactgtctgggaagttagtatttagatttacctctttctgggccttgctctcctgggtctggacttgtagtctgaatgtgttagaggacgctcccaggtggaagggttaaaggtggaagccaagcaggaagaagagcttccttatgggaaaccacacctgagaataaataaatgcatcacaccttgtaaatttcaccctggagttcagtattttcaacattctttcctttcccaacttccccattcctggcaaagtcatttcccaaagtctgggaatattccgtagggtgtccagaacactttcagctatctcctcttgctcacaaaatatgtatcagaaaataagcaaaattgaccttgcaatagggataactttgatttcactcacttgtataagttaagtcttttaaaaattctaacacttttcaccaggggtaaaaaaaaatgtcttgctacttatacaattttaaacatcactgtgtctcagagtgatgttttgcagagaatgctgatttcaatccctctgtcttcattttccctttgattccttctgagatcttggaaggggtctttaatgcttcagccctgcctcaggtgagctatagattactatgggaaggtgtatttctggggaggagaagtggtgcctgcaagttccagacaacctttcttccggtcacccgtgagtacctagatttgattttacttggggggacataaaaaattaattgcatgaattctgtcatcgggattaccacgctgacttatttcccgatcagatgacacattgcctgaatgtatgactgatcgtctcaccacagtcattttcaatatttgcatcccattgaaattaagccacatccccttgcaaattccagcccagagcccacagcttccggaggttttctgtaattaacaccgcccttgctccctgaggccagttactgtaatttaggtattccccgcaatagtgtgctgatttctgttgagagcactgtgcctgtttttctcaactctattttaaagctacggagagatccggagtccacgccaggcgacaagaacgcgctctaatggaacgaagttggcaatacctatcagcaccaggggcagtgcgagagccaagagccggcgctcacgaggagcgggcgcccagcgctgcctggcaagcccggagcccaggagatcgcgctgactgacatggccgggctgacccttctccccacccgcctgcggccggtgttcactcactgggcggcgctggtgccgggaccaggcgaccggtacgcaaacctccaggcccgggctcctttcgcccgctgcagggaccgggcctcgctccgcccagcgtcgggattggcgcccagacacagtagatgacgcacctcagccaattcgcgcagccctcagcttctttaaagagccggcacttccgccagaagccgggtgtgtccttccgggccaggctcagtgttaccagaggtgggaggggaaggtcaaaagaggcaaattcaaagccgcggcgactcagctgccagatttttgagatgaggcagaggaagcggagtggaattctcaattaaaggcctctgtcccctcatctgttaaattggcactattaaaaagtcataaagataagacagaaacgagaaagaagagaattgactgaaattacccattcttttttgaacagagccgtctttctcccctgctgctcagagagatgtcggtctcgcctcaacctcaccagcaatttctatcttgaataagccacgtctctctcccagcctgagagaatgcttgaattgttggcactctgttctttgctaccaaatggcttggaaaaatagcatgaacgtcaccagtctctggccttcaggaaagtccctgctaaccaccacagcggtggagaaggcgtctaactttctccaggctcagcgtgtgagtgcacaccgccctgacctcctgggcgcgtcttgatgctctcaacagcagccct

SEQ ID NO: 51795 - DNA, 1804 bp, Homo sapiens
tgaataagaaggaaaggcaaacaacgaagagtccaatttctcaatttagaaaaagagaaaaaaaagaaaagggagcacacaggcacggtggctcaagcctgtaatatcagcactttggcggatcacttgaggtcaaggagttcgagaaaagagagcacctagaagttcagcgcgggataatacttaagtaaattatgacaccatcgtctgtcatcttgggcccattcactaacccaaagctttcaaaagggctttcttaaccctcacctagaataggcttccgcagccttaatccttagggtggcagaatatcagggaccctgagcattcttaaaagatgtagctcgggatgggaagttcttttaatgacaaagcaaatgaagtttcattatgtcgaggaactttgaggaagtcacagaatccacgatttaaaaatatatttcctattatacacccatacacacacacacacacctactttctagaataaaaaccaaagccatatgggtctgctgctgactttttatatgttgtagagttatatcaagttatgtcaagatgttcagtcaccttgaagaggcttttatcagaaagggggacgcctttctgataaaggttaaggggtaaccttaagctcttacccctctgaaggtaaaatcaaggtgcgttcagatgttggcttgttgtaaatttctttttttattaataacatactaaatgtggatttgctttaatcttcgaaactcttcccggtgaaaatctcatttacaagaaaactggactgacatgtttcactttctgtttcatttctatacacagctttattcctaggacaccaacactagatacctaaactgaaagcttccgccgatttcaccgaaggtcaggaaagtccaacgcccggcaaactggatttgctgccttgggcagaggtgggcgggaccccgcctccgggcctggcgcaacgctgagcagctggcgcgtcccgcgcggccccagttctgcgcagcttcccgaggctccgcaccagccgcgcttctgtccgcctgcaggtagggagcgttgttcctccgcgggtgcccacggcccagtatctctggctagctcgctgggcactttaggacggagggtctctacaccctttctttgggatggagagaggagaagggaaagggaacgcgatggtctagggggcagtagagccaattacctgttggggttaataagaacaggcaatgcatctggccttcctccaggcgcgattcagttttgctctaaaaataatttatacctctaaaaataaataagataggtagtataggataggtagtcattcttatgcgactgtgtgttcagaatatagctctgatgctaggctggaggtctggacacgggtccaagtccaccgccagctgcttgctagtaacatgacttgtgtaagttatcccagctgcagcatctaagtaagtctcttcctgcgctaagcaggtccaggatccctgaacggaatttatttgctctgtccattctgagaacccaaaggagtcctaaaagaggaatggaggagcctaagaataaaaatagtataataaaacatttcttagacacattgaccttggcctatgtcaaagttcagtctgggtttgtcttataacacaaggagtaaaagtaccattgttctacctctttttttaatacttgaaaaaaatttactgtggatgcttttctatgaattaaataaccttctaaaaaatgttttcattgctgcattcgattagattgggtaactaaatgaaattaattc

SEQ ID NO: 51796 - DNA, 735 bp, Homo sapiens
ctgtatgcaattgtggaagctggttatactctctaggggaggctgttgtttctgtgtctagtgctggagctgaagttcacaggaccagtggtcaggaggtagagagcaggaagcgaggacaaactggaatccatgaggatggactggaatctgcattggtctctcaccacctccaaacctctggtggaggaggagttaaacacacctctgacccaagagttagagaagctgaagcataagatccacaggagctggaggagctatggaccctgcacctacctcctgagtgttaggaaatacagctaatttcttcactttcactttccacatcaggcagaaaatgtctctccaggttcatctagtctattttcatatgagaagtttaagaggcccagagaagtgaagtgacttgttacctagaagcctgtttttaaaaaaaaaaaaagtcttatgcatctgaaactcttcgtaagagagtgcacgtcagtatttttgatctaggtacaggctgtccgagggatattcttgactcatgttcttttgccagttgcctctgattatatcacataagagggcttaggcagctttgcaataatagttctactaattattctccaaaggaaattcctcattccactgcaaatagatgtgatcttaagactgatttcccccagaatcactacaatatactcttatctaaatttgagcacagcatctaaatattcattttattta

SEQ ID NO: 51797 - DNA, 2433 bp, Homo sapiens
actcctccttcccccattccacaccatatcccctcaaccctccttctattcagacgttaccactgggtcaatccgttgaaagttacagctaaggtgatacctggggtccaaaagctaaatatggacctacgctatcaccagtcccttccagttctaaaactaagtccaagccttttgcagcacgaaagagatagcctcctctcatctaaagttatggctggtaaggctgagacgaatggaaatggatttcaaagacatagatttagaactcctgaaaggcaggagacagaactcaatactttcatggtgagtggtttatttactgattaaataaacgctcccttagggatgtaagctccacaccggcaggagcttcatcaccagctctcactgcagaccccggcattaaaggagctcacacggtaaaagcccctaccgcccaccacagccacagcggccggcagcccaaagtgggaaaccgcgccggccgtcacgtgactccagctccccccggcaaccggcccgcccccaccgagaccccgccaatccggaagggaggtccaatttggccaggccagggcgtgttccaccggcccagtagccttgctgctgcgttatccctagactcgccccacttgcctcggagtctcaggccgttgcctaggtcctcccggtaaaaccctggagactgctagggagaggagcaagggaggggccagcgcgcagaagtgcggacgcaacccggcggccgcgggcgaggcttatgcagagcttcaagaaacagctagggagaccgcaggagtctccagagcgcgcgcgcgggccctccccggcccgacccacgcggcgcggcgtggtgacgcccgcgcggcctgaggaaggggcggggtcggggcgggcctccgcgctcctcccgccctctctgtgtccctactctccctccccttccctcccccacactcggccccgtcagcttgggggtgccttcgtcgcgcagccttgcgtcggcccggcccggccaggccagcgggcagatgccccgagctgccgccgccgccgccgccgactcggccggtggcggtgtgggaggtgggcgaccagcccggggccgctgagtgtgacggacgcaactgggggcgccgggggctccgcacggaccatgtattttctgagcggctggcccaagaggctgctgtgccctctggggagcccggccgaggcgcctttccacgttcagtccgacccgcagagggctttcttcgccgtgctggccgcggcccgcctcagcatctggtacagccgagtaagtagagccgcccgccgcctttcgccgctgcctccccggcctcccggcgccgtcccacccccaacttccacccagagcctaggactcctgccccttcgtgccagacccacctgccttcgcagtccgcgtcctcgttccaccgaattggccgcaggtacccgccggctgcaggcacgtcctccagccggcggtccggggtggatgaagtcgctgctgccgaaaatccctgagcctccccgcgttggaccgacggccgcggcgtgcagactccgcacgctccccggccgagcccagacttgttcttctctcccttcccccattccccgagggacaaatttgtttaaactttccacaattagaaatccggccgctgtggtgccccaaccctcccttactttaaaggtcgccgttttggagttagggaaagcctcttgggctttacccagcgccagactttacaggcctgtaataacttatttctacaaactacagcctgaattctttattcttcactaaaggtctggttatttaactcccctctttaaccccaacatcccttccccactttcgagttggtctttttctttgctgctgctcttggactcttcggaatagggggttaaaggagcggaagtagaactcaaatctgtccgcggaactcccagttataacacctggaaataataaggcttgggaggagcatggaactgaattctgtttttgctttaagtcctggttatctttttctttcttgtattgaattactgagtagatatgagaaagaaataagtggtggatgggatactccctactctctgcaaacactgctataactttgtctatgagaacgacagagttcagagtataaaaatgctttttttcctccccaaagaaggcagtaccaatcgatgtcagagtgaagtttttctcctttccaagttaatttgaccatgtggggataggttgtgatcttgtccttattaggtgttcgtgaaatactggttttagtttgttaaaatccccaaatctttgtgtgttgctgttccattacctgtaatgcccttgacagtcctcacccacttccctggtaatactggtgatgggatttagtgacgggtaattctggt

SEQ ID NO: 51798 - DNA, 379 bp, Homo sapiens
gtcaaaagaaccaagctttggatcaggtatgtgattaactgtgttgacctcaggaagaccattttatttgtattttcccagcattcccatttctcacccttttaactctattactttctccagagagccttctttataaattcactgctctgaagtcttctagggttcactgttgatgaaagaatggagttcaaactccttagtttgatatcacagacactcccttcttggaatgctctcttgcctcatttctgcctgtcagagtattatctatcctttaactgctgttgaaatcctttctttatgagtcattctttacctaccgtaaccataagtgttcatttttctgatgaactactgcttccccactactgccagc

SEQ ID NO: 51799 - DNA, 452 bp, Homo sapiens
aaatttaaaaagagtcgtaactgcatcttggctaaaaacaaatgtaaatagccataactgcatcttgactttattggccctaaaagaagaagaggagtattaggttagaagttgttcagctgcttcaccttgcattgaactgttctgagagaattcactcaaagtttaaataacttgcacagagatctctgaactcaaagttcatgctctattttggtgagtggtggtgccctttccttctgtggagattagaataagcaatgagtcactctggctgaaaggcaacttcttccctccctcctacccttactcccaaataaaagaacgccctttaccctttgctatttttttgctaatggggatgatttaaaactcctacataggtgaagctcaacatttacctaataatttctgtgaaattcagaagtaccatttcattctaagataaagga

SEQ ID NO: 51800 - DNA, 499 bp, Homo sapiens
aagacatgtcaaaggggctcaggcactgatttgaaatagacaccactggcctaaactgggacaattcatgcaacaaaataaacaatagtaacagaatatatagagtaaaattaaaatacataaagtactgaaataacaaaaaaaaaaaaaaaaaaaggaaaatggaaagccttccttcttgcagaattccaactatgacctacaggcagaatgatggaaccagaaactcagcagtagcatttggtaaacattgtaataaaaatgcttggggacaagagtcatcaatgattgctaaaactaggatcaaagttttatgacaaacaggatatttacctaaagtatctatcactaaggggaaatcagtaacttgtacaaagaaagaaatagtagaaaaacctggcaaataaataccttaatcaaacgatgaaaatgtagtatcattaataatgagacaaacagataccacatgcatcctgatgtgatgcactgaggacacaaa

SEQ ID NO: 51801 - DNA, 573 bp, Homo sapiens
atctctagttacggcatcaatacacaaaaggaaaaaaaaaaaggaggaactaataaaagagactaagagtggtaaatattatgatggaagccaagtaacatgaggcctgaaaactgactgaatttgccaatgtgacctttacaagaatagtcgtggtgaagtggggaggctaaagctgactagaattgttcaagaatagatcacatggtggatctatcgattttggtggatctcggtatatcaaggtggatcacttgagcccaggagctggagaactgtgagccatgattgcatcactgcattccagcctagatgacaaagcaagatcctatctcaaaaaaaaaaaaaagcagttattcaagactatgactacagaccattcttttgaggaattctgcagtagagggtcagaggaataagactagctagcaggttgtgataaaagtggttttctttaaaatggaggaaaaggtatgtctgcatgcaaatggaaatgatcctatagagagagaaaaattaatgatggaagaaagaaaaaaattatcatgaccagtctcctactcatacactaaa

SEQ ID NO: 51802 - DNA, 1303 bp, Homo sapiens
cacttcatgagctttgacacacctgggttacaatatctttgacttaatcacctttcctagcattcttaaaggtcttaaaaaaaaaaaaaaaagtcaaaccttacacagtcactaatccaaggggcctaaagataaactgcagggatctgagaatttatcagactgcataccaaattttgactgggcggtgttccagaaagagtttctatagccttcagatgtgggggctgtaaccctcagaaagttagaacagtgcactagcgccttccaaaactccccgcccccaaagcgaatttatacaacagtctaggtacacaaatttccatctggaaagcagaagggctaagcaaggtaaaaaggggaagctgttccagaatatggggagacgactcacaaccaaccatctgcacgaagggcagacagtggaaagcaggttcaatctacctggcaaccccaatctgcaccacgagcttaaccggggacaggcaagccccaagtcccggcaattcagaccccagaagaaggacaagcaaggtcaccccaccccacgtgcagcctgggaggggtcagcgagtcccagcggtccggcaggggcgggtgcacacaggtgcggtgccccggagcctgcgcaggagccgcaaacggacgcgcgggccgtgccaggagggagcggccggtacctggcttggagcgcgtcgaactccccgcggtgtccagcggccccgcgtagcacgagctgctgcagcgagagctgcaccagcgtccgcagcgcgatcaggtagagcgcgagccccagcgcggcgcgcacctcagacagcccggtccccgcgcccctgctcgcgccgccgctacccccggggctcctcttccgcgtcctcccgccgccgctgcacccatccaccagaggctcctgcgctcgggcctccctctccggcggtggcgcggccgccgctccctctcgacgctctactccgacgcggtgccgcctcacagcagccgactcagaaccccactccatggccacgagcctcagctgccagcccaaccgccccaacccgcgacagccccggccgccgccgacgccgccgtcgctgccgcagcgcctcctagtgagcggacggaaactgcagagggccaaacttcttctgattggcccgtcccgccgcgccaagacccagcttctttggcagttctcgggtgcacacagctgcagggccgacccagcagcgggtggtggatatgccgtctcccgcagggcttttccagccctctgtaggacggagattgccaaatgtaaagacac

SEQ ID NO: 51803 - DNA, 1622 bp, Homo sapiens
catctatcaaaggtgtgatttcaaaaaatgcaaaaggatactcatctgtaaaaatcaaatatatggaaatgacttaagcatataaaaataagagttaaataaattatagtacattcagagtttggaacgtcatatattattaaacacaactttaccaaagtctgtttaataacgtgagggaaatgctcacattataaatattaagagaaacaaaaaaaaaagacacaaaatggaaatagataagaatatactagtgaatagtaaataaaagaaaggaaagaacactaaagcaataacagtggttatctctgggtgattttccccctctattcatttctctactttccaccatttctgccatgagttcagtgttccctttaagagccatgggcctggcatcagtctccagcaaccctgtgcctaggaaggcacttgtctgtagatcaccatcattttaagccttaggaaggcagtttataaattgattccaacatggatgtgatccaggaggggaatgcaatgtcaaaaagctgatctccagcctgtattcctcaagcacatttctagactaaaaagtttagggtcaagattcagtaattaatcaattgctgaaccaattaaaaaaaactgagagaattttcacttaatcattgttctttaaattcagtctgtgacctgggagaagaattggtgcatatactttttaatggctttggattttgaatttacttttccctccttcatagcacattcctcatacaataggagaagaacccatgaacccggaagtctctagggatttatttgagggtcacacacccagggctctgtttgactttctccactgggctgcagtggcaggtgagttaggacacaggaggtgactcagcagtttgggaatgagagtcactgactcatgtgaatttgctccatgctgaaactcgattgttttagtgaactaaaacattaatgagagtttacattgccagagctcagcacatctaggtgtgcgcacctggagacccccagcacttcctgagcccccctctacgtagctatctcctcctgcagccccctgaagccctcttgcaggctgtgtcctggaacggtttcacttggctttcgggctgcatgaccttcttcaggtctttactggcctaaaatagcctctgcagctgctgctttccaagatgcccaaaggagaaaagagacaacaatggatcttgtaggaaaatggcaaatatctctcaaagtgtggtctgaggaccatgtaatatgagaatcacatgaggacttgctaaaaaaatcatcctcctgtgtcctacccacctacttggtacattagcaatccataagcagaaagtctaggccgggcacggtggctcacgcctgtaatctcagcactttgggaggctgaggtgggcgaatcacttgaggtcaggagtttgtgaccaacctggccaacatggtgaaaccccgtctctactaaaaatacagaaattaaccaggcgtggtggcgcaggcctgtaattccagctactcaagaggctgaggcaggagaatcactcgaacctgggaagctgagattgcagcgagctgtgatgacaccactgcattccagc

SEQ ID NO: 51804 - DNA, 485 bp, Homo sapiens
ggctggttgacccatgatcaacccaatcccaatccccaatgccagcggccccaaaggaacctgacccttgatgaccgcccacactggtctggtggccaccgctggctctttaagatatgcttgggcccttgaagcttctcttaattaactgacaagcagacactgggctggaccaattaaatgagctcagggatgactcactggaaggaaatgcagagatacagaaccagataatctgactcacatggtcagcctctctaggttctagcttatttacctgcagaatgtcagagataatggatttatccgacctctgactataattctaaaaaatcccatagctcggatctccctgtcagataataagtcagttctactgaattattttttaatgtaacaagacaaaaatgctacgtagaacttacttctttctgagacagaatctcgctctgtctcccaagctggagtgcagtggtatgatctca

SEQ ID NO: 51805 - DNA, 628 bp, Homo sapiens
ggttactcccttgggatgtcacttttgtccccatggctgaagatgttgtgccatcacctccacatcttgccaacagaaagcaggaggtgaaggagaggctaggaccgttcctttcaaggggcacacgtcacttctgcttattgctccacccccgccccccgccccgtggcacccaccctggtgggtatcattcttgctgtgttgtaaatgaagaaaggtttagagaaattaggaaatgtgtggccagacatggtggcgctgggatttaaatccaggtctgtttgcctccagagtccatgctcttaagtgttatgctgcaggccagcagaggcaaatatttgcacaatcccatccgacgagaggctagggcagaggtcagtatctctcagtgtgaagctggaggctgatgctagtcagctcagtaggccgaaagtggagttgtcctttgccatgtagggccatcatgcccagctggggaacctcatagccaggtgtacccacaacctgaacaaggtaactttcagggtctagtcaggaagaaaccaactagatggttcaacatagagactttaatataagaagctggttaaacaggcatgggactgagactgaggaggcaaagaaggca

SEQ ID NO: 51806 - DNA, 1546 bp, Homo sapiens
cccgtactggccgctggcgaacttctcttccatctgcagcagacacatgccctgtccgggctgctgcgggaaggcgcgaccgccccggcccccgctgcgcggcccttccgccacctcctcctccgcggtggcaacgccccccaagggctgcagaaagggggcggtgaggccccggtgcttctcctgcaggaactcgcccaggatgcggtagccctgctgtagctcgtaggtcagctcctgctccttgcagcaaccgcctccgatcaccatcgcctccatctcttcctcctgatcgtccgcgtcctccagcgaggaggcactccttccgtgggccggccctgaggtctgggccgccgctgccacctcctcctcgtcgtcctctccttcggccgccggtggcggccgctcttcctccccagccggctccatcgctcccggcgtcccgggcacactcatgccccggcaggcctaggctgggcggtgtggaacagccgctcgaggtgctgggggacgcgtgagcgcgagccgcttcctcacggctcggccgcggcgcgtagcccccgccacatcgggcctggctctcctcagccgccggctcggctcggtgcgcgcgggggtcttgagctcaccgccggcggggcggggttacatggcgcgcgaggaggggggagagaagaggagagcctaggtgccctcctctcccctcccccccggcggcggcgcgcgcacggccctcgccggcctcacccctccgcaccccgcccgcctgctcttcaccggccaggccctgccgggtcgccgcggcctcggcgccccaccccctcccgggccagcggggggctgggagggggcgaggaggaagggggttctcctctcccctccccggagggggccgcagcggcggctccggctcctcctctccctcacaccccctcccgcccccctctacctgcgggggacacgggcagaaggaggcggtgcacggacggggcccggcgacaactgtcagttagaagccccgctgggcggtgaggggggagaaaggggaggggcagggagagaagggggagggcactcagccccccggctgggaagagctgtggagagaagcaaagaaagaggccctgtcgccatccccggtgcgcatgcgtagtagaacaattcccccctccccccccgccaccatcgtgccccgccccgctacgcaaaaggaagagcttcggctcagctacaggcccagaagcctgctagggttgcgcggaccaatgatgtaatcaatcgtaggccaatcgaacatgttgatggagggggaagcaaggcgcctgcgcagcttaattcgctaccgcctgggaaggtggccaaaaggctttttttaaagcaagtgcttcaagaggaaacttcttttgcaagacccgtgttagccccccaaactaaaattaaagttgctagataacctttgttaatggcaaatgaatagtgagaaagcgcaaaatgtaaatcttctctactataaaatttacattctgttcccaccctttctcccttg

SEQ ID NO: 51807 - DNA, 1324 bp, Homo sapiens
aggtcactataacttcgagggccagctggcgctgcagattactaagcctagagtctccacataacttcaaactcaactgtagagtatcttctaaataaggacccaagtacttaggtacggtatctgcaatctcaacaagggattctagcactgaatcatcatcctggtagcatgagtcattcacagcctgtaagattccaggaagcaagtctgcaaagtctttgaaaagagcaatattattctcattagcaagtacaaatgcagctgcagctctagcggataatgtcctgattgctggatgttcttgatcttgaatacactggtccaacaaccgtttgatgatatccaaatcatgccgctcttgggtcccaaaaatcccaggaaagtgccagaaaacgtgaagtgcaacttcccatagaaccacatttttggagtagattgaatcaataagaaacttcagaccttccggccagtggttagtgccatcctcatctatcaaattcctggccagcactgcaaaaatatcacaaagttttttcctcatgctagcatgtgtttctaacttaacagccagaatcagttcaatcttgacatctctctgaacatcagcaggcagatttggataaacctcctcaaacccagaggacaaaagccgtcgtagcagtgcggcagccatttgtctcacctcataacctgctcttctatttctgacggcatctaagaggaaggtagtcttacacagacctgggatattttcatagatttcctctgcttgcctccgcaccatacagcttggattgatcaggttcttcagaagctggtaaaactcttgcttttctgacacggtcgccggcacccctgcagacgcggttgccgccattgcgctctgtcaaagctaccgcgaccgggaaggagggagggggtctgcggctcgaagcagtgacgtaggcgaggcgccggcggggatgggcggggtgcttctccctcctctgcccagaaactctagctgcgctctggcaggctgcgagctaggttttggagagaggtgagagccgtgtggaggccaatggcatcctccatttgtttttcaataagataaacgtgcacttgcaggcgagagaagaaaagcattgattagaatgggatcatgactttttttttttttggatacaaggtctggctgtgtcacctaggctggagtatagcggcgcgatccctgctcactgcagcctcaacctcctgggctcaagcgatcctccccgcctcagttcccccagtagctgggaccacaggcgcgcgccaccacgcccggctaattgtgttt

SEQ ID NO: 51808 - DNA, 666 bp, Homo sapiens
tgtttcccaggaagaaattgattacaccctctattggtggcagggacctatcctcctttaccctttagactccggagggagaaagccagaagccaacccctctggcagggaaagagttcccatgtctagacaacccacacccactaacacgtgggaccctctagatcaccttcctccattcagtgcccccatcccactcctccagttcctgtttcaggtccctcccctgcttgtgtcactcttccagctgcccccaatcccgcccctccggttcccgtttcaggtccctcccctgcttgcgtcactcttctggccgccccgatcccgcccctctggttcccatttccgtttcaggtccctcccctgtttgcatcattcttctggttgccccccagtcccgcccctccagctcccgtttccatttcaggtccctcccctgcttgtgtcactcttccagttgttcccgattccgtccctctggctgcggtttcgggttactgcccagctgtttcaggccactccctcacctgtgtcacttgcccgtgttccattcccccagctgctgctgcagatccctccccgacctgtggtttctatactcatatactcatattgctcctcctgcctataatcctcactttgcagaattaccatcttgtgagcctg

SEQ ID NO: 51809 - DNA, 2115 bp, Homo sapiens
aaaaacataatgagaatgagtcacaaaggaggctcaagtacccccaaaatgttttcaacaaaagcaactgaaatgttaatgcccattgatcttattagtaatacaaattgacacataataaaccaaacagtgaaacccattgaggcactgggctttaagaaactggcttggatgattcagagagtgggtaataactaacatcttttgggtggataagacctgtcaggcatcatttaaatgctctgcaagcattaatttaaactcatttgatttctagaacacctttacgtggtaggtgattattgttatgcccattttctagatgggttaactgaaggacagagaggttagtaacttgcccaattatctgccatttgtaagtcacagagaacctgcttttccttaagtctgacaacccagtctgcttattttgaatgtgaactggattttggtttcttggtgctatatattagtcatttataactcccctgtgttagcacaatgccctgtactttgtaagaaaaatgaaataaaaaataaatgaatgagtaaaggaatacgtgtgatgatggtagcagtttgaaatgaccctaaaattttctccacatttattttccacttaaaacaataagaggcaaaccaatcaaagtaccgaatggaagtgccaggtcaaaggattcccttctctcacacactgggctgtggccacagctaggacttggcaaaccctcaactcagcttcttagaagcatgatgaggtaaaccgagggcttacttgactctgatgccttaaaaagtccactttgcctactgttgccccatggccctttcaatttgactactccattgctgtcatagttctctttcctccattaagaatgttcataagacctggaagaaattcttccaattggtcagttatcctgccaagtgcaagtatctcaattattatttcagtgctgcctgggagacttggaagagggtgtgggaaggggagaagggacagtgacactttaggcctgtcttgtgcaagccaggcatagctgccatgacttcagggaacagggatttcaagctggggctctttgctggactgtgaatggagtgtttcctcctttctaagttgtctactgtccttggcagttaatccattggtatatgtttcaggaacaaatatgaaactttaatccttttaacaagtgaatttaaaccttttgtattatggtcatatctagggcaggggaaatccttcattccatagcttcctccactcacttctccaccctgcctaaattatgtacaaattgtgtgctctatggaaggcaaggcattttctgctttcacaacttgtggctatacttggcaattattaaatcaatatgtgattcaggaacaaatatgaactttaatccctttggcaggtaaagaagacaagtcttttcatattcagctcaagaatttggtcatgttaaagccatactaatccatagaaaaaaataaagtttataattcatcatattgttttcccactattcccaaatgctcactcatggacagagagaaggaaaacagatacaggtccagaatcttcttttgacttttctaatctctctaattaattttttcactcattcatttattcattcaacagacatgaaccatcttctatgctttatacttagctgggccttgctgggcttgattccaagctgcaggttggtccaataggccagcggtctccaataggccagcggtctcctttttggcatcagggaccagtttcatggaagacaatttttccacagaccggttggggagtgggagatgatttggggataaaactgttccacctcataagaatcatcaggcattagcttctcataagaagcatgcaacctagatccctcgcatgcgcagttcacaatagggttcacactcttatgagaatctaatgctgccactgctctgatgggaggcagagctcaggcggtaacgctcactaacccactgctcacctactgctgtgcggccttatcctaacaggccatggactgggtactgggatttgggaacctctgcagtaggctatacaggacatttctttttccctcacgg

SEQ ID NO: 51810 - DNA, 1460 bp, Homo sapiens
ctctccagaccagatattcttcctgagttgcaagccagctgtgcttccaattgcctatggaacagcaccatttagatatgatgcatggtcactgatcacctggactttaggttacttctttgcatgatcttctctctcacagcaagaccttttgggtctgtaatatctgagactgagataaaaaagagacttgctttatcctgaattctgacacctggagttgcctgcctgcctgtaagctttctctttatcaatctttggactttcctagtccccccttcttgcctaggctgaggccctaagctgctgctcactattcattcctgacattgagcctaatatttgcaaaggctggagtccaaagagatgtcagtattatacaacgtcaaatttatctaagacaaaaatagtcaggttctgcttaaggtacatgacatgatcaaagcttccttaacacactaaacctaaagagaaatgtggcatttttatggactcaactgccaatcacatttgagtaggaccattccagaaaccacagaactaatcaataaagcagccacggattgtgggttacttttgtgttgagcctccatattaatagaagcatgatagacaaaaaagagcatgaactttggtactagagagatcctggttctaatttcaatttcttccagctatgggacttcattccactctgaacctcagtctctttgcctataaaatggggctaatacatcacttagacagggattttgagaagatgggataaggacatgaccgtaagcacttagcacaatgcctagcataaattaggtcaaccagtgttaatcctatttctcctcctccacattcatttataatttaaaacccaaccagcctttttctttcccctcaaaagaggcctacttgtcaaagagtcacactcaaggaaaacaaacaaaggaggaactggccagatgctcccttaggtcagaacattgcagctgtatgagtcctcaaacagagtgttttgtaagttaaacacagccaagagagctaactatgtttctacttgttggtgctgataatatgatattgtgcaatagtggcctttgcttctgttaaaagaattattttattccatgacattaaacaaacagtttggaattttggaatgagccttagctgggacactaccagtttggcctaaacagtatctattcagtgagcaatcttaagtaattatggtaaagcattttaaggagaacaggatgaactgatttagtaattcagtttcatgcaactacaacttatttaatagaatttttcctatttttccctggaactatcaccaagaccccattgctagaaacaaaaacagtaaagtacccaatatttgaaattcagctatttggggcagcagtctctcccttgacacatccttccccttccttgtaaaagaggactaagaggtgatagaa

SEQ ID NO: 51811 - DNA, 2170 bp, Homo sapiens
tggagctgccgcctccgccaggcgacgggaaaccctcggaagtgggtttccgcgcgaaagtagcattgcggccaggcgggaaacgtgttcgcgaagcaggagggcccccggggcctttcccgggcgacccgacccgccaggccgcgtggcgggagctttcctgttgagcgcggtggagcgcacacatttccttcagttctttctcggaagtttaggccgcacccacccgcgccccctttccaggattatacaagtgcacgccagggtttcttatttttggtgtgtttttgagaccaaagaaccatatccgctaagcctgaggaggcacccgccccctcagctctgaaacgaggcctcaaaacggcaaccgatgtggtagccgcgcaatcttccgaaacccaaaggctagagggcgtgcccagtggccaggtgcaggcggtggggcaagtaacggcttttggtagccccgcccctccgacccgccctctccgcgcctgcccattttcgttccctcgggtctgtaaccctctcccgggccgcttcctctttaaggcggagcccggcgtggatctcgcgagatccggcttggcgccgtgacctccatgtgggagctccagctctataagtaaacactctgcgcggcgcagacatggcctcttcctatctttgaggcggtgtctgcggcagcgcctcagagtggttccggtcgtctctcctcaagtcggctagtcgggcgcgcgcgctgagagtcgtcgccgcctgtcgggcccggcgtccggtcggtccggtgggcgcgctcgcccgcctgccgctgagggcccgagccgcagggaaagcggcgcgggccgggcggggcgcggcgcccagagctcagggggagacaaaggggaccggttcctctctaggcgccaagatgtggatacaggttcgcaccattgatggctccaagacgtgcaccattgaggacgtgtctcgcaaagccacgattgaggagctgcgcgagcgggtgtgggcgctgttcgacgtgcggcccgaatgccagcgcctcttctaccggggcaagcaggtgaggcgcgcccgccgcgcccctagcgaggctgggggccggaacagctgggctcctctggacgcaccggtccgagggctctgtgcgccgcgcgcgcagggctcacctggctccgctgcgggtgggcagcccccgcgaggcgcggggtgcggggcccagtcccgccgaatggtggggagtgggtccctgccagccccaactggaggtgcgccgcgcggggtcagaagtgagggcgtccggagcgcaaatatctcgccgtttgtatttggtaggacagcggccgtaggcactgggtgcccaggtccctcgcttcccgcgctcggcggggcctggggcccccagagggcggggagggcagagggctctggcggccatgccaccgcgcgggagacccggagagctggctaacccggctgagcgttcgcctggcttccgcggctcttccgcgtcttcggctctcaaacaggggaaactcgggcattgagctctcaagaataagaaccctaactctgcttcctgactgtggtaggattcgcgcaaactgaagattcgaagggtttccagaacttctggtccctctccctcgccgcctttcctaggtttggaatgtctcgagggaggttagagacctgggcatgaagaaactgtcggtttaaccgggggccgggtttacgaatgccctatataagccaagagttttattcccgaagtgaaaaggagtgtaagactgtttgcttttcttacttctcgccttctaatactcatgtcgttcacgctttaagcatagcactgcagcatagccagcggtgcatacttgaaggctgtctgtgggcatctctggtatttttatggtctggccagtctaagtttttttcctattccacaagtctcttacaatctatatccctagccactcagacccatcgtatttttctttgtcttcatgttgttgttaatacactaaaaagttggcatcctgagttgatagaccacagtttggctccaatcctgtggttttaaataagtgtagctctttgatttggtagaagtagcctacagttgcaaactacttaaaaggaatattttcctccccttcacaggctt

SEQ ID NO: 51812 - DNA, 557 bp, Homo sapiens
actccaatgcaaatgaactaaaataatggccctcttgaccccttagtgatgctccagaaacatttctcaaatgcatgaaccaaatatctgtgattaaatttagtgcagagttctacagagaaggagctaactcagtcctgtttaattgaggtttaaaagagaacactgtgatgcttctttgatcatttatgaatgttatctggtataaccctttgaagtcctctctcaaagagggcacagataagcaagacagcaccactcagcactctggaaggtatttctacttcctttcatctatccatttaacaaatatttacttagtgattaatacacaccaggcagtgtaggctgttgtgattaacaccttgccacaggtctaggtagctactgtcggctctctttcactctcatcccatggaatggtaacttttctcttgctttcccccactacttcattattttagaaagcaactcattacactgaactgcttatagctttcatgtactccctctcccagcctttgtgactgctttctccagtgtctagaacactcgga

SEQ ID NO: 51813 - DNA, 488 bp, Homo sapiens
gaccctgcctaaagaaaaagaaacacttggagacaagatggcatcttccggatccttgcctacagctatgcagggcagccagcagctgtgcattattttgcactctcagccatgaaggaattcaggcaatccttcaggaacctacacagtaaattcttttcttgcagaataaatgcctgcttctgaccttgtttattctgcctcagagcattgcataatctcctggtcctaatgtaccaagaacagagttcagtggcctctaggcatcacttcctaagaatctgcaggtaagaacttgcgctgcttctgcttgctaaattctgcttctcagaatttagaatgaatgcttcctctttacatcattccacataagagcccttctatagcaactcctttgccactgcgcctaaaatagcaacagttttgcactaaccactgcatcaaataaatactttccaatagcaataagatgattttgctgttaaata

SEQ ID NO: 51814 - DNA, 2347 bp, Homo sapiens
caatcacatcagttgcccgacttctagtaaatcctcagacagcttcccttgtaaacaacctccaatcagaacacacctaaaggcttcccttttttccacaataaagctttcctctcctctgccaatatgcaagtctgactcccttgctacagcaagctcattacagcctttgtttctctcatttagctaatctttactgttacagtcatttaatggaaatttattggaatcatcctaaagaagaaataataattcctataagctgggaattgaatgagtcgggaatggccaaaggaaagccttgtcacagactgcggggcctacaggcaggacctggcaatgggcatcatctggctaaagacaagtcgtggcctcggcctggggaacagctgccacggcctagttgcccctggggtcagttcaggagagtgcgcaacccaactagggtgacaaagccaacacctgcagctgcattacacaatgctccctccctccgctcactgccctccattaaccatttagtagaaatcactctggaacattcagctggcacaagtccatcattctgacaactcatctcctcagttctagttgaataatgtgaacattggagggtttagtttctcctctctcttccacaagcaatgtgcaattttgtgtaaactttaatccctgcagtttatctatgattagttcagtctagttcagtctagttgccttgagatgaattcactgaaaagactacacagcgaggcataccatagctaaaagtaactggctttggtcataaagtaatttttaactttgaattaattataaaatgaatacctacactgcagaaaattccaaaactgcaaagtaattaaaggaaagctaaaaccactaataagggcaccattcagagaaatcagtgttgccagtgacacatatccttctagtccttttgttgttgttgagtgcgtgtggatggggaatgcaggattcacttgagcaggacaggattttgaactgaatagctttgcttgtttctctgaataatgacttacttagcagccagttcatgatcaaagtattttgtcaaggcactttctgaattgtccaagaagagggggagcatccttagtgactgatgaaccacccgtcctcccctggttctgtccggccattctgtcctatacatgttaatcccactacctccagcagcctcccccagatttatctagcagagcatcactgctcattcttcagtattgcacttccgtgaccccttcccttgccctagcagcaggcttgagtgttcccacgtctgtgctgccaggaagctgctgcgtttccactggggcagttggcatatggcagggtgattctagtgcaactgggtttgtgcacatctgtaaactggatattccaggtgagtcaggacagaagttttccactttgtacacccacgaccttgcaaaggacaaaatgaagagagagcaaagtagtggatggagtgtggacagtggagctgggctgcctgggtttgaattctgcctccatcacttaccagctatgaccttgggcaagtcatgcatcatctgaatatcacggtttcttcatttttaaaacagaagtattaatggtattttcctcatagggttgtaatatacattaatacatgaaagcacgttaaagagtgtccagtacatggtaagcactacataaatgtctgagattactgagttatgtgtaataagtaacccaagtatttccaaactgatcacaatctttactctgcaatgaagacatttaacactcctataactagctctcactacagttttctctgtacatggcaaataaatatttaatccagaattcctttctgactacactagaacacaggcattcacatgaagccaagtttgagtaatggtgctccactattaaatggaaatgctactaccagagcttacatgcaccaatttgctctccccacctggagaatattcattcaccatgacacgtgcacacctcagagtcaaaattcatcctttgcagatgcatcctcctccactctcccaacacccccagctcactattccaagaaacaagctttgttggagaactggtccatttcagggaatggggggacttctgattgtgcaatattttctgcgtgaatcatcccaaactagatggaacaagctcaaaatgtcacagaagctgctaggtttaaaatttatatggcatgggcatggtggctcatgcctgtaatcccagcattttgggaggccaaggtgggtggatcacctgaggtcaggagttcaagaccagcctggccaacatggagaaaccccatctc

SEQ ID NO: 51815 - DNA, 1353 bp, Homo sapiens
gggtggcggctgcgcccggcctggagcccctttcgctggacagtcggccggacagatggatggacgctcgcgggcaatgaatgggcgctgcgctcaaccaagacactcgcgcaaagttgtggctccacccaaggcacctgctccgcacactttaagcggcgccctggaggcgggaggtgggttggggccaggaagcccttggccaatgaaagtagacagagggggagggggcggaacagttcccgcccccgccccctcttcctaccctcttcccagcccttccgtggagtcccgcttcccctggaccggaggctgccatctccagtcctacccactccgacgctggctggtgccgggggccgggacgctccgtacgccgcccgccagggtgtggagccgcactggggcaagatcaggtgggacagcccaaagactccgggccaagttcctgggggactcggcggagatggaagatgattctcgaagctctccatttccttaattttgaggtatctttctctgtcacatttcatctcagggaaattaatatgggcagatggcggttcttttatctttgcgggagcgtgataaagttactcaacctctcagagcttcagttttctcatctcaacagagctggatgggattttaaaaagagattatatgtacatggaaagcacttgaacagtagatttgaacaccctctctatatttcttttcttttctttcttccttctttctcctcctcctcctcctcctccttcttctcactctctctctttctctctcttcccccccaccacatgtaacgctatggctcacgcctgtaatcgcaacactttcggaaaccgacgcggtaggatagcttgagcccaggagttcgagaccagcttgggcagcattgtgaaaccctgtctctacaaaaaatacaaaaattagtggggcgtggttgcgtgcttctgaagtcccagctactctggaggctgaggtgggaggattgcttgagtcagggagtttcaggctgcagtgagatgtgatcgcaccactgcactccagcgtgggccacagaacgagactcaggaaaaaaaaaaaaaaaagaactgtgtgtgtgtgtgtatatgtttttttaaatatatgtactgtatatacatatacgtgtgtgtgtaaaactacaaaggatattttgttgttgtttttgagacggaatctcgctctgtcgccctggctggagtgcagtggcgcgatcttggctcactgcaacctccacctcccgggttcaagcgattgtcctgcctcaggctcctgagtagctgggactacaggcacgtgccaccacggccggccattttttat

SEQ ID NO: 51816 - DNA, 1537 bp, Homo sapiens
caaggcaggcagatcacctgaggtcaggagttcaagaccagcttggccaagatggtgaaacctcgtctctactaaaaatacaaaaattagccaggcgtggtggcaagcgtctgtagtcccagctactcaggaggctgagacaggagaatgcttgaacctgggaggcggaggttgcagtgagccaagatagtgccactgccctccagcctgggcaacagagtgagactccgtctaaaacaaaacaaaacaaaaaacagttacttgatattagtaaaatgcaatgaagacccttactgctacttacaggtgaatgatcaaaggtcattcctgagatgtgagtctaacaaatgggagggttttggccaccataatggaaacagggctgtccgtgaagagtgggtccagggtgtaggaagctgactagctccagaaaggtgagcttgggggttggtgggagcatcgaaggggaaggacagagcaggccagttgctcctgtgtggtggaggtcagaggtcaggttgagggatctgagctccagagctatctccaggggttgggtgaggggaagtgagttagcatacagtgttcaagcaggctgtttgggaaaggattcaaccacacagatccaaccaaaccttgagggtcacctatacttgagcgagagcaaagctccttaaggaagcaaagaagtcttgagagagaggaggcagggcagcatagagtcctggagaccaaagaggagaaaatgtcataaatggggtggggacactgtgaccagacaacccggtgaggtcagagggaagggaaacaggaaaagactgcatggaatgtgtgcgcaggagatccctgtgacctctgaggtaacaattaaccccaggtcagcccatttgtgcaaggctacagagtgaatgacaaggaaggaatgcacccgattccaatcactgcttatgatggccagtgattaaagatgggaggaaatcccacagtggctcaagggaacaggaacaagttttcagaatggtcagactttgccccccttgtggcattgggcaaaacacttaagtgggtcacctcactgaggcctttcccttccacatggagtttcctggctttgctggccatggtggtgtaatccagcactgcctggacagagctttacaccaacaggtatcagagtcaattccaaagttcactcagtgaccagcttgtgaaaagagcaaataaaccatgggtgttttatctcaaatgccattatctctgcaaaaatgacctctggaatagcacatagaacatcctctatgcattttagaaagtgagtgcattggatataaagacactgcaatggccaggcacagtggctgacacctgtaatcccaccactttaggaggccgaggtgggtagatcacctgaggtcaggagttcgagaccagcctggccaatatggtgaaacccctgtctctacaaaaatacaaaaaattagctgggcatgatggcgggtgtccttaatctcagctactcaggaggctgagatgggag

SEQ ID NO: 51817 - DNA, 792 bp, Homo sapiens
tcaagcaactttcctgtctcagcctcctgagtagctgggactacaggcgtgagccaccatgcctggctaatttttttgtacttttagtagagacagggtttcaccatattggtcaggctagtctcggactcctgacctcaggtgaaccacccacctggccctcccaaagtgctgggattacaggcatcagccactgtgcccggccaatgtcacaattctttaacattgcccacaaagtcctatatgatgtggccagactcatcttggcaactctcctctttgctcagaatgctgcaacagcaccaacctttttccaattcctgtaagttttcgagctctgttcaatctcaggacctttgcacattacattccctctgcccacaaggctcacttcacaacttttcacctagccagttcctccttcagttctctcactaatttgtaacttattcattgaaacctacccaaatcttccaaattaggttatgtctttctgttttacacttttataacaccctgtactttgtcacagctgcacttatgacaattctaattaaataacagttgcttggccatgtgtggtggctcatgcctatcactttaggaggcccgggtgggtcacttgagcccaggaggtcaagggtgcagtgagccatgactggcaccactgcactccagacggagcaacagaaccataccctttcttaaaaagaaaaagataggttgcttcattattctcgaaaatctagctctttaattgacttcattattcttcattattattcactaatt

SEQ ID NO: 51818 - DNA, 2345 bp, Homo sapiens
cctgtaatcccaccactttggcaggcgggtggatcacttgaggtcaggagtttcagaccagcctggccaatacggtgaaacccccccaccgtctctactaaaaatacaaaaaaaattagccgggcgtggtgacgcacgcctgtaatcccagctactcgggaggctgaggcaggagaatcacttgaatccaggaggtggaggtttcaaaaaaaaaaaaaaaaaagaacaaaacgtctcaaaaaaaaacccccacaaaacagaacaaaacaaaaaaccacataacttggctatggtattattcctttcacataatactagattttgctaatattttgcttacagagtttcccgtctagactcatgagcaaaacttgcatacacttttccttccattcgctgttctcgtcaggttttcctatcagggttatgctaggccattaaaaagtttaaaagtgttacccgctttcatcttccttcccccttttattctggaactattaaagactggaattatgttttcctcttatatatcgttcaatttgccagggaagccatggtggcttgcagtcttctttgttggaagactttggactactctttcaatttgttactaaactatgtaggtttcccatttccctaaacatggaaacagaagacctcctaggacgtctccattgcgggagggagactgcagaggtctccggccacaggactgaggaaaaccgcaaaaagacgcggtcactactaggcggagttaaactatggagccggtacccccaataccctgcccggcaaggccgcctcgtgacgtccccgtctgacagagtccctccccatagggccgcgacagaaccaccgcacgatgggacacgcgagggtaagctcaggtctcagcgcatcgtgtgggcgtcgggacagcgtcctgggcacctgttccttccacctgctcaaatctctttcccttctatgaagaagggggctccgggccccatccccagggagcaagaagacgcagaggaccgcgccggttcaggtgccgctggagaaatggaatctgacggagaaactgatctggggcggcagcccgctaggttcgcctgactcactaaatgctactacagtgccccacacggactgccacgagcgggtcacgtgactggactctggatcggctgtgctgtgatggccgcgtagcgcgctgctgtgcgcgcgagactataagcctctgggccgccggtgcctccgcgcggtcaccgcctccacccgcctggccgcttccctcggcgcatgcgtagcacaccgactccaggattgtttcccaaatcccacttccgccacttcctcctcccgagaccagccaagcgcgcctggctgtctgcccttcttgggctcttggggagaacgtggtccgggaactggcagtcacggggaggcagcacaagaggttttcgccctcatgtgctggtgcaactatcgcgaccatcaccctgagaactggaggaagggtgccgcaggcaaagagtggcgcgcctgcagattcggttccgcgcttggggctctcgcgagacccggcgctggagtgtggaccgcgcgtgccggtgacgcgtggtgcagacacgtcgccggtgcctctctccctaggccttcctgggggtgagcttccgtcccagacgtcttcggtcctacactgcttccatttcttttttttttttttccttctttttttctttgagacaggggctcattctatcacccaggctggagtgcagcggcgcgatctcggcccaccgtaagctccgcctcccgggctcaagcgatcctcccacttcagcctcctgagtagctgggactccaggtgagcgccctgctaattttatatttttggtagagacggggtttcgccatgttgcccaggctggtctcaactcctggtctcaagtgatccgcctgccttggccttccaaagtgctgggcttacaggcgggagccactgcacccagccctacgccccatctttctgggtttctgcctggtattgttacatctccaacaggcttaactcaaagctgactttccgcctgtgctgtatctgccccatggtcctttagagtatataaaatataaatggcactttgggaggccgaggcaggaggattgcttgagctcaggagttactgaccagcctgggcaacatagtgagacccccgtctcattaaaaaataataatgcaggcagggcgcagtggctcatgcctgtaaaccgagcactttcggaggccaaggtgggcggatcgcctgagattgggagttcgagaccagcctgaccaacatggagaaaccccatct

SEQ ID NO: 51819 - DNA, 1306 bp, Homo sapiens
gaagaaacttagcaattaccctgcccaaatccattgatcgtgtaatctttcttagctgagaacgttacggaacaaaggcccgcaagggcctggcagttgagacacttcagggcagttaagaaaattcatttcacctttgcagaatgttcggtacgtttggccatctgcctctgacagcacaaaagccctaaatttaataccctgaagagctaacgttaaagtgcaaaaacgaaggttgcaacagcccgacttcgatacactgaaaagaaccaggatacacctgcacttctaattttttcaatttcagcccaaagccggcctggttcaagcattcctcagaaatttccagcgcacgttccccatctgaaggctcacacctgcgggagtagaacacactccacaccggtgccgccaacacacggaatctgcgctcccggaagcttacaacatggtcattgttgaagtgctccccttgaattggtcgggcgtggtggcgcgctcgtgtggtcccagctactcgggaggctggggtaggagcatcgcttgaacccaggaggagggtgttgcagtgagacgagatcgcgccactgcactccagcctgggcgacagagcgaaactccatctcaaaaaaaaaaaaaaatccttagggaccgcccagaggctggtgacacctgcactggtacctccatggccgcgcctctgaggtcaccgctccagaaggtcccaggccggcgtggaaacctattactaagtggggcgggtggacaccagcaggtcccgccctaaaggagtcccgcggccgcttgggcctcagttcctctttcctgcccaagtatctccccagctctgacgaaacaggcaacttccagactgtggcgttagctcagcgactgcactgagccgccgggaagatcctggtcccgtcagccagctgacccacatgcgttgcggaggcgctgaccaccccgcttcgctggctggtggggggtcacgtgaggacctcggggtcacgtgaggtcctcgggcgccgcagggagggcggcatccaagtctttccgcgcgtgcgcgagcgtccgctgtcactcaggtagaacagtctcaaatcgcaccgttagtaccggccccctttgcctttctaccttgcccctccgagtcccgacccaagatcccaagtaatcgtcttccccctgcaccagggccgggaccaggcagccaagaaacgcggagacagactactgggactgcgacgtctcctctcctgttcgctgcgatatgccggcgtcgtgttgagcgggctgcggacac

SEQ ID NO: 51820 - DNA, 2063 bp, Homo sapiens
cagcacgttgggaggccgaggtaggtagatcacctgaggtcaggagttcgagaccagcctgaccaacaaggtgacgcaccgtctctactaaaaatacaaaaattagccgagcgtggtggcaggcgcctgtagtcccagctactcgggaggctgagacaggggaaatgcttgaacctgggaggcagaggttgcaatgagccaagatcgccccgctggagcgccgctgcactccagcctgggcgattgagcaagactccttctcaaaaaaaaaagtgtttccaggaagtgtttccaggttgggtgcggtggctcacgtctgtaatcccaacactttgagaggccgaggcgggcggatcacttgaggccaggagttcgggaccaacctggacatagggaaaccccgtctctaccaaaaaatgcaaaaattagctgggcgtggtggcacatgcctataatcccagctactcaggaggctgaggcacgagaatcacttgaacccaggaggctgcggttgcagtaagccgagatggcgccactgcactccagcctgggcgacagcgaaattctatctcaaaaaataaaataaaataaaaagccgaaggtcttcagagcacctaggaccagcggaggttaaagcttatctacaacagcttgcagcaagcttgctttggtaaacagtctggggccaggaggtacccacagtcctagttacgccaaattcaggccgaagggcgacctgtctccgtgctcctgacaaacttccagcccccgtttcccatcagagcctcgtccaggtgttcccatttaaaggctccacctgcgcagggcgggtgccacacaatgaggagagttttgcaaacaaacgcggccgttgctccaaggtctcgggtaaccgattggcaaaacctaggtcttcccacttagggaagatggcccaagagcaagaaggcgaaacaagaggccgccggacccgcgaagccccgagctcagaggtcgcccagtgctcggccccgcctctgacgtcacggctcggtgggactcccggagcccggatgcgcgctgggactcggtgcagtccagctccacggtcgcgcgtcccacagctcccttcacgtccgttcctccgtttccccaccttgggagggccaggacttccgaggctttagggggcaggaagctgcgagaaggtggcgcttgcttaggtgaggcgcggaggatggtattagagagaggaacgtgactggaagctccctggccatggacgatcgctgggttctaggcgcctgctcgccccagcggttgacggtcacgtgataccccccagtgtacctttcctgcagcgtgttacgtggcgcacagagaacgtcgcttccagaggaccgttttttcgtaactggcagtagtaatctggcggttgacactctcgttgcctgtataggctgatggcccactcacctttttagctgggctcctgacctgtccggccagaaagttgccactggggtaaggtggatggcgtgggggaatagggaagggcctcagcacagtttctgaacacttcttccacaccggattccggaggccgcagatagggaaagcaagggccagtagggcagttttctcttgtgttccctattcttgttgagactgtgaggatggtggagtgaccctctggctgacctttgtccctcctgccaagactttttcttgcaggactattccccacccagtgggtgagtttgcttacttggtgggtgacagtaccgtgaccacaaccaaggatttgacaaggggatgttattacttgcaacaagtaaggaaacactgggggtaattcttaaagcggtgcctccctgaacaaaggtgaaaacagtgcttttattagtcgtatgtagaggtggagcaaaagccgtgctggtgcagttttctatcatgtttctacatacctcgcatgcatagaaaatagcaaataaggccgggcgcagtggctcatgcctgtaatcccagcactttggaaggctgaggcaggcggatcacctgaggtcgggagttcgagaccaaac

SEQ ID NO: 51821 - DNA, 3055 bp, Homo sapiens
aaagaaatatggtgacccaataatcccgttagccttagctcaattaatcacattccatctgtcctcacaatgttcaccccagtgagaaacgagttcaagcgcgtggtaagcggtgtcgatatatttttaaaattctgttatcagtataatgtaacagaaaattcagcatattagcccaactttgctcactggtgtgaagatatgcccaatctttcttagctaagacgttagagaaaacgccacaagggacccagctgggagctctgtaggaagtttaaaaaaaaaatcattcagctttgcaaaacatctgatgctcaaccatctgtctttggcagtacaggggcttaaggtctggttggttccttctgacacctcggaaggcggagttacagaggaaaagcaacaagttgtaggaagttaacttatctagtctcagacgctggaggcacctgcatttctagtcacttcagttctggccaaactgttatcaactctagtttctgagggaccgccagcccaggattcctattggggtcacctttgtgcctccctatcttaagagcacacttgggcgggtcggggcgggacgtgctgggtgtaggtgactcaacaccggacagttttgcttccagaggctgacacgctcctgcgcggtagttgttaaagggttgggacacgaagatactcttcgcctattcgggatctcccattgtgggaaggaggctcagtggtcccggccaccgggtgaagggagaacgggaacacagcgctgtcatcgccggagagctgcgagccccgactttctcgccaggctctccagtacattccgaggctccaccccggtaacgccacgctgacgtccgcgcgtcggaggccgccataggtgcgcgtcggcgcccaggaggacgtgtggcgcgtggactacatcaggtccagccctgcgggaccccagccagcgcttccgggcaaggttctgtgcacctgttttctccttctacgcgagtatctttcccctccggaaagaatgggatatgcctgtgtccaaaggacaagaagatgcgcgccagcaagcctaagttaaccacagcgcggaagttgagcccaaagcaagagcgtgccgggcacctttaagctgtttgtaagcccacgtgactcaccaagtgcgggccccagcggtcacgtgacggcgcgcgcgccctcgcgcagggagagccggcggtgcgcgcgccttcgccgctgcctcccacccaccccctcgacgggagggtgaggcgcggcgcagtgatcgggcggccggggtcctgtgcgcgtgcgcagcgaacagctgtcacctagtgcggaacaagtctcccaaatttcccaaatctccctgggccggaggccactgtcttctcttcctcctccaccgagtcgtgctctcgccccaacccgcgcgccaggtaaccgcttttccggagtctgggggccagggcggggggagggtccggagaggtcttcccggcactgcccccctccgcgtggggcacgggggtgcgggcgtccgggcgagcggcgacgctggggcagagacgctccgtccgtgactgcagcgactgtcaagctggggagggagcggccggccgcggccgcaggggagggatgcgggggccggtgacagcccgctccggcccttaccgaggttcggtacccgcgctcgccgttttcccgggatccggagtcggggtcgcctccttggggcagaggagcgctcgggcggtcctgggatgcggacctcttaacgccgccagtcggctgtggcggactccaggaaggccgggcctggtgcacccctcggggccctcccttccctgggagtgtcacgacccgcggggtgagggtgggagctcctctcctgaccacccgttgcaggcagtcatcccgtcattcggggtcgtcttcagccctcgcggctgtccttttggtgtttctttcccccggcatggggccatttcttcctgcagtgcctggaggaaccatgatgcggtgtagacggcgggtgcttaaataaatgcgagttggattagggcgcgtggactgccaggcacagaacgtggcgtggagtggggacgtggaggagggagccagacaggccggggctgtaggcaggagcttggggttttcctctgtgctccgccagtaaagccagcagccgggattcagatgctttccgcgtggacttgatgctgggctccccctttgctgcgcggtgcaagcctgcgctggctggctctgattgtgggcaatactaccgggaggggttttgtcaggttccttcttccggaagagacaaggtaaacttttttttgcgcttgataaactaaccccgagaggtgatttataaagcactgttcggaaatgtaggttagaaaagcagagtcacttttatcctggtgaaagttactagtaggttccggccacttaggttcacactaaactctgccctattttcacccatttcagtttgcggtatttaaaaaaatgtctaaattccgggcagcttggctttactgtttctatggcaacggtgactaatattctcatttcgaagtgttgtggttgaaaactagtggttttaatttttaaaggtccattttttattaggaagcagtcggctctgctttgcgattatcgcttgctttcttaccttgctggcctccgcgcaacccgcccatagtttgttttggaacggattacacggttgttcgggttttttaggtgctttttctcccaatttcagtgttatgaaaagttttcacataagctttacagtatcccgcaaacttggtaatacagtacaatttaaaccgaagacttatttctttttattaacagactttagtcagttgcttttctaaagttgaaaatcagacccggcgccgtggctcctgcctgtaatcccaacactttgggaggccgaggcgggtgtatcacctgaggtcaggagttcaagaccagcctggccaaaatggcgaaacctcgtctgtaccaaaaattcaaaaattagccaggcatggtg

SEQ ID NO: 51822 - DNA, 1929 bp, Homo sapiens
tgcctcagcctccctagtagctcggatcacaggcacgcaccaccacacctggctaatttttgtatttttagtagagacagggttttgccatgttggccaggctggtctcaaattcctgacctcaggtcatctgcctgcctaggcctcccaaggtgctgggattacaggcgtgagccaccacgcccaggcccagagccattcttctgttgcttagaccagaaatcttgattcgtatttctcttacttctgtcaagaaattttgttcagaatgtatttgcaatctacaatctgagcatttccctctgcccatcatggtccaagctgccgtcttaacttgcctgggttagtgtaaattgcctccttgtcgacctccctgcttccagccttgtcctttttgacacaagagccagaatgtgatttacaatatgtgagccagctcatttctctgcttcagatggtccagaaaagtttctttagagacagccattatctccttaaaggggaatggatgtttgagtaccaagaactggataactaagagggggaggaaccccaggatcagttcccatctcatgcagagtaaatgccaaactccttttctccccagtttcatttctcaccattctcctccttgcttactgagttccagccacacgcatctctttgctgttccttgaagagtccgatagtctctttccttgttgttccttcagcctaaaatgttcttcttccagatatctgtatgattaattccctccttcagccctttgttcctccgaagtaccttcccttgcctaccctgtataaaatagccacccctcccctttgcagtctatccccttacccttggttcttcttcatagcatgtactttttattgtctgtttcattccattagtgtcaggactttgttccctggtgaatgactgcccagcagttaggcatacaataactatttgttgaatgactcagtgatttcctttttcctattggctttttcctctgcctagggaaatgctcgggccacccttgttctttagcctgtcgaagatgaacactgccttctgtgtaccaaatgtttctacaaaggtgatctgtgggcttctaccctgttctcactgcccagatttttctgttgcattattctttaccagtcatgcaagtgaatctgttttctaagtaacttttctgtgtttgggactactgctttccttttcctgaatttggtatcattatgtaaatatgttaacaatttggcacttactccttcattcagctggcaaataattattgcagcagatactgtgagccaggctggggtgccagactgtatgctagggcttaaagaggtggcgagccggcatttccctggaggagctgatggctcagtgggtggttggaagtgccagcagttgggacaggcaactgctataatgaacgcagagggggagttgggaacacggtgatgggtcaggcaggcctgttccagaggattaggaatctcaggggtgtgcaggagtttgtcaggtgaggaagcaggcagaggctgctgtgaggggaaggaataccgtgcagaaacacagaaagctttgcttgtttacagaagcacaagtcagtgagtattgttggagtgtaaagtacagtgcagacagtgatgatggacgaggccatagtagttaggtgagggccagatccagatttttgtttttttttttttttgaaacagggtcccactctttcacccaggctggagtgggagtgcagtggcacagtcttggctcactgcaccctctgccccccggggtggtaaagcagtcctcccgtctcagcctccgagtagctgggactataggcgctcaccatcacgcctggctaatttttttttttttttttttgagatggcgttttgctcttgttgcccaggctggag

SEQ ID NO: 51823 - DNA, 593 bp, Homo sapiens
taaagataggaatgcactgtatatacctctttctgaagagcttagtaaatgtcctgatggctgtcaggagtgcacgtaaaaaacccaacataatcacctgggactgtgttggaattgtcgttctgtgtggaatagttgtgtgacctggggcaaatgacatgtttctgtgaggcttagttttcctacctgtaaagagggcgttcacttgtgcctcacaggttgtgaggatgcgggtggtgatgggagaactcgcctggcaccatgtccctctccccaagtacatatttaggaagtgactcattgtgggtcatttttatgtcagggaactccctgaatattaatttgggggaagactggtggagttcaggcctgaggtgctgagaaacagtgtctgtggggacagtgtttgcagggtaagtgtcaacagcaggctgggcagatggatattagatagttttactgacttctcactcgcattcaggtgtacttttttgctaaaatgaaggcagtatgaaaagaagtgccaataactaacagtgggtttttgtggaccagattgctgagagaaggaatttgaaggagctgttgcttat

SEQ ID NO: 51824 - DNA, 1896 bp, Homo sapiens
cttgaattccctcagtaacaagggcagcatgcattgctggatactccccttgtttttctatctggagccccccagtgtgaaactaccatcgcctgacttatcagctaaaggagtgtatactgaacaatataattttagtaataaataaattggttaacagtgatacacaataaataaacttgctagagttaattttttttaggtcacagtaatttgcttattacctcttcatttagataacaaggacattttatgtacttaaagaatggccatcaactaaacacgcatgcatgaaaattagtcattagttttgttgggtctgtggatgtcagtaagcaatagtcatatatatatatatttttttttcataagaaagggtcttgttctttcacccaggctggagaacagtggtgcaatcttggctcactgtagcctccatcacccaagctcaatcagtccttccacctcagcctcctgagtagctgggactacaggcatgtgccaccacacccagctaatttttgtagtttttgtagagttggggtttcaccatgttgcctaggctggtcttgaactgctggactcaagtgatccacccgccttagtctcccaaagtgttgggattacaggcatgagccaccatcctcagccagcaatagtcatatacatttggcagtcttatatgagaaaaatatttactgtggagctatatataaaaactatatcaacctattagagaattgtaattaattgtctaaaggtagctgtccagttgaaaagatatcctaagcaataatatggtcagtgccctggctgtgccctgcagggtaaagagaggagtgaggacagaaaaagtgtcagtgattcatcagagaagtgagctcatttgggccgtgactattgtgagtcacttgttatctgcagagtacaaatgctatgagaggccttggtgtttggggtggggccagagggagatgattagaatgtcatcaggcatgtacttcatgaaagagaaagtggcatttggtgctggattccaacaggtgtgtagctccacatgagctgtggtcatgttccccttcagaacagagtggaagccggagtgcagagggaggactgtgtgtagcattccagtgaccaagccgactctcctgtttctgcggcacagggattattagtttcaattagggtttggatcatattcttagggccttgaaatggactttgaggaagaatctgtaatccataagcttagtaatgccccctcccaccttgttgtgggcccttgagaaaacttttgttgaaaaaccatacatttgggtcatagggagactgaagtttagagagatgctacagtgtatacaattgaagcaatcatagcagtagcagtagcagcagccactattcaaaccttttctaatttagtccttacagctgttatttggggaaggaggaaactgaggcaaagaggttaagtgtctccccctggtgcacagccaaagcagcagagccaaactgcaacccgtgtgtggccatttctactccttcattggttctgacccctgggatgattttgtctcataaaggacatttgaccacgtttaggggcatttttttgattgcatgatgggggaggtgccaatggcatcagcggcctctgccaagggtactgcaaaacatcgtacaatacacagggcagcctccactacaaaggattatatggccccaaaatatcaatcatgtagagattgaggaactctgcactactgcactttgtaaccatctttcatgcattaagttttcctctttggtgtagagctaatttaagaaaaagctgtttatcttattgctgctttttaggttgtacaagcaagtgtagggagttcatttgtactt

SEQ ID NO: 51825 - DNA, 1985 bp, Homo sapiens
ttacaaacttcgcatttctctttggataaaacaccactttaaaattgcacaaataagggccaggtgtagtggctcttgcctgtaatcctggcacttcaggacgcctagtggggaggatcgcctgagcccaggagttctagatcagcctgggtaacgttagctgagcatggtggcgtgtgcctctggtcctggctacttgggaggctgaggtgggaagattgcttgagcccaggaggtcaaaactgcagtgagccataattgccccactgcactccagtctgggcgacatagggaaatcttgtctcaaaaaaaaaaaaaaaggttgcacaaataattatctgccccagtggaaacactttagtctgctgctatagaatactttactgcattgtgtagaagtgggaatggaaggccttctgtgtcagaacaactgaaatgtttgtcaagaatgcagatttctgggcctcacttgaataatcattaagccagaatctttttttacagggtccccagatgtttctcatgcttgctaaattctgagattcactttgctatgccttgctgccaggagatcagtgtcaaactccagacagacttttacctggatccttgctaattttcagtcatgtcgggcctatttaaatgtaaaaatgtcataatgtattccttctggttagcttaaatttatatatcttaaatgggttacattagcttcataatttaaaagatagattttgtcgaattatgtgttgggttaggaaatcctcttaaatgaaattaaattatctgcaagcagagggtgctgttgaattggcatctgaatttattatctttattgattgaacatccttgcatttgaacttatgccagattcagaaggcctaggcagtgcaggaagtgcttaatattacagtggtagtttatcctttaattgtctggaagctggggtgttaaactctgttctccaaattgcttttcatttgcaggatttcatgcacatcagttctggaatggcacttccttttaatagtttgagtacattgttcaaaagagctgcagcatgtcttttggtgactcattagattttggctcacatctttttgctttcatcacctaaattagggtatgatcaaatacatgaaaactgctgtgtattttggcactcattttcattgtgaaagttaaatatataggttacttagggataaaaatttaacttgaatattctttctgtaaatgtcctctaaaatccaccagcaacacactttttgtcaaggtagaggttttttttttttttttttttttgcctctgtgcaacaggggaaacagcacagcatagggaaccattgatcttaggaagagcttgttagtagatttcggcttgcttaggtattgttaggggaagggttcaaagaagagtggttttggtttggattggatgctggcagaatgtgggggcaattgtatgatctggtatcttcattttagctatacaacaaggggactggagcaagctaaaagtgtaattagcaaaaacatgggagttactcaaattagctggaactagaggtgttgggttattcctgtggtttgtatagtgttcttatttttgcatgtgtttcaatgattatgcagtgatcttgtttttgtcttgctctacattgtgatcatccagggaccttatgtgatctccttctcactctctttcttgctctacacagccacagacataccttccacctcttactcactgcacgaacccgtggacccgcacacatactcacgaaaatgctcacatgctcataaaaatgcttacacacaaggaagcttgttttctctctcattttttccttgttagtcaattgatcttaggtaaacaataatataacatgaatataatttatcttttttctgttaccaccagtttcatccttcctttgaaacaattaactaaaccaattttacctgtcaccctggttgtgaaa

SEQ ID NO: 51826 - DNA, 370 bp, Homo sapiens
cctccagttttatattccattgttaagtgagaggtttctttccattttgtgggaggagggatctgtcatcatgcaaactagcggttacttatcagggttgttaatggcaaccaacagaaactgacattgatttagcctgtacagaaatttagtgaaaggttattggggagcttccagaatctccaggaatgcagaagaacaaaggtcagaaaataggcaagaacaaaaaggaggctgttcagctgcagctatgggcaagaccagaccacagatgccatccaggaaggacacactgcctccccttatgtggtgagactggacctaacctctgctgtaggcctgtgggtgctgctgctgctgctgctgtctg

SEQ ID NO: 51827 - DNA, 585 bp, Homo sapiens
tcaaaaataagctttcccaagtattgccccgaacatactagtgaaggaaagggatgagaggagaaagccagtttgtttagggcactgggaaggttggccctcttcttggggagagtagcaggagctggtaaatattgatatgggggaagggtatgattgtgtgaaattcctgcaatggacacatgagatctcatcagttcccttgtctgtgatgtgagggaaagccaattcctgtggaagtttccagttctgatggtcttatgattctgaccatggccaactcccctgcctaatggaccacattccaatgagccagcccttgccaaatactctttctgacttgcactggaattgctgaagctccctgctgagtgttccctaccagcatcaagttgactcactgatctggaatgtggcttcctgagacacagcagaggtgagaatgaggatcagtgtgatttggctcagctttaataacacagccttccccatgcagcacagcatcaactgaggtgagacaaaggaaaatcaaagaattattcatgttcacccacagcacatcaatctgaaggtttaaatgggttc

SEQ ID NO: 51828 - DNA, 1050 bp, Homo sapiens
ctgatatacctgggatcaagtgactgtcatttcctgaccatgaacacaatactcctcgttgcctcggtttgctccacagtaaatactataatcatacctacttctaacagctattctgagaattaaaagggctgagtctaataagggttctcaagaaatactaacttaaaattaaaaaaaaaaaaagaaaggcgttccaacaacttcctctcccaccttgtttgaggtgcccccaccacctgaccagcggcagcaccccgcctccccgcctccccgcccacgtggctgctccgtttccttcctctaccccgcagatacccaacccgcccaagtgctgtgccttgattctcactgaggccgatgaccatctgcgtaatggtccatggactcggggggtatcccatcttcatgggcttccgtgccacccagtacacgtacccgcccgcccccatcagccccaacccagaaagcacgcgacagctccagcaggtcttcaacaggcggtgttctgctggggaggtcggcgctccgggtgtagctgggggcgcaggtttggcgggcgcggcggcggtaccgggaggcgcagtgatataggactcaaaaggctgggacaaccgagaccccatgctctggaactcggcctcaaccttgggcgtctttggttcaaactggcgtaaacgacgcaccggaaggcagagcgccggaaagcagaatgccgggacgctagcgcagtgcgcggaggaatcttaagggctgctgggaaatgaagttctcctccgcttcagaggcggaaaaggtgaaagaatgctgctctttcctgctggatttctctggcagcaacaaccttgtatgcgctggaggacaattccagccctcctccccgccgccccccccgcccccactgttttagaaattctgtaatcgctactcactaaatgaatcacctttcagtctccttaaagaagtctggctctcttaagtttcctgcctcacatgaactgcgagaccttgggcatgtcatatctcctatccagaggcctgtgaatcaag

SEQ ID NO: 51829 - DNA, 889 bp, Homo sapiens
tgcttgagaaaagcagagggaaaaataaaaaagaaactttgtcttgcacctgaggtaccagctcagccatagtggggtaaagcaccaggcaggctctccgggtccccagcatcctggatggcatttctagacctgccctgggccaaagagctgatcgccttgaagggtgagtcccagtcctggcagccacaagctgactgaagagcttttaggccttaagtgaacactggcaggagcttggcagtactccctatgggcccgtggtggtggccatggtgtgatgttcctctatctgtggaaaggggaccgaagagtgagaagcactatgtcatatggctttattgccagcccagccacagcagactagaacaccaagtagacttctaaagtttttgactccagtccctggctcccagatggcatctctgaatctgccacaagcctggcagaactcaccacccttaaaagaaggcctggatggctttgccacctgcagactgtagagccctatggccttgagcaaacatagatagtagccaggtaatggttacagcaggccttgggcaagactcagtgctattcttgcttcagctatgacacagcatagtcccagtggtgatggccacagggttttttctatgacctcacccttggctccaggcagctcagcacacagagacagactccatttgtttgggagaaagtaaggcaagagaacaacagtttctgcctggtaatgcacagaacttttctggagcctatccaagaccaaaatggcaaaacatctacaagtctccaagaaccactgtgctattggggttgggatgctactgatggcagtattgtttttcctactgattgacagtgttgtcacagagtaaattcttaa

SEQ ID NO: 51830 - DNA, 664 bp, Homo sapiens
gttgaaatctttctgaaatatagcatgtacatgctcttgtcttacacaggcacatatcctatagaagaatcaataatctaagctaagcaataatagccatacacgtaacagggatttattttttaccatcacaaatatttaaaggttataggacttgcatgtattatttgttttccttttccgcttttgattctgtgtggctccgttcgtaacagtgctttgagggttaagcccactggtggcagatgactgggtcagatgcattcaaaaagataacacttatccaaattagttggagtcataaaaaacactgtttctcacattcctgtctcctattactgagtctgctttattggttactgatctttggctcccattttcagttatgcctccaggatcctccccagctggctcccagcccctcagtgaacttctccttttgaccctggcagactgccatgattccacctctgaaaccacaaactaaactggacttgttctttcttctgcaatgacttcacatactctgcatttggtcctgctaagccctatattgtatcaggcagagcaatcaaaaagcaaacctcaaagaagtaaggttttatatacaaggactcttgactttccacttactctttacctttttaaatttcattccttccat

SEQ ID NO: 51831 - DNA, 2501 bp, Homo sapiens
cccaagagggcatccactcttgtctgcaagaaacatttagaaatccccctttcccctaagagtggaggccaatcccaatgcagtcacctcttctttcctccactttgtgagaaacaactaactggcctggctcttgactgttttagactttctaagtagaaataacaacatccatccaataagttccttcaacttcaggaaacagagtctcgctctgttgcccaggctggattgcagtggcacaatctcggctcacggcaacctccgcctcccaggttcaagcaattctctgcctcagcctcccgagtagctgggattacaggcaactgccaccatgccccactaatttttgtatttttagtagagacggggtttcaccatcttggccaggctggtatcgaactcctgacctcgtgatccacccacctcggtctctcaaagcactgggattacaggcgtgagccacccatctggcctgaaaactaactctttaacaaggcaaaagtctttaaatattctgtgatcatagacagttacaggatttgttgccaccactttggcaaacatgaaagtcactgtgaaagcagaaaacacatttttagtggttttggttttggttttgttttgcttagtaagcatttttcagtctccattatttcataaatgcacaaggggctacacccttcttatgtttcttactctgtaccaagttgagtcactgaaagtttcccccagtgatttagtatatctggtctctttgatttttgcccctggaacattcatccatgcccaggtaatgtctgccttagaaagggctctagtaccctaactgctatcaaagcaaactcagatagagaaataaaaggctataagaactggaaataaaatgttaaagtacaaaccaatataatcatgtgttctgacagagaaagtatactttaaattgtgcacagccaggcgctcactacaatttggaaattctcccagagagagtagaactgttacatttataccttggttggaaagttaaggacatggttgttgaaggctaatgttaaaacgctaccacaggagaagggatgattcactgagataaagtaattatggaagtcaaacacatgcttacaagtacagtatcaataacaatattattgaggacttatttgtgttatgcattatacctcacagccttcggttggggctattatttttatacccaaattagacataggaaaccaaagctaacagagattaagcaatttgcccaaggtcccgcagctgacaatggaacagaactggaatccaattctgttaaacttcaaccccctcccatcccccaaaaccaccagtgctgcagtcatttacttaagctacggcaatttaacaggttagaaagcagaaaggattaacagatttccattcctccaaactaagcccagtgttcacacagcccacactggaatctttcgaaaataacatttctggtcaagtcagtcctcggtatgaaatcttccaatgctttcccatctacagctgaagaaagtacagaggatctagtaagacatttaatactcagggttctgtttccattttactcaacagcccacaccccacagcctcttcttgaagccctcttctctcccggtattctactctactttaatatcctagttttcttcttaccacttgggcctgttctttctcaggctccttagaagtttcaccccctttgcctgacctctaaatgttcagtgttccactgaaccccttcttaaaattcctggatgatttcatcccttcccacaaagctttaattgccatctttggtttcaatgattcacaaacttttaactcaacagcaattgtacctttgaactacagaatcatgtaatacatagcccttccccaccttgcatgcttcatggaaaccttaaaccaatagtttccaagctgatttccttatccgccagcaagtttatatgccagccttccccatctcaagaaatcacaccttagctgggtgtggtggtggcgcgtgcctgtaagtcccagcagctcgagaggctaaggcgggaagatcacctgggccagggaggtcgagactgcagtgagctgtgatcacaccactgcactccagcctggggaaacagagtgagaccctgtttcaaaaaagggaagggaaagggaaaaggaaagggaaaggaaagggaaaggaaaggaaaggcggaaggaaggaaaccattttgttacaggaaaggagtcttgatccagaccctaagggagggttattggattttgcgcgagaaaagattaacggtgagtttgcagtgcaaagtgaaagcaagttcattaaaaaagtaaaagaataaaagaatggctactttatagacagagtagtcccaagggctgctggttgcccatttttatggttatttcttgatgatatgctaaacaaggggtggattattcatgtcttccctttttagattgtatagggtaac

SEQ ID NO: 51832 - DNA, 1483 bp, Homo sapiens
aaatgaaaatcaacgtccagagaagcaatgcaagttttctacacacccacataaaagctacaataaatctatgggaaagcaaataatctttggtttgttcgtggctttctttttaaattgtttcttacaactttgactcttcattataaaagatgcgttcccttccctacggaatgaatgtgtgtgttaagtacaccagattcccgcagctgaactacgagctttgattctgccacgggaaggtctcccaaacaatccccctcctctatggcagctgcgtagactttgattcctgctatttctccttctccccactagttcagaggaaagaaagaaaaagaaatcgccccctcaccgtagtcagccctccttaaaacagtaatccctgcctttaaaaaaggcggtggcaggatccctgggtaagggtggattgccccaccgctccaccatttgcccccaatactacgcccaccctaggaggagagagcgggggtcgcacaaatacacatacccggacacccccattctctagagtcgcctctctcccgggtctgaggtttcaggcgagaagtgaacccagcaggagaggacctctgcccgaggaggtccagaggagcaaactgtgcgctccggtgcccgggcgccgggctcgcggaaacgcgagcgtgtcgctctggctcgggaggcgccggcagccggagccgggcgcagggcgattccggagcagcaagaggggaagacaccgcggggcggacggggtcagttccagggactcacctggtcatgttggccccgggcagccgccgccaccgcctcccgcgccgccgccaacactttcctccagcgccttcgcgccccgccacggccgcgccgccgcctccgggcggccaatttaatcccgcggagcagcggccgccgccgccgaagcccccctggtcgccgccgccgcccagccctcgtgcggccagcccagtccagagcgaggaagtggaagagagtcagcgagtgagtccaaaaacccgaaatccagcatccaaggcagcgcgtccccccgccctccctccacccctacccccttttcctcctcctccgcctcctcctcctcttcccgggccgtcctcttggcccttctgagcccgcggcttccgcggcggtttctcctcctcccgctcctcctgctcgccctgcgcccgcttctctcgctgccgccgccgccgctgtttgtctcctccccctcctcctcctcctcctcttcctcctcctcccgctcctcgatgctccgccgctcgcggctggggggtccggggccgcgtctcctctcctccctccgcctctcctctttcctccttcctgctgcctcttcttttaaagcggattctttggccacaaatagcaactcggctgcccccctcggtgcctccctccccttctcttcttccccccaaaagtgaagcgcacgcgaggtaaccagaaactgaggctc

SEQ ID NO: 51833 - DNA, 911 bp, Homo sapiens
tttccaaattcttttggttcaccaccccaaccttagtaatgccctcgtgtgtaacaaccctccaactattctggttacagttgctgggaaatttgtctgtcaaaagacgagaggttccaaagagttgggcacttttcttctcaggcaatagaaaacagggttataagacacagacatgaaacacacacacacacacacacacacacacacacacacacacacgggagttcagcacaccatgatgtgctggctcttttggccttaaggaagcattgcaggaggaggaagggtggaaccctcagatcacctgacctaaatggcccctctggctctctcagaactttaccctctgtcctgatagcgcttcaaagcgaacgggatattgggaaaaggacacaggcagtttgccgtatccttgggcatccaaaagggtagaaaggctttatgccttttattccctgcctgctgagaagaaaaagcagacatcccgtttgagaccactaggtgccccctcctttccctgttttctgtcttatactctttaaaccttcaaataagtacacgtgttgctaggttcataattaaagcgttggcaatgcccgctcccttgctttcaatttcatttgtacaaatgttcccatcattctttttaaaagccctgggcatatgttcaaaacatacaaccaaaacaaataaactgcataacctaagccaaacccaccaacaactggaacatccttcctatttgggaagactactctaaaaagctacttaattgcagtatattctgtgaatgaaagttcacggagctgaaaaatggaagtatttatgttagcatctgatcactaaggaaatgtggggcatacacataggccctagaatcagctacttaagattcaatggagtaaatt

SEQ ID NO: 51834 - DNA, 1145 bp, Homo sapiens
agttacatgctccttaaaacgtaatgctaatcatttgttctgtaaatgaaacttcaataatctttattttaattccagcaccctgagagaccagtcaagatccctccatcctgcaggtgctaaatgtgtgcttttaaatatgagacgggtgccagaatttgctctcaaaatggaagaagttatgtatctggagactcatgatgcctcatttgcttctttgtgtcctgcttgccacttctctctctgtctgaacaaggaagatgtggggacacaaatgttccatatacttcttctccctaataaggaaaatttctactttcctcctagaatgaatttagattttgatacagcatctgattgaattttgatgtttagccttttcaaaaaaatcaaagggcatgagcataatattggtgcagttttgagaagatgatagtggtggaccttttgccctaatctctggccatttagaattcagcaatgtgatggcccagaagaagacccaggaaaccagtcatgataaacccattatctacatcaatgattgactcagaaaccaaggactaagccaataaagcttccgaaatgacagtaaatatttgagaaacggacacatagttggatttgagccaataaggtacagaaggaattgagcctagttatttctaaaacaagtgtttttcctttttccaaacttttataagaatttcagaagagaaagagtctctcagcatttctcactggacatgcctgaagaagcatgtagtcttaattgctactgacatcatcccataaccacaatggaaaaggactggagatattgtctgagaggtaagataatagagaacagccattggatcaaattccctgaaagtccacacctccttctagtcttcctactatgtgagccaatgaattttgttttaagttagtttgagttgattttcttatcacattcagcccaatgtaccttatatgatcatggcaactgagacaggtcctcgaggaagcacgtatctgattccaaatgccaaacacactcactaagccaagacatacttgctttcatattatcttattgtgacaatggctattgacacaacactggctttaacacaggaatgccttcattcattcatttatca

SEQ ID NO: 51835 - DNA, 3412 bp, Homo sapiens
ccagggcatgtagacggagttgctaaaacattctcagttttataaaattagttaaattagagcttgggcatgaaaatgttattccaacagtattcatcgagtacctcacctatcatgtgacaagtgtacaacatcatctttctttccccagtcacactgtgcacatgttcattcatttaccaagtataacggttgattttacagaaatttaccaatattgtagggttaaaggcatgctttcagaaattagatgccttttagttcatattcccttggaaatttactagctgtgtcacctgggacaagtcacataacttctctaagcctcaatttccttctttgtacaatggtgatagtattagttctaggtcatgagttttgtcgtcaggaacagataaggtagtacttattgaatactatgtgtggaacaaggcaaacactgagaaatattagttattatcattagttatcatgattgctaattcataatacagttagaaatgtgtggagctgcagtgtaatggtagaataactgggctgccatacttaggaacctctggtatattcagagagagaagtggtcccagtaacagggacgtgtactaggacattgtgctttgcgtaggcagcaagatcagtaaaagaaatccaggccaaattctgacatgggtacccagaaatctgacatccaaggttcaaagtgcagttggaagatagaagaagatgtcgtgcattaaaaacagagctgaagatcaaatattgaagtattgaagaaagcattctagctgccctagctccattttaaagatctgttagtcctgaggcagtgactcttcagtctgtgggagaaataaaggctcaacatagactctggctgaagccagagacctactttctagcttaatcctgacattcataaactattgaagctggcaaattatgtgtcattttgatgattcagtttcctaatcagtaaaatggtgataattataagtggtttgtgtaccacacagcattgttgggttattaaatgaggtaatggataagaaagcacttagaaaattccaaggtactatatgaaatcattaataaatctattcattaatatttatgaagttttatcttgttcctgggattgcaatacaaagatgaaaagaaaaattctattgctttaaggcactcattgtctactagggagtcaaatatcaacaatcaattacaattaatatataataagtagtttataatataatgaaataccagctgccacaaagacatgcataaggttcagtaaaatccaaagtggaaggaacacctaagttgcctagggggacaggggaagacttcagagaggagctacattgcaagcttatatttgatttatgactgcgagctttccaggtggacaaggaaaagaaaggatgttccagggacaaagggcagatgtacataaaacacaatggtatctttgtggattgaattagaaacaaaagttgcaagtaaatcaagccaaaggccacttgaggtcttacattctttccccgtgtcatcatggtcatttcagttgcagaacatgttgggaaatgactgaccttgatcctggaatactcctcccatttggcctggttctgcacttctttccactaggtcagagttagccttgcacccgcaaatatcactgtctctagtagtcaacagtgagcatgccctgtgctctgacttccaccaggcacatgttttacattcatcaaggcagttcttctgcatcaaggttgaggacattaactgagcaaccactgtggctgatttcatcatttgtgccccatagctgaacagaaggttttagtttccactgcctgctaggctacttaacccttctaagcagaaatattcagacaaagaagcccaactgttactataattttgtcgatgtaaagacatctgcatatgacttcacagcatctggcactgtttgaaacacagaatccaggactgcagtttccatttctctaagtaccccatgtgacagtttagaaaacattcactcaccatgacagcatgaaaaccccacttccaaacaaagcaaaataagaaaaagtatgtattctgcagcaataattatataggaatatatatgaaatttactgtatgtggaaaaatccagtcaatgcgatgtcatttcatgtatttttaaatcatctcccctttatgtcaacatgggttctcataaagtatcttttacattggagcatgtaaaaagagccatttcttctttctaatgcatttaacaaacttttatttagctcttgttatgtgctaaccatcctgttggacaatgggaacaaagatatgagactccttcaaggaaggtaagacgtaagtgaaaaaataattacttggtgagaacaagtcatatacacacgcaggcatcatttcctttgcagagccactgtgtgtggttttgatgaggtggtcagtctaggtgctctgccctctgaacaaccctgacagagaaagcacatgattcagagaggctaatatgtgccaccttgggactttcctatgaaaacatgcaggacagattgtctcttttcacatggattggaaggtgggaagatggtactttggatgtgattttggcagtcatcttccctaccaaatgactaaagataagacatgggggagggaataaaaaaggagaaaaggaagaagagagaaagagagagagagagagagcgagagcactcttaggacatcatttaagctttgtatcaagggtgtccatgtaaaaaattgatttatcacttaattacaaatttgtttctttgatatctgaatgtggggtactaaaattaccatattctaaaataacaaattagctgagtcaaggagggctgaagagaaaattcatctcttttatggggaatttggttaggatgaagaaaagaaactggttaatctacatgtattacgttttaggactcaagctaccaaaggtaaagctttgaaaaactattacaggcatttcttgaaaacagtatggaatcatctgataacactgaggtgatatgaatactcctttaaccggcaatgtggctcttaggaactgatgggcatgcacatcaggatatacacaaaagatttcccagcagcactgtttgtaatagccttgagctagaaacaataaatgtccaccaagagtaaaatgtataaaatatacaatggaataccagacatcaatgaaaatgaataaactataacaacatttacatggtagccttactgtcataatgttgaaagatagaagctagacataggaaatgcataaaatatgattccattcatttacagtataaaaaaggaaaactgagacttgtaatttgggaatacttgatgaaagtaaagagaagca

SEQ ID NO: 51836 - DNA, 574 bp, Homo sapiens
cttgctaaggtcaagcctctttggaaatacatggaaacagtctgtgctatggccaggaccacacaaggccaagggtgtgagggtcaattctgagattctcttatgccctgttactcaaaaatctccatgaaatgtgctccaaacctgttttgagcttggaactattcactattatatttttgctcacttaaacaaacattcattgatcatatactggtgtgtttgccattgttgtgtgatttggtaactcgaaggcaaacaagaatagatatcaacccttgatgagatcacagtcctgtaggtcaagtaggagagaaaacaaatgatttcaaaatactgttttatattctctgctagtgttgtgcaagggaacacaaagaagaagactggcaaaaatgtcctgagagagctaatccccaacctgagtcttgatatatgatcgggatgtctatataacatgatattcaaccccatctaccagtcacaaaaatctgaaaattaaggagttacatatttgcaaggactgaaacttgtcatacattgctggtgacagtagatattggtgcagctatat

SEQ ID NO: 51837 - DNA, 692 bp, Homo sapiens
ttgatttttagaatcccgtggagctttttaaattatcagaactccaaattctgcacatggaactttaagatcgaggttgagggaactcagatccagggagaagaaaatgacattaacattttcagtaaagaaacctcaaaagtttcatttggggaaggagatgcagtggggacggagggcaagtatttttacactaaaattatcagctgtatacaattttagaaaaatcgttttacattgtttagaagatccattaaatatggcctggcacgacctttctaggacaagtcattaaagccctaaatggtatttggaaatgctgctacctcagattgaggtcatttgcattatataataaaacacacagcatactttgcttggcaagttcactggaatggctgaactttggccccttgcatgattttgcaaatacagagtgtacttgttctctacttaacaactaaccccacttaaattaaaacaagctgcccccttttcacctctggtgtgctctgcttttaagtatgcattgtgagaagaaatgttagacttttaatacaacaaactttgtttcattgcattagttttttcactttggtttattattttatattttcagtttttataggacatttccatgtggtctttccccaaggacatcactactgtaattgaggggcccagtacagaat

SEQ ID NO: 51838 - DNA, 1023 bp, Homo sapiens
tccatgcatacatacatacatatatacatacatacataaatttattcaatgaacaatttagtgatactatctaggcagaaaaacactatcctaagtggtaaggatacatggttaataagaccaataaaacccctgtcctatataaattacagtttttcagggagagagacaagtaataaataaacaaatatataaaataatttcagatgatgatatttacacttaaagtggccgctccaggaatcggttgaaattatgacctcagggaataagaatgcaggttgtgccaagaagctaaagatcataggtaagttgtattaacatgtccctagaaaataaatagtcttgaaagctagaattttctgaggtggaaattttttctaaagccctttagcttgggctatttagagttaaacttatttggctctattcaactaggtagagaaaagtcaacacaagaagccgaccgagcactgtactttgctcctttttttgtttgtttgttttgttttttccagccttggtggaatgggagaagaaaaaaaagaggtttggggagagtggagatttgagatgctgaagttttagtcgtccatccacatcttggagcaataccttgagaagttcaggaagcctttacaaatatccaatatatttggggaagctcaatagggacatgaatgtgctgctgacagagacagttgataagccaagatcttagatccagacatgtaggtggcgacttcaagtctgaaaataaatgcctgggcacagccgatggaatattctaccccgtgccaaaatgagaccattaacattgtcacagaagctaataaaggagcaaactaaaccagttacttacaggggacactataagggatctagagtattttatatggagatgaacccttttctatccctctgacatgttgtccgtgcagtgcaaagtggactgcctatatactcaaaaggcactttaaagaggaacactgggggaggagaaaatgtgaaaaacaacatata

SEQ ID NO: 51839 - DNA, 1878 bp, Homo sapiens
tggaataagatatatgcataagtatacatatttatatgtgtataatcatatgtaaataggtataaatatatataattatgaggtaaaaatgtttgtatactggcatccacatcttttctaaaaaatatttgattataaaacaatatgccataccaaaattcagtgctacaaaagtttttcatttgtcagaaatgtaattgtttatgttatcatttgtaatacctaccaactaattgaattagagggctacataggggtctttgaacaagatgaagtttagtattgtccatatagcaatatcaaattacttaaaattaacagaaaaacaaaacatcctattaattaaataacatgttcaattgattaaataacatgctcaaaacagtctattttggacaacccttatgtgaccagcactatgctaggcactttcatgtgaacattataaattagccttcacaatcacactaaaagtccactatcactattcaaatttttagacatgaatctctacctttcacagataaaaattaagtaaatcaaggtcatatggctaaatagtaggtcctctaaaataagagactaaactctttccattcttttttttttttaatttttttcctagtgagtaggattatcagatcgaggttaagagttgggctctgtatcttcatttcgagttatgtgatttacaacaagttgcttagctctgttttctaatcttcacaatggataatacaataaaatccacattatatgaatgagcttgtgtaatgtgaatgacagtacctgtataataaatcacacagaacatcacagagcacatggcaaccacccaataaaagttagctaatattactacaagttcactctgtgatccttagtgagtcactttgaacagattatagtttcctaatatggccttagcagtagtccacttgctcatatcgcaatgtgaccttgcaacttctccataatatgatctcttatttgtggaatctgaaaaagttgaactcatagaaatagtagaatgatggttaccagaggctgagagggtgggttagggaaaggggaaatgttggtttcagggttagaatttctggtgatccattgcagagtaaggtggctataattaataataatgtattgtatatttcaaagtttctaaaagagtagtttgtaaacatacgcaccacaaaaaatagtaagtgtgtgaattgatgggtatgttaattagcctgatttgctcattctaccaatgtatacatgtattcaaacatcattttgtaccccacagatatatacaattactatttgtcaattaagaataaaaataattttttaaactaaaaaagagagagagagagaacctatgtcttctttctttgaagctgcatgaaactttgtgacagcctcaatcaatacagcacgatggacatgaaatggtgtgttctgcaaagttagatcacaaaatgcaatagtgtctgtgtgccactccttcatctccatctctatctcttcttgctgttggaatccagtcaccatgctgtgagtaatcacaggccacaagtagaggttatgtgtacactttcaagccaacaactccagataggcttccagccagctgccatcatcaactgccaagctaaagcctttgaagtaacaccagcctcctccattgtctcccccattttcatgagaaaccctgagggaaagccaccgagcccaacccagtcactcccagagtaataagagatattattattctgatattatatattatgtattaatgatattatatattaatgagtgatcagtattgttttaagaaactgtttggggatgatttgttacatagcgatagataaattagcataa

SEQ ID NO: 51840 - DNA, 526 bp, Homo sapiens
ccctttgttctacttccctgtgttgtggcagtgaaattggacagaatctctatgaggcaatgtgtcacaaatggcaggaatacaatacttaatacaccaccatctctctctgacttatagacacaaacacacacacacacacacaaagaaacccatggtatagtagatagtgtttcatgtgactgataccaaacaaaacacaaacaatgactggattattgcaacaacagagtccatgccatggtttctgggaacctttggcagctatctgcaattttaagtgcttgttttgctaactttatgttagcaggactgtgagcttcaagatgtgtgccttgtccatttaaagaagttccactcattctgtgtgcttctcaccacatgaaaataaagccagagcaaacaaataatgctcagggctgagtcacttcacaaacctcactcgaaaagagtctagaaggtcttctcactttccctgtatggtatggtaaaaccataatattaagcttgtgcaggtcaccctttt

SEQ ID NO: 51841 - DNA, 4682 bp, Homo sapiens
aagtatctcagcaattgcttgttcttaaaatttcactgctatctcagcagtcatgtaagttattctggctatttaatttttcacttttgtttgcatactgtaacagttggtaggataattaattttgattgtacatttccattgaacttttgatgaaattgtttcactctttttattagaataaaattattaggaaagtcttctaaagagaggttttctgtttgtttttcctttgaggaaggtagagagatgggaaacgaagacaccaaatataaagtcattcctctatctctcattttaaaacctgttttaaaggttgtagctagtcaggaaaactgaaaaatcaactggtattcctaactaaagcagggctttgaaactctgctactagcgacagggttgggaaaattccggttgctcttcttgtctgtgatatacggtagaagggttggtcctggtttggtccacctgccagcggagtttaaagtttccgaggctcagaggaacacaatgacttggatcaaacagcctaaatgggaagaaggacatttttgctgcatcaaggaagccgttaaactcctgctaagctaactagctcttttttatgggtccatgcacacgaccgaactcctctttcactgaccagagattatttctgacaacccaggatatcccgaaagcttggaggcatatggctggaaaatgaaacgacccaggacatcgtttctggctgcatcattattttgtgtcgcgtagtaccagatgggcagtcagtgagcggcgcagggatgtgaacggacggttttataatgtgaaaattttcccttggtaaagctaaaacagatttaatttccctctcttttctttcactacttccccctctttattccccctctgtctgcaatatcagtgaactcaactttgcagtgaggtggccaaaaagagagagaatgaggagatcttgatcatcttagtgtcggaggagtcgcagcggactgggaactgcagctgcgaccccccgcgtcctgtgcggatttcagggctgataccgcataggcggttatggaaaggacggtacaccggagcggcggaggatagagaccctggcccccggagaggtctgctgatttcgcagcagccttcgaagccgtggctgcctttcatctgctgcgttttattactattatcgccgttccggaaaagtcatggaagacagcccgctgccagacctcagagacatcgagctgaagctggggcgcaaagtacccgagagtctagtgcgctctctccgtggggaggagccggttcccagggaaagggacagggacccctgcggggggagcggtggtggtggcggcggcggcggcggctgcagtagcagcagcagctactgcagcttccctccctccttgtcgtcctcctcttcgtcctccccaacctctggctccccacgaggtagccactctagcgccctggagaggctagaaaccaagcttcacctcctcaggcaagagatggtgagtgtggtgcgccagccgcgggggctgggacctgggctgggccaaaagatggggcgatctgagaatggggctgggagagaggacggcaggggctgcagagcggagcgctgggcgcgtgggaaatgctgggtggaggaatgagcagggggcgctcatccggaggcagctgctgcgaggcttgtttaccgcggactttgctcggtcacggtttgcaaagacagcacagtcggctggctccactctgtgtactttcggacaacgcgactcactgcgccgggctctatttagctgccagcccgtagcctcttaggcaccagcccgttgagagtttgcagttattgcacccatctaaggcctgctgtgcgctgttaacacttcgggtaggttcaaaaggtggctcagtccaatgcacttactgcaaaaatacttcctggtttgccgggaggtggcgtggcagggtccttgcagcctttcctcctagctcacccttccaccagtaccgctccgccctcctgccctcccttcttggtgcagcagccgcagctgttccaaggccactgtcgagcagattctccacagctggttctgaaaacaatggcctactcgtccttgatgtacttatgaatagcttgtttcactattttgatcccagggagcaggtgatccccaggcccagggatctgctaaggaccatctcccacccttctccctcaagtctcaatctgcagttgttttccctgctgtttgcaaacgtttgcctgagcataggacaatgagataagtacaaggtctaggaatactcattctggaagtatttagactaagacactatttacttgccatgagctcttgggcacgtcacttcacttctgtagacctctgtgaatttgatgagctggttagagaaaatgatccctccctaagtcctttgaaaaaaacgaccacaaagcaacagcattttctactagcttggagataaggaaagttgcaacagtgggcctcaaaaagagaaaataatttcattaaattaacttcacagttgcttttgatttgcttcaaagtaggctaggagatttctatcactccgacaggaatgctggaaattatttctatcattctatcgtttagttattatagagttctatcatttagtgattgttattttttaggttggacaaaaatttaaggacaacccttaggtacataatggagaagctggaaagtggaagtcatcttgatgagtttgcaaaatagatgaaaagataaaatggaaaagatgacaaaccaacaggtcaggggatgcctgataccgtatcacaaagatcagacatacgtgtggagactaacaggtaaaactattttccacaagaaaatttcttgtacaaggaattaagaatgttgctaactctgcaaattaaggacttaatatgagggacgaagacatcaaggagatgaggaaattttattcctaaccatgtcttctgtaattttacccatggaatgttaatatattcacttaatctaataaataaatcttgttgaaacatattttctttctcagtagctcactgatagcacatcaaagataatactgtcattttgctggacactcagacacaatttagagtatttatatataacttgaaaacagtaacatttccaaaaaccgatgaaccccaccctgtcccaaggaatgattggtatgtatgtgaagatcattttctgacaaaaataattacgttccacttaggatgcacaaccatgttgtcctgtagagaagtcacaagttttgtgagaatttttaaactgatgatgtttatttccatggtaacgtgagtatacattttaccttctattgtagtgatgaatcacaattagtttttttttataggttggtggaaaagtaattgctgttttgccattgcttttaatggcaaccacaactacttttgcaccaacctaatatttattaagactttacttttttgagacacaatttctgaaactgggatttatgttgagagtctctaaggtccctgataatttgtcgcatttgttgttgttttttggagaatatttcatcactactcaaatgatggtcctctggtctggtggaagcttcgtaagctttgaagccagataaaccagggtttcagacaagtctagagcaagtcaggatatcaataagacccaataggatgtagggctgcctgtctagggagacatttagcttatcttccccggcaaaaaggcttgtcccgctctctgtggccctcattctagtcatggctttttcactcactagtgtgtggcactgaacaagttatagaaccactttgagactcagctttcttgttaacataggaataagagcatctccattaaggcattttaagaattcagtgaaataatataagaaaaacaactattacatagatattcaaaaacagtaaggatgctggcagtaatgagcattacatcaatgacatgggttccgttgatcttacaaaagcagccctacatggataatgtggatttgggactgatgaaggcctagatatcttctccaccagactgactctatcatgtcatctcccatgtcatcagatactctctgtagagacgatgtttccaaacaaactaacgcacaaaatatgtgtaggtttccctagcttcagttcaactggaaatcttgatttttattttaaatttaacttttattaaacacatgctatgtgctaagcatgctgctgattgaagtagcatgtatgaaagaattgtagagcctaatgtcaggtagtccaggaaatctgaggaacttaaaccaatacagtagcccaccttatccatgggagatatgttccaagacctccaatggatgcttgaaactgtggatagtaccaaagcctatatagactgtttagtcctatgcgtacgtacctattgtaaagtttaatttataaatcagtcacagtaagagattaacaataataactaacaataaaataaaacagtgtattgctatgtgaatgtctctctctctctttctctctcattctctctctctcaaaatactataatattttcagactgcagttgactgtaggtaactaaaagcaaagccatagataagggtgtactactacatttggttactttggt

SEQ ID NO: 51842 - DNA, 3421 bp, Homo sapiens
ctaatgatttcttggtggagtcttcaggtttttccatatgtaagattatatcatttgcaaataagaataatttgactttttttcttcccaatttggatgccctttatttctttttcttgtctgattgctctatctaggacttccagtactatgctgataaacagtgatgaagtgggcatcctccttatttccagaccttagaggaaagcctttcagttttccctctttcagtatgataccagctgtaggtctgtttatatggcttttattgtgcagtggtagattctttctatacccagttttttgagtttttatcataaagagatgccaaattttatcaaatgcttttccagtatcaactgaaattatcatatggtttattccttcattctattgatatgatgtatcacattggtggatttgcatatgttgaacagtccttgcatccctgggataaattccacttggtcatgatgaatgattatcttaatgtgttgttgaattaggttcactattattttgttttggatttttgcatcaatgtttatcagtgatattggcctatactttctctttttttgatacgtctttgcttgattttgatatcagggtaatactggcctaatagactgagtttagaagtattctctcctctgttttttggaatagtttgggtaggattgttcttctttaaatgtttggtaaaattcagcaatgaagctatgaggtcctgggctttttttttttttttaataattttgcatgcttcattcttttttattcttttattttgtctccctcactgtatattttcaattagcatgtcttcaagctcactaattctttcttctccttgatcagttctgttgagagactcgaatgcattcttcagtatgtcaattcaattgtttagctccagaatttcagcttgatttttaaaaattatttcaatctaatttacatttcattttacattttcattatggataggattctgaattctttctctctgttatcttgatttgtttagcttcccaaaccagctattttgagttatctgtctgagaggtcacatatctctgtcactctgggattggttactggtgcccttatttagttcatttggtgaggtcatgttttcctaaatgatcttgatgcttttgagtgttcatcaatgtctgggtgttgacaagtgaggtatttattgtagtcttcatagtctgggcttgcttgtacctgcccttcttgggaaggctttaaagaagtatttaaagaaaattgagtgttcagatctaagtatttgcctattgcagccatatctgcccaagcccaataatagtatgactcttgcagactaacagaggtagcactttggtggtgtggggtactatatgacagaattccctggattaccaaatagagactcttgttctcttactttaccccaaacaaacaagtttctctctgtgctgagcttcctagaattggaggaggggtgacacgagcacctctgtggccaccactactgcaactgtgctgagtcagacctaaagccaacacagtacttgatgtcacccgaggcctgtggcaactattgcctggtcaccactgatgtttatttaaggcccaagggctctttagtcagcaggtggtgaatcattctaaacttgtatttttcccttcaaggtggtgagttcccttctggcccagggtgggtgtagaaatgctgtctgggagggagggtctggagtcgggaactttaggaatctagaatctacttggtgctttattttacttggtaaagctacttggtagctgagctgatacccaaattctgagtcaaagtcttttttactctcctctcttatttcctcaagcagaaggagtttctcctcatggccaccactgccctaggcccatggcaagtactgcctggctaccactgatgtttactcaaggcccaagggctctttttcaccttatggtgaatcttgccaggcctggttatctcccttcagggcagcgggttcccttctggcccagggtgtgtctagaaacgtctgttgtccgggagctagggcctggcatgggggcttcaggactctgcttggtgttttattttactatggctgaggtagtatttaagttacaaggcaaaagtcctctttactctcccctcttttcaaacagaaggtgtctctgccaaaactgcgagctgcactgtctggggctgggggagggggtgacacaagcactccctcggctggcccagctgatgtctcactaggtcctgtacaccctaagtctactggctctgagcccagcacagtaccagaacttgcctgggaactttcctccttgaaaggcctaggctacctttcaagtttatttatgaccccagagcactttagcctgcagtgttgatgctagtcagaactcaaattctgacttctggcatagaaaattcccctctagctaggtccaatctgaatgcttccagtgtgggagctagctgaattctgccctgtattgctttgcactgtgacagttagcactgagttccaatgcaaagtcccataatcactgtattctccctccctcaagcacacagatattcttctctctctgcagtgctgcactgctaggagatggaggaggggctgtgtaagcaatacaagagtcttttctgccctcttcagtgccttcttccttgatatgatgttaaaaccgggtactatgattgttcacctgatacttggttcttatgaaggtactttcttgtttagatagttgttcaacttgatgtttctgtgggggtgacaattgctggagggttctattcagccgtcttgctccacttctctcagatcttttttcatgtctttgcctgcatatatttgcattttatatacagacataatgttgatatgtttggatatcatttttcttattttacataatattttttatattacctggcatttattagatgattacaatatgacacacagtatttcaaacacttttcaagtattatgtcatttcattctcatgcctcacccacttatgaggtagacactatggagtgttagataatataagcaaattactgacagagcttaagaaattcttatctagtcaaattttatcttattctgtcacttctcctatacaaaccccaactagttgctaattatatagaaaaggtaattacttcattttttataagtgattattcaaacacttaatagttcttttctaaagcagcttctgtttacagagatctgacttaatcagaacattgcattcttcaatatgaaaaaattaaaagccttcaaactggactgaacttcaattacacatcatttttaatgtaattcagtgattgtttttctgagaataatattaatgaaccctctaa

SEQ ID NO: 51843 - DNA, 981 bp, Homo sapiens
cattagtagtcaataaataaataacaaggcttaattcaaaaaatggatgccgctttctgtgttagaggcttttaaataattatagcacaaacttgttattggcattaataaacaagcctgttgaaatgattattgttagagtcaaaaccattaaccattaattaagcctcctaggagtaatatcagatgtccacattgttgagtttaaaacggagatacagagactgagtgattcgcagtggacaaaaacaaagccagctttcccccttcctaaactggttgttccgagtgccatgcagcagccaatataaacagagaaaatgtatttccatgtatactttaattccaaaagtccaaacatcattactgagaatgctcagtaatttcataacattaaatgttgggtcatttttgtttgctttctgtcttaagacaaatggattctatttggattgcacccaattctgttactttttttaaatatcattaagttgattttgtgtcaacaagatcaaataacttgaaaaacttaccctctacatgaaaaatccccaatgtccttttgtaaacaaaacttggagttactcaagtgcattaactcttctgagaacaaataaaatgagttaagtatatgctgagaatgtcagattggttcatacacttggaaatgaatttaacaagaatcatttgccatctctatgaccatacacatgaaattaattttgcctcagccaaaaatcttgtttgctacaattaaacactgatgatgcaaatctatagtaaacatacatatttccaaatcctcactctttgttgagcaactgagacagatggaaactctcagctgcacaccatttaacaacataaatgtccacactttggacattactccccatctctgcttgtagaagtgtttgtgtgagaggcatcaagtgactaaagatatgtttttaggcatcaactatattcaattcttgtgat

SEQ ID NO: 51844 - DNA, 2472 bp, Homo sapiens
aaagaagcagattaagcatgtgaacttcagagccaagtaaatctaggcctgaatcccagccccttcactttctagttgtatgacttgagtaagttacttgagtaacttgcttgggtaagttatcttcaaattgcagtttgaagataatcatttctaccatttaaggtttgagtaagattaggtgggggtggggggaagtatttaaagtacctgtcattgtacctggcacttgtgctttattaaaggctagaagttattgtttatgctattattatcactggggttctttcttgtcactatgaaagtcaacatgggttaaaaatttctgcatgggattaccaaacaaaagcaataagaaaaacaacatacacattatcaacaaccaaaacccccactacctctgaaatgcattgctaccaggactcttgctatttctgtgatccaccaagagctttacttatggaaactatacttatttcctagaatgcagtacatcaccacccactgctccttaccctacttcctgagcagggaactctaataactacaaaaccagcctagaaagatactactgctatggttgaagagtgacaataggaatcacactgcgattactttataaaagcagcacacacaaaatgttaggaggtaccaatgccaagttttagctgtctaaaaacttatatttctgaatcagatgatagacactggagaagaaaaaaacagacctttttacaactttgggtataggataggtattatactatatggattgtatttttaaacctgtatctaccaggattttcattattatcagaaaattatctcaaattctagtaatagtttgagcaaaagtttgagcttttattattgtaactttgtttttttatctgtattataacttaggaaaagcttttggattttattttaacttcagaaagttctctaaggattttatttaagaattacatacttgctttaatagagaaatatcaaataaacccaacagagcttttttaacaaattcatatccaagggaaaacatataatttgacattctctttgctaattatagggcaaacagttatatccaataaaatccagctattatttagtttcacgtgtatttgaacataaattcattttgtttgttttcttttttatcttctgagtttatgaattatatttatggaaccaacttcaaatagataatgaaattttccctaaaaatgaacggtaatttagatgctagttcatggggcaagcatttgatcttaagatatctctgcagtgttttatgggtattgaatcaaagttttaacataagcatcatttttatttctagtttacaataaaagcatgtataatttagtataaaattgtaaatgcttcataggtaaaattttaagtgtaatattaggatagggcagcatctgagcaagaataataaaacttggtattacaaagctgggcgtctggacatgtcctgatgagctcatcatgtgccatctgcttcaataattctggccaccagcaaacatattttgccagtgagtactgtacaatcctacctatagttggttgactccttttttatgaatatttctacctggctatggacaacactatgacatgaaacatactagcaaactacaagttgtatattttaatagcacattttaaaactgaaggacaattaggagtcaattaagtctgcattgcctagattgtttccttcttcattcttttcaccttttgtagtaagaactgagaaaagtaaaccaagctattcccagtagctttccttaaatgtggtgacccatctgttgccatatgctaggcatctgcttttatcaccctcatttgtggtccttcaaagctagaagtgatgaattaacatcaaatttatgctaatctgtggtaggagagaacagctatttgcaaactatttaatctggccatagtcattatcagatataaggaatacaggacaataggaatagaaatcagaaatatttttttgaattagtgcatgacttttaggtaactgtagcacctctatggttgtatttctgtatcagcaaaatgtgcgagtgacccttgcttgcaaatatttgttgattttacacccaagtgactacaatatccaatataatagggtagaatcattcatgaatgctcatgcaggtcagtctctgtttaacttcagttgtagaattgcttctttcttgaaagattattctttttttaatccagtcctaaactgtcatcagaaaatgttcatagaatatgaaaggccaattctacactgaccagaccataataaaaatattttcctattatttagtattgcggaaaaaagggaattagaatcagaacatcaagatatttgtcccatttctagcactaagtggtgatacaattttggccaagtcatcaagcttgtgtccacatatgtatcatagaacgcag

SEQ ID NO: 51845 - DNA, 8676 bp, Homo sapiens
tatgttgaaagcatcatttttgtcattaattatcaaacataaatcatctgtcatttctccttcagggtaagaaatcaatttctcttaggggaaagaaaagctgtcctcctgtagatgcgaatggctctttcaataatcaccttcagtttccttgaacattttttgtttttgttaacaagtatttaactacttactctatttgttccttttattcaaactacaaagcaatgtactggtaaagtatcatgccacagacagtgattcagcgtctatcaacaaaattatccacaagtggaaagatctctaggaccttgctaaagtgtggtctatataccaacagcattggtgtattagttattcaagctgcataacaaatatcccaaatcttaacaacttaaaacagcaaacatgtattatctcacagttctatattagggagtctgggcacagatcaagtgaaggcccctggatcggggtctctcacaaatctgccatcaaggtgccttgatgaggctgcagtcatctcaaggctcgatccagggaggatccacttcccagctcaatcacatggccagtagcagtcgacaggtctatgtccttgctagctgttgtccagagatctcagttccttactttatgcatctcacaaggggcagttcacagcattgtagatggcttcattcagagcaagcatttgagagagtgtgcccaaggcagaagccacaatctttttgtaaccttttctcagaaatgacacctcatcatttttgccatagtctattatttagaaataagtcaataggcccatccgataccaggatagggaactacgtaaggatgtagataccagaagagggtggttattgggagatatctttgagactgcctaccacaattggtaacaactgggaacttgttagaagtacagaatcataaaactggtgagcaaaatttaaattttaacaagatttgatccataggtacattcaaggttgaagatctctgctctaggagcagcgcccatccattttattctgttgcagagattgcttcctcacttatttttactcactctctgttgcctttgtaagaaatacagagatcacttttcttttcaagtcagttctcccctacaaaaaattttacaaagtaagtttactaaagcactactgggctgcacatagcgtgtaggaaatagaattgggagaatgaagaagaaatatggggcataagatccacggcaaacagatttaattatagtatcaagaaattactaaaagagaagataaagcatttgagtagaaaagatgtcaggaatcatgtaaaaatagagattacagtcctatctcctcaacaatcttcaaatgcattgctgaacaactctgcattataaagcctactgtttataacagtggcctcttattttagaaatatagccatcaaaaattattataatacaaaagcataaatgttcaactgagtttagatacctggcttattccctttttcagtatatttcatgtctcaacaatgctgagtcatttatattcagtttttgaaatctttccagaaaagacactaaaaactttggtataaatattttacatctatctcaaattttattcaatggaaaagataagattaccttcagattttaattacgtctagaaaaataaaagccctaaggggtaaaatgcaagtctctaatctgcttattacaaaatgcaatcaattaagtaaagccttcattccgtacctcctcaatggtacactgaagctaatatctactgagatgtgtgagctttttgttaaattttcaggagttttgtgaactagttgccaatcacagacattattaaaatttaaagtatttatataaacctactagttaagtatttatataaacctataatttaaaacaaaggtaataaatactcaaaattcatggcatcctaattattttactacattttactttcatgattttttgaggtttttaaaacatctattttattcacagggtgaaaataccgtatatgctctagtaccgagtatctcttatcaatcccatgtttatgtttaaggacattctatagacagattcaaattggccatgtaggagtatttatgctacagaaatttaaaaacactataaagcagaacttgatttttattttattggttgtctagacttaagtgatagagaaaattttaatactgcagattgaaattgaaatttgtggcatgtccctagttattacatttccaatagtgccaaaaaaaggaaatattctccatgtatttgaaaactgttattcaattcagtgaagaaattgctgacatcattgatgaaccagtaaaattccaacataacccatgctgaggctgaaacaaatttcagtttaattaatatagttttcactaagtgaaaaataatttaacagtggatcacatatcaggtgtaacaataacaattattgaggaatgaattatcaattgagattaactgtatttgtgacattttgtttgaactgcgtccatagtttgctatacatacaacagttcagcaagaataaataaaacattctctgaaatcagttggttatatggaattgacaataaaaagtgctgtatattttattattatctgtcaagtgtgtgttatacatcttctatatcagcacaatttgtattatattttgtagtatatatgcatgcatgtgtgtgtgtgcatgtttatttttcccaggaagctgcttgttaaacatttactggcacactaccctgtgtccttcccttacaatgtaactgtggccactacagatcacggaggagcacattaacatgccctggtctaccatgtgaaaagaatatcttaagttctaaattgaaaagacacacatgcacaatacttactataaattagtggaaacacttctctggtctgtgttcaatgtgaaaaacttctctgctgtgaatatggggagtccatgttttcattagatcattctaaatgaatctcggctcaggtgatttatagccgattgcatcagcctaaattactctttgcacattcatgttgaaaatattcagggaaacagttttcactgtattagattatggaaaaggaattgacatcacaggcatctaagtatcaattggacctagaatctgatgaaatcatactgaaaagctgcatgtattactttggcaatcagatgactcaccagcagaaactgtacagatctcacgagcaggcctggtggccggaatttatgcttatgattcacaggagtcacatgtgctcctttcaaatacaccagatacagctttctactttatcaaaacaacatcaatcagtccactgtgctgatgacagtatttttatgtatgtaatttagtccttggggaaattacttttctataacgttctgggaaaagagtgaactgtttcagttattgttcagttccacatataaacaacaaaaatggaggaagacaaagctgactgatgtgaaagggaatcctctgttgcccagttagaaacaaattttgttgtaaattttgaactgactgagaaagtgaaagaaagctttggtggaaggaacagcactgacttttgcataattgtaggcttttcacctgaagcattccaaaccaaaaacagtgagtggaaatgttgtacagtgtcttctcaggctgcaaaaagatgataatatttttatggatcttctgagaaaacagaggagtgatttataagtatagatattgaaaacactgctggaaattttaaggatgggtaggcagaaaatcttctgtgatcatcaaattgaggatgtcctgaatttggagagagggcaaatttgaacacaaggagcttatgcaaaaggaacaagcaaacaaactggaataaattgctggaaaaacaatactccaagtgcttttaaacagctcttcagtttatatagacttttaaaaatatattctaaaataaatgtggatagaaaagaggccctgacagaactaaactctcttccaccaactacaaatcagagagaacgatgattagtttctcctaatgagaaactagggttagagcatcacattaaaaagcaagtctaatctttcttccttcaatgtatgtgactatggacttgcaaagaagtccttcttccttctaattcatattacagcttgcaggatggttgggatttacatcttgaatattgtggattttaccatacaaatgtataactaggaggtggcctgcttttatctgactagttgacattcataaataaaagggtaacaataatggaggagggctttatgagaaacctgagtatatgatgctatccaaggctccagaaaggcaaaaaatgtccctatttggaagatatattcagcagctcatgtgcacatttcagttaatatatagacatattaaagatgatatgcacgtttgtcttggagtggaatacaaaaatgatttttattcaaacccaaatggtgagagcaaaaattattatgacaaaatttctgataaagtacctcaaattaacatcaaacccaaacttctagccttagccatgagtttttaccagctacatcttttgctggagttactgagcagcagaattgattcttctgtctcctctatagcctgaataattttctcataacgtaaacaatttcgtaatcaaatggccacaggaatggcaaaatatcagagaatatgtcgaaatggaaggaaatcctgggattatctgatctgtagactcttcctattaaattaaacattaaatgcctgaaatgttataagacgttattaaatatctgaaacgaaatctcagtatgaaaagcagatatgttaggtggatgcctcagttgaattcagtcttcttattgggtaagattagtctttgttcacagaactactttaccaccttcactgagtcccatggttcactgcagctcggaatgaaatctcctgatttttcttcatgtataaggaaactgaggtcctgtatgccaagccactttccccaaaggtcaaataggaagatagtggcagtggcagattggagtcagtaccatgttcctcatacaacaccacaaagaagtcaacttggttagcaaccaaaactccgactgcatttttttcttagattccattgtgccaatgcataacctttgtattctttcaatttttaaatggcactctagaagaaaaaaagatatctgggaaagtttgctgttaagaatattttctccttcaagattcctcatttcaagttctaccatagactcagttcatcacctgtcaaaaaaatgacatgaaatctcaacattctccctaaaatacagagacctgtgacatcataatcctgaagcctgagagactaagtaggaagctgaaccatatgacataaactgtaaggaccagagtagaggaggggaagtgaagaggaaaagaggaaaggacatccacatctctttggacctttggaccgatcagtctaaaccttatttttgtcgttgttgttttttggtacatgtcctggttgtttgttccctttgttcagttcattttgccaagtgtttacagaacacccatgctgtgctagtatcggttatcacctctgaacaaatagaataatgtttggagtgtgacttacaccttgaagtccacttccttttagagatactatctcatattctgtaaatttaagctaggaataacctcacaccagttactcggtgtttgaatctggagaaggaatagaaggcattatctgctgggaacgcttcaatattgaaatgttctttcccgaagctactttttttttccctctcaagtcacatattactgacccacagcaaaacccgagattccaacagacaatccaatctgaagcaaagtttcttattcagatgttggacaggtactaattcagcacctacttgtgtgagatactcttccaggttttggcatagagtggtgaccaggaaagatcaagacccaagcactctgtggtgcttccatgctcatggggggaagagaaaataataagtaaatccattagaaagattatgatttcaactagtcataaatatgatgaaggaaatatacatggaaatgtaatattaatcaaggcatgggtattgcatattatgattgatcaggaatcagtttctcctaggaggtgacatttaaactcagacctttaggagatctcaactctcagtatcctcagagtcaagttgagggaccttataagactccaacagaaggaaccacacagtttcatgctgcaagggcaaggctactctatttttaattgatggctagacttcattaagactgaaatgaataacagtgaggaaaggcggggcagctactagagacagaagagtcattgtgatttagttgtttggtgaattgctcatactttcaagggtcatcggtagcataactgcaccttggtgcttggagaaagcagagtgcagcagctgggccagcccaggactctctgtgcctggagctcctggtaatggacctgccagcgtgtgaactgacgtgcccagcgctcccacggtgggaagctgtttactctctcccgggaggacacagggttagacatagttgaatctataatcattatcaaccagatcaacacgttctaactgacttgcttgtgtcgtttttttccccaacagtagttcaatggcctgtgaatgttttgcttccactaaaaaaaaaaaaaaaaaagattttcttatttaaataagtcatttcatggtcaaaggaagcttttgttacttcatagtccactcctcttttcttcttactgcttaataaaactgaaaaacttgtacttgatgcagccactgtgtaagtcagagaaaaattgctgacaaaaaatgtattctaagtatgttttaacccctggtggcatagttgttaggaacgtgtattactactgtcttaagagctaaactttcacagttcctaaaattatggctatttccaaaaatcaaccaattatgactatttccaaaaatcaagcaatgcttagtacagaccttaagataaggaagaaatgtgagacatggcttctttctttaaggagctcacagcctagttgaaattgctaaaagacaatcattggcagtatatgacagtacaaagttaagctatgttaggagataagctaacaggacggtagtggtgaagcaggccagcagaggaggctggagccctcaagtagtgcttgacgagagaagtatgacttgaagaatggggagtatttggagaggaagagagtgaagtttttcaagaatggggaatgacagaggagcatgcccagagctgggaatgggctggaacattttcatgggagagggtggagatgtgaataaatgcagccgtgatttatttgggtggctattgggaaatggtcagattgatattctgccatggcttataaggggccagcatgttttatcagctacagatgcctgctgaatgattttgcaaaagtttgactcatattgatttttctgggctgctcagtggacctaggcaaattgttggtgatttataaatgtttgttatattacttgtaacttgaccattgtcttcctggctcatagggtgtgcggaggaatttaaacataaagactgtcagaaacctccttcctcaacataaagtcattgcaaggttattgagacaccccaacaaatagaggggcttctcaaggctaagttcacatccttctgttcatgaacgtctcagtgaaaagtaattttctttgttacttcctgtgcaatttatttttagtgctttgttcagagaagatgaagtgactcaagtcacttcagtattccagcaaaattaatggattttaaattgtactttatgttttttgtattcatagatatatttttattcttttgaaacctgtacaatcttgcatctcttgcagttattaatggaaattccatctctcctaatgtttattcatcatgttccctcaatccaaagttcctcttcagttatggattaactcctcatacagaaatatttttacaatacaaatgaatacttttgaggacaattcgctcttttcttccttacagtttgagtcatccaagaatgaatgtctgataattccagaaactgacataaatctgaattagctctggatcctaaagaaagaattagcatgacccagacttttgggttagtaacccaactggagggacagaaatcggtttttaaaccatagagaaggccggacatggtgactcacgcttgtaatctcagcactttgggaggctgaggagggcagatcacgaggtcaggagttcaagaccagcctggccagcatggtgaaaccctgtctccactaaaaatactaaaaattagctggacatggtgttgcgtgcctgtaatcccagctactcaggaggctgaggcaggagaataatttgaacccaggaggcggaggttgcagtgagccaagattgagccactgcactcccgcctgggcaatagagtgagactgtctcaaaaaacaaacaagcaaacaaaccatagagaatgtgactaggacctctagtggccaaacatggtcctgccaggctctgtactcgagccatatctcttctgt

SEQ ID NO: 51846 - DNA, 2200 bp, Homo sapiens
tgaggctggtcaggctggtctcaaactcctgacctcgtgatctgcccacctcggcctcccaaagtgctgggattacagtcatgagccactgcgcctggccctaatatttattatatgcatgaccctgaagtggccaggaaaagctgagattgggaggtaaaccagacaaatgaaactataacagggccaggattagaaatctcctcccaaattcccacttcatggctcaactactaactaaaaccctggtgctcctctgagcaataggaagttaagtaaattttccaaagccattaagaaagctatgcttgtttaaactctcagtgtaacctgaaatagtttgaaacaactgtttagaaaaagtggggaataaacgctatagagggaaagtaggaaataataacatagataaacaggcaataaacaagaaaatggcttttgtatcaaagacagacagaaaacatttttttcttgatggttcactttccacacatggaagttaagcttaacaaaagaagaactgttttctgtctttcccatctttatctgtatccctcggcaccaacagtagtacctaccacacaactggctctcaataaataatttgaatcaatgaatcaattgataattttggccagatttttaaatagattatggacaaaattgatacgagtaatagtgatacagcggtagtacctggcacataattggctctcaataaataatttgaatcaatcaaccaattaataattttagccagattttaaagaggttatggacaagtgatacaagtaataggatcaacacaggttttcaatacaataattagattatagcactgaacgtctctgtcaaatattaaatgctctcatttagcttccagatgttcttttcattcctgcattagaatatttatcagactgctgtagccatttgttcacatgtctgtctgccccactagaccaccacgcctgcctttctcctgcttgtatgtgtctggcacatagcgttcaataaatatttgatgagtgaaggaacaaataataggtacctggagagcaaacattccagatgcgttactaattgagatgtcagaaatccttcaacttttcgatgaaaaaacaaccgtagggtaatatgcttctcaaggtttctcaggcccgatgaacgattttggtttatttttccattcctcaaatgcagtggcggggaaaaacgcgtttcttccgctgaagttacagagatgagcacatgatggcgctcgcgctgcaccgtaaacccagaagcagctgagcagtgtggatccctgggctcctccacgtccctccctctcctcttctgcccccattcttctgctgtttcccctccgatcctccctcctacccatccattcaagctccatacatattaacagttgccaagaagctgtcagaacggaactggggtactgtccacctgaagctggtattttctttgttctgtgacaggccaaattctgtgtactccttttttttttttttttagaagaacattttgaatgctgtttaaattgtgtatctgtagttcaggatagttatttttactttgcccttcattggcccctgcaagtacctatccttcctaagcaaaataaccaagagagcaaatggtgtcctaagtcattataatcccctcagctagggaaattgaaacctaagcctttgccaacatatacagaagaagtagacagttacagacgattgctacgttcagtgcagattggaaaagttggagaacaaaaataagttacatgataatcacttacctgttaagaattaaaagtgagtttagaaagtagataactaatgcagttttaaaaaatggaaagagtagcccggcatggtggcttgtgcctgtagtcccagctgctacagagtctgagcagggaggatcacttgagcccaggaggtcgaggctgccgtgagacatgatcacgctactgcactttagcctgggtggatgacagagagaccctatctcaaaaaaaaaaaaaaaaaagaaagaaagaaagggaatggggatagaagtttttaattcagtctttaaagtggggttttcttttctttttgattgaggcaagcattatatacgagggcttgctccaaggtttatgttttgttataatttacatttaataaagtgtattcatttaaggaaataa

SEQ ID NO: 51847 - DNA, 544 bp, Homo sapiens
aaattcaatgccaagcatataaaaatcaccttaagaacatttgctttccccagttttcatgctcttagttagaacttttcttgacaccaattttttgcctcttaaggtattgaaggccaatcctgccttacaaataactctctttagaaaaggacaaagttaaacattaattcctagtagtcaaagttgagaaacatctttgcacaaatcaaatgcattccagaatatctgtcactgacatgaaacaacacaccagggctgctgaaagcaagtgatgatagttttgacattcccacacctagaccaaaaaaaaaaaagcctatttattacttgtctccctgaacacatcctttcaacttctctattcaccctgggatctcaagaggggcaccaaatcattgtacggcattctcagacaataaactagctgagcaaatctaaggcagtttagtatcatatacctcagagcagggaagagctccttttgcttcttcctatctatcagaatctgctttgtcaagattcataaaatggaaaaaaaaaa

SEQ ID NO: 51848 - DNA, 1213 bp, Homo sapiens
caagaaactgcagaaaaaaaaattaacaaagaagttgcccttcaaagcttattagtgagactaaatataaataattatttattgctacctgaatcctctctccatatgattctcttaacaaatccaggacagcaagtatcacacatgcaggcttgtctaccagagagccagtttgttagcacagagcacacactcggatgtgagcggcatggttttaaggacaacaccagctttcccttgccaaggcagatcacaagataaatgaggaaacacaggagactccttaatagaaagccaaagcatggcatactggctgtcacttagggtcataggtcctatttcgaaaaaaaaaaaaaaaagtacttggcatcatcaagttcttatattgcaaaaataattgcagtttttgccattaaaactccaattacttttgcactaacctaatgttacagatgatcaaacaatgttagagtttgaaaggtctttaagttgctgagttcattttattcactttgcagatgaataaacctttggaacctgaggctacaagaaatgaaagtttttgtttcgaatcaaacagtggtactagacttctttttgcttaactcttaatccagtgcactttccattatatcatgttgtctcctccaacttgcataaataagacagtaccaaactcaaaggtcaggaacatccagctaaagttctaacctcggtatgaagttgtccctgataccttgaacctatagttttcctatatatctttattttacttttttactgcataagaattcctctgatacaatgttttattatatatgtttatatctagaaaaatattatgattttttttaaaaaactgacttcttgtaaggatacattaaatgataaacacgcacaaatacttagaaattattaattggtgccacgaattaggatacctaaaaatatatgtaacactagaactatttgagactgaatgcgacctttctttgttgattcagaaagcactcaattttctggcaaagcaaatcgctgactgatagagatttaagggcgtaagtgtcagattacagaatctgctatattgaaatgttcagtctatatgtcattggacaaacagataaaagttactaatgtaaatggaacccttgttatgttcccaaatgctgtgccataaatgtctcaaattaataatataccaataaaaatg

SEQ ID NO: 51849 - DNA, 526 bp, Homo sapiens
ggtcattacagtggtaataaaattgtctttatttgcaagttgtctcttttagtctactctgtaaatcctgaaaactcagaaaatctaggtcaggtactcctttctctatccttctaaataaaattatgcttatcccaatgaaataatttatcacactgttctgaagtgacttgattacttgtcaagtctgtcccacttggcaggcaggcacagtgccttgtttactgtgggatgcccagagcctgttatagcacctggaatgcaacagctgttccaggaatatttgttgagtaaatgagtgagtgacttatgagaggagagtctatttaaaatattgaactttgctttgaattaagagattacacacaacttgacatgcttctaacacataacaaaatgcacatacatgtgcacacacatgcacacaggcacacatacagagccttcattgatgaatgaacacagcactgaaaaggagcgagatcctggcttcgactgagaaggatttacatgaaaggtaactgag

SEQ ID NO: 51850 - DNA, 1980 bp, Homo sapiens
tgagatgtaaaaagaaacccgtcttcttaaatttatctcatcccaaacttttaaacttggaactcatttataactcctattaacatcctacaaaactagtattttgagtaacatggcatcagaaatactaaattagccaatgaaataattctggcatggcttagatatctgtctcataattaatgagttatgcaaagttctgcagttcaagctttgtatcatcatcctattaaacataacgtacataagaaatattacaacaacacaaatactatctgctacaattctgtttagctgctgttggtagtaccccgccaccatcaaatggaacaaaatcttggagaccaaggctgaaatcccactcatcaagtaagcactgctggattcctctgccaaatctcaaaacttaacaaggaaacaagaccctgccataagacgtcagtgtaacgggtagtggttgcttacttcatagaaggaaaaggatctctgatgctgaattaaccagagtcttgggctgcatttggacactcagagcaactcatctaccattctatttatcaagaaagacagggctgagtcacatgactgtgtaactcaatgagagaacaaatgtgctctgcctcaacacagttttagctattgtaattaggatatttctacagaaagtcttttttgcccaattcagagggttttgtggttaaaataggacaaaaaaatcctgccacctgggaagtcctactgaataactcacatttacattttggtggtggcacacctggttgtctttttagtctttctttcagtgagtgaaagaaattaaatataaactgacttatacatcactggtacattcaaagtaactaataatttacttttccaaagaatttagaattccaaattgctgagttttcattttctaagaattccttttctgatttgctgtttcatacacaaacaattcatatatcttttactgaatgtaaatgaggcttgtgaatactctgaattaagagaatgagggatttctgctcatatgaagtaaacaaacctgtaaaccatttcaaaaaaataatgaggacatagaaataaaaactacaggaaaatttctaccatctgttctcttatctacagcataaaaaattgaaatttaccatgttcaatatttccccttgtcaagggggttgaggagtaggtatatgaggaaaatgagaaacttacctaggctagaattgccttttgctatattaatagtcctttcaaaagattctttagatacattttgaagcatgacacactcagcattacaggccagggagctctgttcaagcaggtactcagagccctttaagaaagaaaaagaagtcacaagtcacatggaaagggaaactagactttggagcgtgatttcaacatcacgcatgttctctaattgattgtgctttattttgcaagaacctgcaaccaaaacaagttcataggttgccttctgaaaatcttagtgtcaagaagcactcattccaaatgaagagattagccagaataaccttacttcactattccctatctcatcataaaacacaaaccatatctttaaaatattacctttccagctgaatcgggtagcacagaaggaagttctgcacttgatataacttcacttggtaaatgagattcagtccacactattgtgttttcacattcatattgttgttcaatagcatttgcaggtgtgtagtcatttatagtaaagccagaagcaggccccatacttatgtccaccgaaggtgtattctcatcctgtctttgcaggagattctgggtatatagttcctccagagacatatgcagatcaagtactggatcacaagaattttcaataacatcctggtagttaaaaaacaacaacaacaaaacatgaaaaatgtgaccagaattacatcaatatataacatcacttcttaatgaacaactatttagtga

SEQ ID NO: 51851 - DNA, 1183 bp, Homo sapiens
gttttcagacacacagcaaccttaatgttttaacaaggctccagagtcaggccctatgaacacaacttcctggagtcatccaaggtggctttctgatttagtgtaagtaaggaacaacagctgcactctatcagacaggctttaccatctcctcccttagcaaagaatgcaatgcaagcagggacaaaggccaacttgaccaatttaagtatattcataaatttagtcaaatgattggaacagcagaaatattaattggaatatcagattataaattagcattcatgttatagacaaaagaaatacctacttctttatgacttaccactaaaatatgagtcatcaaataagcccatggaaatacaaatagcataagcacttcccaaataacgaaaaaacacccactatgatattcctaaaatgtatcttccaattccaagagatgaaataaaaatagctcaatgaactcaatgttaaaagaaatcctttatgataatcagtgaatcctataaatcactattttgaaagactgactagaaaaaagaaaacatctttgatggttataaactatcatcatctgctttttctttgatagcaacaataggcctttaaaaattgttaaaagtagtatatacttacctgataatctaaaatgctaaaaccaagtcctttgctccctttctccagctctatgtgctgaatgccagcctcccacatggccaaaggtgcttgaacctcttctgtactctgacccgcatcagtcatcgccagcactggatcctctgtctctgatgacccgatgaactcacctagatctacgtgaggctggataatatcagacagctcttatttcagaggcattgcattagctgacacacataccaacactacaagaaaagggatattcccagcatctgtccaaacaaaacatcctcaaacaagagtagcaacagcttttcatgaaacctttaggaattaaggtagtaattactgaaagttgttaagaaggaagaaatacctaagttttaacaaacattaaaaatatatgattcaaaggtctatgaaaatatgcaatggttatatctcgacagcaggattgtgcgtgactgtcacttttttcatcagtgtttcaatcatctctagtcagaaaaaaatgtaaagctattttgatattaaataaaag

SEQ ID NO: 51852 - DNA, 810 bp, Homo sapiens
acatgtatggaaatatcagactgtaccccaaacatatgtacaattattataggtcaattaaaaataataaaagcaaataaacaaattcagtacagagagaaataagtatgcaaggatgaacacagactacagggaagctttgaactgattctgcaagagaaacaggagggtcagttcagagtcctatctctttccacacttcctttttctaagtctgctgtgtttacacagctagacagtgatttaagcgggtgagattatgaatggagaaagtggggaatcgtgctgctgataaaaacagtctgcaattcatattcaaccaacctttagcagaacaactctccattctcaccttctcacaactgccccaagactggatttcaggcatatatttaaaaatcataaagtctaaacctctgatcttgctggaaagtcaaatgacttgtccaggcttgcacgatgtgtaaaatatctgtggaagaggcaataatatcttaccccttgtctgaggactagtactagggcagatgcattaaagtcacttagaagtttgtgctttattttgtttaaaaaagattctgggactcctgattctaggtctatagtcacccccatgtatcctgccacacacacacacacacacacacacacacacacacacacacacacagagagagaaagagagagagagagggatttctcattagctaccttcaccaaagcaaaatagatggttctgcgccttggagacgactcccacacccatgcccacttaatatcacaagtatcatgctctaaacaattttaccc

SEQ ID NO: 51853 - DNA, 1574 bp, Homo sapiens
aacgcgcaactccgcaagacacaaagcgtctcccaaacatcgcttccctggtaacatccggcatcctggggctgccaaatcgcagacaaagacgcccatcagcgcggggggtgaggagactaagggagagacaagaccaacgtgctcccaccaacgggagcggcggttaaaagggcgccggtgccaggggtgagggacggggcaccggtaccaattagcggctcgcctcggggtccccgcggctaaggcgagaacgcaggaccaggagcattgctgcccactctctaccgcaacccgcacatcccgggaccacgtaacggcggatggggcgtccgggagcggcccctgcaggggagagcaacaggctcccgcgccctggaggcctggtctgcgctccgggcccccaggctaacaccccacccccagccccccgacaccaagactgtgcccctctgggtcaaggaaaaggaaaaacttttaaacctcttagtcagcgagagcaaaagaaaggggtggcgggggtgctgaaaggtctaggattatccaccgcggggctggggggagtggagacttgcgagtagcaaaggaaacttctagaccccatccttttaaaaaagccacagcagcggcttccgcgaagcgccgggccgcgcggggtggggcaagcgcaccgccccaccgccccacggcccgccgccacccctacccccacccccacccccacccccatccccgcccccacccccacccccaagcgccgagcccagggcgcccgcgcaccttccccgccggcgcgcgcgcagggcgcgggggcgcgcctcggcctctgggccggggctcaagcgccgcttacccggctcgcggcgcccgcccagggccgcgacgcgagggggcggaggactggggagcaggggtcgccggggcctctggatgcctcgcctcgcccacgctcactgtcttctcttctgaagtaacgacccggcgaggagcttcggatcaaaacgcacagacactcacgcgtgactgagaaacttaatcccgcggtggcccgacgccagcctagcgctccgccgcgccccctcccccagcgcgcgccgcacttgcgccgaccggggctgccgcggaggcggtggcggggcccaggctgctggggctgccgtgacgcctgcgaccggcggggcggcgggcgcgccttggccaatcaggggacgcggccgagcaggcctgtgcggggttttaaactcgctcctgggccgctcgacctggggtgtgggtagtggacttgtgaggtggtcagataaaatataggctgctctgttaaatgggaatttcaaataaaaaaaaaaaggaataattttagtacaagtatatcccatgcaatatttgggacgtacttatgctaaaaagttcttcgttgtttatcggaaattcaaatttaatggcagtcttgtatttttatctgccgattttgtcaacctgcggaaactgatagcctgtttctagctcctcagattttccttatgtgcactgccctgtggatgctttctgcatgggtagcttactgaatggcatag

SEQ ID NO: 51854 - DNA, 2996 bp, Homo sapiens
aaatatagtctgttttgattttgcatttttacttgtatatctacttgctgtatctttctaaaatcattttaagacaaaattggtctgataaactttcttgcaattttggtgttcttctggtatttcagcctcatattagctaagcacgacttcaaggaagatcaaacgatggaggacctaaaaactaagtctacctgaggaaacttttcctattacttcatataaactttctggtttattttcaacgaaaggacagatgagattgtttggggaggtggggggcatgtgtagctggttcggggtttttgtgtttggttttgtttttgttagtttattcttagagcactcttttactaaagtcaccaatataattcacattcttttaataatgaaaaactgcttgtgctagttttatctcatgagaaaaaacactgttcctaaatcaaaagcaaaatgttgtatgttcagagctatatgaagacagccaagttataaaagcccattttcagatctggaacaacttctgaaaacaaagagggtatttgggataccttatgctaaagaaaaaaaaaatcctgctttcattatttcctgattctggagatccaataaaaactttatggaataaaaagtcttgcaaaaatccttcagtgaaaacacaaccaaccactcccacccccaacccccttctaaagtaatgagagttgataaactataattgcagtatggaaatttttacattttcttatgagttttaaaagaaagattaaaaggttcattggcttttcaaacagcaattattttagcacctaaaagatacacaactaaaatatatgcgtatttattttcaaagaaacaccaacaaaaattaaaacattggtgattaggtaaatactgatgacgccaatataaaagtatttgccactgcaaagggcctaagcacaatcacatcttgtcccgatcatacctgcctgccagaacaaaataggcagctgaccaattatggggtgtttatctatacagtggtacctttgttctccaacaatgtcagattgcaaatgtcctggaacacatatttacctggaggattcttggcaggatcattgtggcttggacttcctgattgtccagaatctgtaaagaaatcacagaaaatgttttctttttaatttgttttgaaagaatttcacaatcctcaaaggactcgaaaaaaaaatttgaaggtataaaaatgaagttgagtgcttaaataaaatacactttcccaagacttttgatagaaacattttactcatcaaactacatgaatgcatatacatatttctatgtcaaaagaaaaacacaagtattgatctataattttcttgggctagagcaaggtttttttgaaacaaaagatctggctacaaagccattgaagatggtttgaaggttaggcaaatattgaggcctgtcagtagcaatatgaaataaagcagatatattctcttaaaaatgcaatctaagtgtaattaaacgtgcatttaaaagcctgaaagtatgtttttattcaatgagtaaaatacacagaaatgagagtccgcttttccatgatttcacacacaagtacacatacccactccaataatctcccaacctactggatccaggcccagatttatctacatcccataatagcaatcgatttgcaaacagcaaggaaagcataaattactaggtagaaaccaacatggctttgtggagagcaaatggttgaatcaatttaatttccatccatgacagatggacagactttgcaggtaaggaggaagagatcaatgtcgtatatctgaatttcctaccccatactattcctcattgatgctacagaaagaaacgtggaagacatacaactgttaggcaacatgccctttcggactgatctgacactgttgtgttttgctcactcctcttccctccttgtaccctctccatttatctgtgtcatttgccccatattattatacacttacttgcgagttgctttgtaatcttcttttattggttctagcatttaagttttgtcgccccaactaaattgcatactcctaagcagaggcagagattctgtctacttcttttgtgtcctcctcagtgtgctgttcatggctgtgaatgcactaggcttgcagtaaacgccggaggaatggatggctcagctccagcagcctctttgcttgcctagaaaaggcaattttgaacttgataatgaatttcaacaaaatttgataggtggggcacaaatgacggctctgtcatgtactgccatatactgacaagtctcttcccccaaaccttgccattatacttgagccaagaaagtgatttggttaagcaggaaaatcatatgctggtttttttcatcggggttattctgtccttccaggtaagtgattaacatactgaaattgctgcttctactattaaatgcaagaacatcctgttagtttcttctcatataaaacctggttatttatttctgccctttgcctcatgcctgttagcttagatttaatgctgaaatcagaattttaccccttcatcccatttccttaattgtctttttggttttattctagaacagatttcatgagatcttggcaggcatatttagtgattcccacattttcctccaattgtttcctgatttttcaaaatgaaagtaaagaaactagaaatgaccattcttcatctggctcgagtctcctgaagacagtcagagagctgagaactctctgaaaatctctctcatctcccatgaagtcctcttattactttttctgaaatcaaggcaagattcagtgacttataaattaggagatcaatcttcttcgttctacattcctttaaaaaactggtacaatatgggccactttccaggcctggagtatgatagctacataaaaatgataaatcataactttttgctatagcatcagctatttttaccttgagtt

SEQ ID NO: 51855 - DNA, 843 bp, Homo sapiens
aaaaggcagtatgtgactatagagtcctgaaaacacaaacaaacaaaaatgcagtccttaagccaaaaccaatctccacttttctccctctccctgccatgtgatgcaccagctttggccaaaaatcacatgtgtacagtgaatcctaaaaagcaactaaatccaaatccacactgaaccattctgaactctatcacacttcacagagctttaaatagaattctactcaaaacatcacaccctgactggccaagggattctttgggttctgttgctttatccaagtgatccaaagtgacccaggttccattctgcaagttcgcttctacagctttttccaagtcgaacacagaaggattaaaaagaaaacacaaatattggcataggtgacttgaggttacttgacctttctgaaggaagattttttggcaattgtgttctggcagctccctggaaggcaaggccaggacacaaagaggaagacaggaagccgggagctggccatgtgtccttggcaggcagtagtgcggcagggtgaaccacctcatccctgccaaaccagaaacagtggggaaagcccagctaattggcaactcacagccggctacagtgtacatcctcggctttagatgcctgataaagttaaatggcctgccagaccctaatctacttaaacaggatcctcctttactttcaaaaacttaactcacccatttgtgtttccttaaggaagtggtaaggcagcatcttagaatgttaagagctggaaaaattaaaaacaaaacagcaaaaaaagtaaagatgtgttggagtctcattatgcttatagccgttttactttgt

SEQ ID NO: 51856 - DNA, 1377 bp, Homo sapiens
aatgctacttacatagaaaattatttctttcactccataagaataattatcatggcgatcacacaattattacaattacatctgtaagaactgttactgggaatttatctctgaaacagtctcatgccttgcaggggacatttatctttttgaatgatcatcaacacgagtgtctttttgtagctatataagtgatttttacctccttctattaatatcctcttgcatgctttagaagccaaaggagacagcccccacattttttttttcctaaagcaattgtttcagttaagccaggcccatggcatcttttgagacagaaagctaccctttccattcacggcaacataacattcacaatgtgctttcctaaatggatggaaaacccctcaaaaaagcccctcaaatctgtgtttcataaactgtactcttagcaataaagtttattacagacctaaagtatctgcataaacccggttaattgaaaagtgggtggagaaggctgccaaattaaatgtttacattagcacagctgtattgtaaaaacattctgccccctgtgctttgtaattataagatatttctggactgtgtatctctacaaagtttatctccactgccaagagtgtcttggcacggagcgactgcagtttttggcagccaggagctctccgcgcgggcaggatctaaaatggctgccaagcggcctcctgaaatgtcgccggcctgggcccgcctcaccaagggcaaaggccaaccctgctaccaaggcagggtctaaagtctgtctcacaggaagtcaaaatgtgtatttccctcataaataagacttggtaccacaacttttgtgttgcagtagttaaagctgcttgaaaaactaactacaaaggaatattggaatactaccagatagaaaatggtgacaaggggtcttttacgaaattctgctgacctcaacatttcaatcacacataatgcccgcaatattttctgctgattaaagaaactcatttaatttgtggggaaaaaaaaatgttaaaaaaaacctcaacaaattctgaccatattaaaacatactacagagaagcataagcaaagccaacactttcccatttgcaatggcatgattttgacataaacttataatctctatcaaagcatacgtgtatgaaaaatgaaaaccaaaaaattaatttgttttcttctcatcctttaacaggctatgtttgtcttacaacattaaaataacattaacaaaagaaaaccttttcatacctttctatggcacaggcctcaaaatttgaggaatgatctctcttttcccgccgtccactgcccaagatgtggaaaggaaagaaggccaaggggaagaaggtg

SEQ ID NO: 51857 - DNA, 1961 bp, Homo sapiens
ctaatccacaggaagacctgcaccactgctgccttcatacaggttaactcagaagacaaaggggctttggttaagctggtggtagctatcagaaccaattacaacgacagagccaatgagatccgtcatcactggggaggcaatgtcctgggtcccaagcctgtggcttacattgccaagctcaaaaggcaaaagctaaagaacttgccaccaaactgggttaaatgtacactgttgagttttctgtacataaaaataatacaaatttcccttcaaaaaacatctgaggaattaactatgtctgtggcataaaactgaaaaaaaccgagatcagatacatagtctctgtgagtgagttccaagggctgaccaaaggaacaaaaattggaaggaagggaggggaggggagggggaaaaaagaagggaggaaggaagggggagggaaagcagggtgggagggagggaaagaagaaaggaaggggaatgaaaacgtgggagggaggaaatgatggagacactgcatggaactaaaaatacatactgatttgttcatagtaggaatataaaaaacacttgaagaattaaaaatacttcataagtacaccttcataagtacgatatatacacaaggtatatattgtctctgtcctttttttctctgttaaacttaaatcccagctaacaggctatgttcacagcagccaaatactgcataatgaggtcagtggatttttctttgagactgttccgcaagtttaagctcaggttgagagacacattaggcctggtgtactcctgtaatcatcattggcagtgattactgtttggtaatctaagcttcaactgaatccaacattcttgcctctgctgaaagataattcagaggtgaaagatgaattccataatgctgacacaaactggtggtattcatcatagtgcttattcactgaatgcccattctagcttgaattatatgtccacacactcagcagagccacaccaatattgtttacttaatttttttaagtctccattttaggagaagaaaatctaatgtctctttaatcgtatattttgaataatgtctattctccagtagtcacctgaaaaacacacacacacacacacacacacacttttcctggacctttttacagcagaataatttctcagcattattaattatgtttctgcgtaaaagacatttagggacttttatcctttgtttaattagttatcaaaataatcagtcacacagctatttaataatgggccactcttaacagacaggtgaaacagagtggttgtgttcaaaaaatatttctagttcactagtaacttactaactctctctctcttttttttttttttcttctttgagatggaatctcactctgccactcaggtgcagtggtatgatctcggctcactcgcaacctccgcctcccaaggttcaaacaatcctcccacctcggcctcttgagtatctaggaccacagatgcacctggctaatttttttgtatttttggtagagacagggtttcaccatgctgcccaggctggtctcaaactcctgagctcaagcaatcttcctgcctcggcctcgcaaactgctgggattacaggtgtgagccaagcacctggcccttactaacactcttaaaacttgagctaatttctttcctttcatgagattttatggtctgacactgctgacttattaccttttcttccttgagagtttccaaatactaaaacaacaatctgctcaacaaacagaagaattcgataaatgttgattgaccatctagtacctgcaaagagaccctatgctatcatatacagagttatgagattcagacaacatgctttacaaaaaaaaaaaaaaaaaaaaaaaaaacctaagggatggtttcagattttgcctgtgtcttagtttcagtcatgtttggtatatatt

SEQ ID NO: 51858 - DNA, 3075 bp, Homo sapiens
tcctagatcgatagtaagaaacagcaaggaaatgcacagaaacaggatatagggaatacataaattgggtctacactggttaagaaacaaagttaaaaaaataattctactcactttaaaatgacactgtgctgaaaaataatgagaatagataaaagctttgaccactcccattgtctaccttaaaaaaatactagtatagttactcaaggcacggaactggacaaactgcaatttgaatccagaagacagaatccagagccagggacaaaacaagtcaaaggagttggtgaccagggcaatggccagaagtttacccgtttatatcagattctgtgccatccaccctgcggggccgtctgagctgtgcttccccagctggtgggcccctccacgtcagccctctcgtagactccaaaaggaaatcagagttgaacagtatagcatattgttattaaaagtgatttgagttgtgacatgaatattgtactttcaataaaggaggtatacactttagaaagctcttcagcctctagaaagaatagacatttaaaagattaaagcgtttaaagaatgatctctccactgaccagaatacccacatcaaaataatgtaccactgggttttattggtagctgcaatttagcccatatgaaatggaatatggccttagtgttaatgcaaatacgttgccatttatcataaaataagtgtcatctctaaaggtaactggactttccttaaaaatgaaccattctaacatgaaagaggcataaattaataaatccctgagaaagcctagcctacggctgtaaggaacatctaactgcttaactgggcaaccaaaagactcatacaaataattagaatacttatttccaattgatgaaagcaaaactactccaattcacattaaggttgatgagtcacataaaccactcactgacttaattttacttagaaattgctcatgcacttttgttgctttcctggaaggttatacaaatgattatatactcatttaattattaaactgaatgatctccttaagggcaacattaaacatactaaagtacagtacaccatgtcacaatgtgcttaagtatccctactaaaaataaaaattaaaacaaggttagaaaacaactaacaactaggttaaattcaatccaaaatatagatttgggaatttctaataaaattgtccatattgtttgaatgggttcaccactgagtaatagtgtgaataatttaggtaatcatctcaaaaggttataattcctctgggaaaaaaaaaaaacatgtttaaaactctacacttacaatatttcacataatataattaataaatgtttgctagatgattggatttaagttatatgataaaaaaatactgctcacacttataatgctttaaatgctttacaacttacaaaacactttcacataagccaccttacgctaacaactgtgttaggtagatattactatccccatttcatagataaggaaattgaggctcacagagattaaatgttttacccaaggtcatagccctagtaaattcactgcttagagaataattagcttaagttaagataacagctacttcctgcttccccattccagtctcagagacacacaaacacaatatgcatcacatataaaatgtgataaaatcaaaaattatacatcaatcatgtttatgcactacattatttgcctatttccattcgtatttttgtaagcgctgtttctgaaaggtaatatagcatataattacacctttctttttaaaatgctatgataatcttctcactgcctgggaagtttccatggcagaaagactgggcacagtcaggtaactggtatttcttgattaccatccaccagtaggttgatctttggaaagttacttatctttggaaagttacctatccaccagcaggttgatctttggaaagttaacgcgggcccccaggttccttgttagtcacataagggatctgtaataaacacttcctaagtcaggtccaccatccattctccacagcagtggttcttaagctttaacatgcacaagaatcacccagagagcttgtcctaacagagtttctggcccatcctcagagatctgatttaataggtccagatagggcccatgaatctgcatttcccagaagctcacaggtcagaccagtgctgctggtcgtgggaccaaactttgggaaccactgctacacagtaacatgggaaaccgaaatacttcagaaaatgaaagtctgatgtagcttctctccagaagccttcagtggtttccccatagcccttagcataaagtccaaagtgctaaatgaataacagtatgtggacacccaggtctccacccagatgcattgctcaggatctctttctgggcctttcctgataccccaagctgctgggctgagttttatgtccctcatctgtgctcttaggaaaatgtgttccctgtgtcctaaaactgtaaggaactgttatcacatgcttccttgcctctgttctcaacattccagaagtggtttgtaaacatacccccaactcccactgctccaaatttaaggggggaagagtcccctcatttcacctcacatcattttacttaagaatcgatgccaccttcgggctatgcatcaggtctcgtttccaatatttctagcagagccctcctcaacccttctttattactccccactctgctccccaaataggccacatcctagccccccattaattccccttcctgaagaagcgacagagataaggaaagcccaaagagagaacctgcacttctctgagcacatccctgaatgaggcaccaacttccccttccccaccagcctgctcttctcctcacaggtcctgagcatgctcaaggatctcaaagcacacagggccagtgtcaggagcatggacccatgcagtcacatagagccccacttacgtggtccccatgcttggcttcatgctcttctgtcaccatcttgaaactcttaatttttgaacaagaggcccacacattagggagctggtcc

SEQ ID NO: 51859 - DNA, 1709 bp, Homo sapiens
tactccctcacccgaaaagtctgaactcctctaaggcctccatcagcagcaagatactaaactctgcatcctgaggtcaagccaagccaaatgttgacataccaggagtctctgcccctccgaccccagcttctagttgatattcccacatttcacttgaaattcaacatcctctcccttacaacctggctacttccccatatcgcaaagtaaaagccttctccagctttaaaagttaaccgctctacctaaattccagattccaaagtttcctattccttgaataatattgcaaatagttactaagatgccatactgattaagtggcaggaactatgctagacatgcattatctgacacagaaatcataagaactctataaggtataaatagatttggttgaatcacacaatatttgtaatacgcagctagatttaagccatgaaataattattttgtatttatatgtgcattattattagctccattttacagttagaaaaactgaggctcatgagacaaagtatgtttcccgaagtcacacagctcaagtatataagaccccaaggctcacagccacataccacactgcccctcaagcttatctgactccccaattttgcacagagctggtcctgtcttctgacctttacttaagtaatgctcatgtcctctccataacttattttaacagccagggtaagacccacattctcccatgaagctgtcctgacaaattccaagccaagctggccccagcctcccttggaatccatagtataattgagcaagctgcccttcttatgccctgtatgccagctaatcattctttaccagtgagtcatctcttctcaaactaaactgcatagttggcaaagcttagaaactctggtaactatgtcattttccctttctgaaccaccatatctcaattattaaatgagggtgttagaaaaaggctgccctgtttaagagaaagcatgaagagcctgtctgcttagcactacccttcattacctttccctccgcaaagcacaaaggaagcaaatcttggcttaaattagaaggtagcaagttgtcctctttttgatccttggatccccatttccaatgcactggtgctctcagatcttttgatattgcaaagacttcctcccttgtcaactgtttccagttcatctttccaaaacactttctacatcccactaatactaactttcaagaacacagcttggaacatgtaacttcctttttcaaacactggcagaaactccccattatctaccatggaaggcagaattctaagatggcccctaagacttcctgcaccctcatctacaagccctgcacctactgaggaaatccattgcatcagatggcattcagggtccttaagggtcatttcctggattccaggctcaggttacctgacactaattcatgcacctcaagctccaggtaaactggtaatctgagcctttgcccaagctaatttccaggtaaatctgtccctttattcattaagtttagaaatctgcattccaggaccaggcacagtggttcacacctataatcccagcactttgggaggccaaaatgggaggctcagttgagcctaggagttcgagaccagcctgggcaacaaagtgagaccccattgctacaaaaaattagccaggcatggtggcacacacctatggtcccagcca

SEQ ID NO: 51860 - DNA, 972 bp, Homo sapiens
tagctatggggcaaagagtacagcagggtaaggagaaaaagacctgggaagaagagagtggtagctggagtggtaggagattttgggggcacatgtaatttaagtcttcctctgaatgaggtaagggagcaagccctacctacgatcatctgagaaaaaaacggttcccagcagaaaggacagacagagcaaagtgcctgaggctcagctgtactggagggatggtagtattgctgctactgaaagggcaggcagagtgactcactggggagagggaggcaagggtcagatcacacagcacctggaagtcaccactaaaagtaggggctacaaatataaatgagactactcaagagagacagtcttgtgaagagtttaatacgtaaggttacattaaaaattcactgcattaaaagcagttgatgctttccctaccatcacataaaaagtatatgtgcacaaacagacagaagggtgcatgcgctgaattttatatagtctaggaaacattttcacattggttgtttcagtcaaatacaaagaagttacagaacagcatcgagtacctaagagagaccaaaagcatttccttctgtaaagccctgcagctgagggcttacatccgcctggtccaatcagttcatttccaaacaaaggtaggaaatggctgcatcctagtatttcattgtggactcatgactcagtgctttggaacttggtatctttgggagtgagtgtctattctccacgtctcttgccacagggggaaaaaggtacagataaacagtaacacaatttcacccaaccgagatataaatctgtgggcttctccacccttctcaaaaataaatgaatgaatgaaggaaattcagttcctgcttttttttcttcccttctctgttttgtttcctaattcccaggactccctggtgtctcctaaacagcataaggtcaactgatggtgaaagtaca

SEQ ID NO: 51861 - DNA, 1340 bp, Homo sapiens
ccttttctagtaaaagataaccaaataaatccattgagaagtcacgtttattcaaaagaattggtttctctggacttatgacatttgagtatagtacctcctttcttctagaatactctgagttaataaaagtttttttgaaaatgaaatccatgggtatgtgtcataataagtaaatactaaatgcttgtagtttttcagagacttttcttaggtgatgtctattcctgaagtatgatcagaatgcaacatctaacattttacataattaaagattatagtattttgttttaaaaagcaaactagaaacctcaagaaaaacctatccactggcattcctttgaaacatacatacaaagaactttacggtgtttttccttgcctttgggtgtttgttttacaagagaggaactccaggtgcaatcactgaatgaggaattagaacctccctccaagctttcatctgattgcataccaacacataacgaaggacatgatatatttacagtagctaaagagttaatctttagcaactctgcttaaaaatcctaatggcagactgcccatcattcttttagacagagcttgtcagaaaaactagggcagcttgtccagctcagcagtcaactgattactagtgaactcaatggggctcccagccaacccctgagattgctgccagccccttgggtattcaaaggccaagttccaatgtggtttactttgccagaatcacatgatgtcagtgctattttctcctgaccagaataaccagtcattcaggttactgcaagtggtatcggtgaactaggcatcacttcactgttagaggtcacatacacaccaaggctctgctccttctcaccacggccgaggggccactggagcctcctgcaggaggtcagctaatcccagtttgtcagttccagccacccaaatcctgcacgggcatcctgcacaccgcagtctgctccaaggaccaggaattacacaggcgtgctgcacatggcacacttagagaacaaaacaaacaggtccaacttttataaagaacaagctggagaggaaaacaacagaaaactggttttggctttcacttatattatattactcgaggtttagtaggcaagccacacaaattctgtgggatttagtcaccgttatccacctatgcccacattctttgcatggtagtaagacattaattaatttttacatctatcaggagatttttcagttgctacaggatttgcaagggtacatgcatgtaaggagtagccagtttttaaaactgtgattacccttatctttcggtgagagaaagtatttcactccctaat

SEQ ID NO: 51862 - DNA, 800 bp, Homo sapiens
accatggctgcagattgatttcgttagaatacttcctatgaaaatgtataaaagaaaaaacctagtctcttgaattaatttatcttaattacaaatgataatacaagatgtttaatcattatttttcttctattttcctttaaaaattgctgccatgttttcacgaaataataacctttcattattttttgataatttacgtttatttttcctcctacagcagtaaaagtaacgcatccaaagaagcactgggcctctcttagactcagtatcccaaactgtaaagtgagaagatctgtagggattttcccggctctaaaattctacaagttaaagacctctttcttaaaaagtaagcttttatctacattgaaccaaatgagttaactattggactttgaaatgagcaacatgaaagtgttactcaagagtcaggttacacattttctatttctctttaataaataaaatgtattaaaaccctaaatttaacaagcatgtgctaaactttattaagtattgcttactatgaagaggactgctctctgccaagataaccagaaaccaaattcctaggatgctagagctaacagggatagtggatgtcctctaggccaattctcttccctgacagatacagaaactgagttactgagagggacaaagtttcccaagcacctgcaaacagtaggaccagcaatgtttttctcttccacttcagcaagctgcttcaatcactatatggcgtagagtgaatctctacatcagtaaacaaaggaatggaagaaggtaattccatt

SEQ ID NO: 51863 - DNA, 1141 bp, Homo sapiens
agcaatcccagtttacatatgtttaaaaactgtggctgcactttgtttcatgtatatgattttcgagttttgtgtatcccatgaacagaactgctactaaacaccagtgtgttatcaaaaagaaaaggaatgccacagattattaaaaattatgtgccagaatccaaacaagctaatcaatgtactgatcctgctttccgtacaccctagttaccctttaactaatggacaaacagtgaaataacttttcctattaactcctggctagaacccctaggtacgtgatacacttattataaagtgctccatataagaatatgatgcctttttaccctacgtcaatgtgacacgtgatttaaattttcctagtagggattgtggatatgagctaatctctccactttccaaacctcctgtgcaaagtgaggggtgcagttcagtggccgtagggaaacaagcaccgaaactagttcctccaaggacctccatggacacaaccaaccagagctactgaagtcaaacacggtgatcccaaatcacagtttcgtaagaagtaaatgttgtaaccattctccacttggcttccagttgttcttagcaaaagtgaagtcaatttcagtaataaatgttaacttatttcctacggagctcatttaattatttaattttcttaacacgatagaaaaggaggaatgggaaagagtgacttaaaggagaaaaattaaatggcaataaaatcaaaacaattcatgcaactgattaaacggtttgaggttttgactcaactaagggtcatttttaaatatgatactttcggactttaaaaagagtctgaaaaccagcagcatgcttttttaaggacaatccagttggccgggcgcggtggctcatgcctgtaatcccagcactttgggaggcccaaggcgggcagatcacgaggtcaggagatggagatcatcctggctaacactgtgaaaccccgtctctactaaacatacaaaaaaaaaactcagccgggcgtggggaagggcgcctgtagtcccagctactcggcaagctgaggcaggagaatggcgtgaacccgggaggcggagcttacagtgagccgagattgcgccactgcactccagcctgggctacc

SEQ ID NO: 51864 - DNA, 1590 bp, Homo sapiens
actgcaatgcaagagcttagtttgccatatcggaacacagatgccaagcttccccagctggcaactggggcctcagagtttaactcttaaattgtctgttaaagctatcttgtggcagagacctcatggcatagagggtgaacttctggtgggagactgtgttttcttatcagtgagaaaattgctaagtatcttatctcacaatatatgttcccacaaaggtctcattaagcctaggagcaagacatgccaataagagcccttctttatcttgtgaattgtgtatgagccagaatgcaaacaaatgtgcactagagttcacaagttcagtcaaggacaagttgctagatgggaaaacttaacagtgctcccctaaatcaaacatgcataccaagtatttctcctacacacaaactcttatgttcccagagcatttcacagtgcagacacaccaaatcatcctagagagcagcctcattttaatcaattatgaaagcttattttttcccataatgggaaatacctgcagatgaagtgaaatctattaaaatgttaaaatacactgccaacttgcaaacaattatctacttaagcttttcataaagaaataattgttacccaaaaggattctgaaattcagtaactgtaggaagaaaataattcttagcatttgcttcctcactaatgatatgtgacaaccaggaaggcttctatttcaaaaacagtaataatgattatgacttcccctgtaaataagtcacatttttcacaacttcaaaatgtacttcaattattataacatttaacaataaagcaacaaaagtggccacccaacaagagatcataattttaagggttcaacaaggctaaaggaaactactttttcaggatagcaatgaggtttctgggctctctttaacactccaaaacatgtttaataagagtgcaaagtacagtccaaaaatcagttagggtgactcattttaaactctaatctgttacatacacgacaacagttgctatctcttgagatctttaaatgtcttggtgtgttgtgacctctctcttcaaaacgctttcctgcctcagagaaaggccaatcccactcccgccccccgactcccaccaccaccaccacccccttccttttttccccttcagacaggacacagtctggcaactcaaggcctcccataggccagacttccttctgtgcagccctttgggtagaactgctaatccttcttattaattaacgagataacggtggttaactgaaaagcaatattaacgctaactatctaggaaactttaaccaaaattattttaggcttttggttgattttcccagtgtacaaaattgtgcactgagaatttcgtaacagtgtggtgcagaatcgagaaattccagaatgactgattttacctcagaccttaacgcataggtctcctctttaaagttttctctctctctttttaaacatgtattctgttacacatttctaactagagaggaaaactgaagtcctctcaaaatgttactataaaatttgcaagagtggcaagtgagggaactagaaattgcatagc

SEQ ID NO: 51865 - DNA, 4907 bp, Homo sapiens
gaaagagaaaaatatatccagccgatgggtaatattaatggtaacttttacaagtaaaggcaattcgttatacctgaaacagtttcatcatatttattggctattatcattcatggcttttaaaatacaaatagctcagcaactcatttttccagttttgttaaattaaagtgcgtgtttacttgctgaaaatagccatatctaagttaatcatactcagatgccaaacaaaatataaacaataaaaaatgtgtcagccaaaaagctacaggactgtatccaatcactgaataagccttatcattgttttcatcttcattcacaatttatgaatgcctcagtccttttgaatcacaatggcttctaattgtcatacaattgaaatcttaattatttgtccattataaaaatgcatcatcgtgatattagatgtttttaaaattttaacacgcccaagactggctgacacttctttatatgactagttttcatggcaatgtcaaagaaaatagttatcaattaccaatggtgacacatcttccgaaaagctgaaataagctgccccatacctttagaggtttaaaatactgcctcaaataacagttctgggctaagatattttagttactttgtcagttgttagttccctgggcagcgatgaaaactgcccccaggtaagtctgttgggtctcgccgcttttctatttgaccgtctggcttaaagtgatacaaatcgtgtttctaaaaagtataaaaccagtgttttatttcataacattattcctaaggtcttaggacaattctcaaagtcgaaaaaaatgaccttacttctaccagcattacttaaaatgccttacgagctacgcccaaatatcgtcaaatgaacaggtttccacaaaaggaacacgttctaaaaactccttaacaatcaccaagaccaactaactcgtgtcaacgtaaatactgcctttgtggtgcggtcactagaaaccccaaagtgcagcaggtcactatggaccagggtttcagatccccaaataaagcaaaggaatgggtccccggaccacaacctccgactcgattcgtcgcccgcccaccgcctgcagcgcagtccagcggcgcccacacagactcgtgctacagtcccctcgcccaagttcactggctgtttttaaaagcttagtcccccgtaaagtcctccaaagcccgagtccacctcaacgcgcgagctgctgagaggggctacgggcaccccgggcggggatgccgcaccacaacgggcacttgaggggccgcacggggcctcgcacttacaggtcccggccctgcccaccccccggcggccttgcccggcccagcgcccgcgctccgtgcccagggcgcggggctgggcgctcgcagtggccgtggcgaggggccgctcccggctcccacgccgccccgcgacgcccgctgcaactccgggccacttctccaagggacggggatgtgcggaggttaactcaagccgctaattgtccgcaacaaaacaaaacaaaggcatttcgggccagagagaaagctcgagaaagcgaccgagacatgtacctgagtgagacagatgggagaatacatcatgacttcgccttaaaacgcactttccgggagatgcccaagaaaatcttcgagaagcaagaatttcatctattcattttacagtcatctgagccccgcgatgcgatcaatcaggacggggctctgcgctggatcaccgcaacttcacaacaaacccagtcctccttaaatagccaaagattcaagttcactcggcgtgctagatttccaggggtgaaatccaatctacacttttaaccctcttgcagtccgagcgcgctggccgtgcttgccgaggccgccgccgccgccggtgttggctgcttttcgcctgggtttggggatttgttttctattttgcagttgttgttgttgttggggtgtagggggtgcgcgaaggttcggtgtgggttggattggggtggtggttggtggtaaaatgctttttcaaaaaaggcggggaggggggcgcgggagggcgcaggagggcgagcgggcgggcgggagggagagcggggagaatgtgtcaccgcgctgggaaagttcaaggttacagccccaagcactgcggcaggatcccggagtggtgatcgcaggcgaaactttgccgcgagccgaccatgtgtgtgcgcgaggggcagcgtgagcgagtgcgcgcgggtggcggggcgcgcgcgggagagggccggggtgggggcggggtgggatgggggagaagggagaggccggggtgagggagggggcgcgagcgctgatctctggggcggaagaggctcgcggcgcgtggtccccggcagcagcagccgccgccgcccgcgccgggtcttcggcgcccggccgcccgcccgcccgcctcgccccgcgtctgacccggccgagcgtggaggctgctgttgccgccgctgcccagagcccaggggtatcaaaacgatctcctgaaaaattccaaacgataaatcccgctctcccgctcggctccaaactcctctcttttctgctctaggctcttttttttccctccctctcttgctttctttcgttgcaaaacttggaagttgaaaaattcaccggttccaccctctggaccccgctcgagctctctccaaatcagacttaaggattgttttattatttaattacacaatcatcgctttactcctcctcctgcaaacgcgcattccttttgcaccagcctctccacaccccccgcccccccaccttcctcctcctcctccttctccttctctccccccacctctccctcatttgttaaaggtatcctaccggtgctacagaaccatgactttttttttttttccaaaatagctcttctttccgctgccctccccacaccagcacacacatacacacccccgaaaacccgccctggaagaggtatttcggtgctcgctgcggactcttttaagccgcgggaacatccgagtgggagaagcaccgaaaccgtctgagcccgagaaaggaacgagtggaaaattccctcacacccaggccgcccccaggccggggctggggcgcggacactcgcacccggggcgggctcagtccgcggagcctgcggctgccgggaaaagggggaggccgagcaggcggggacctgagcgaacttgggctcaagtagttggggcgcgccggcgtggaccaggggggtgcggcgcccagcccccgacggccccgcccggagcccgggttcgcggatagggagggggtgcgggttcgtcccgggtctgcccaccaggggcccgcacccgaggcagtcgcggcgcgcggcgcttcgccgcggtttgccgccctccccgggggtgccccgtgcacgtggcctcgctctgagcgggaggaccgggccgagccgccgccgccgcctcttgctccctccacctcctccccgcgcccggcttcgctctcctcctcctcctcctgcagccccgctggctggctcccaatccccaccccccggggcccggggcgccggcggaaagcgtctccctacccgcccgggtgcaggcggggcggggccgcggcgcgcccggggctgcggggcgggccggcgggcgcgcgcgcgccgctgcagccctccagaggctgcgggccctgagccgctcggcgcccgcgccggctccccaccgcggcgctgccccgcccccaccccgtcgcccgtgcaggctccgagtgaatgaacttgattccagggattttgaagaaggcggttcgccttgcaccctttctgcaccccccgcccacatacacacaccgccccccaaatccagttttctgcttggggtggatggggacgagggggaagcaaaggcctcccagacaatggagggaggaaaagtgagcgcctggggctccgagtctacctagctgggggatccggggggcgctggggctaccgggtcctcgcgggcccatccccagggcggggccgccccgcttccacgggtactgctggggcgtttcgaggctcgcccccgattccccggtcctctttccaccgcttcccagctcgtgatctgtcccctcaactttagcccctctcactccctctggtttctgtccaccgtcccctcttccctcccccagcggacctggaggaaccagtgactttttccttcaccaagtgggagttatccacatcaagcatttcacaacgacacatcaagaaaagtaggcaggttcaagtcaaccatgaaatggtcactttttaaccccgtcctgtcctcattagggaaatgctcaaacacagtccgttttcaaagagcgctcttaatgaggcgagcttgccaagtttaccagctgcagcccccgtaaacccagagcccaaagaagaaaggcgctggggggtggggagttcgggaggccggggacgggggctgctgggactaggaagacaggtaaagtcggggagatcgcgcggacccctgcgagttaaccctttcggccacacgccctgggagcggcctccctgcggtccccgcccctgccccggcaaatcctggagtcagcgttctgacaacgttaatttcctttgtgcgggtcatttcttctttttgaaaagctgggataaagttggcagtctttatggatgaaagaaatgaggtgacagggttaatccaagtaaatactcatttctctcagaaattttaggcaacctcatcttagattaaacacacacagacacacacacacagagaaaccaccagcacgaaagcatcactttgtattgcacattacactgcatcccctttctcaccctcaccagattctgaggggagggggtggggaagctctactga

SEQ ID NO: 51866 - DNA, 1511 bp, Homo sapiens
tttaactacacaagccaataaatttcaaagcagtaatattatcaaattgtgtaatgtcaaaaactccaaaaacaaagttacagatgttcatgacatcacattcactcaaaattatgctgctgttcagtctgaccatattaaaattaaagggatgcctatgtctgctaaagaataaaaatttattttggacctcaaacaatgaaaccgtcaccatttcttgtatggaacactcagctaatcaatttcctattaaaatagctttcaacaatacttggctttaaaattcatcagggccagtaaaaacgttttcccagtgcacaagaatgcagtcccaaccaccgatgataattactgttctaataattttattgccaaagtactttttcctgtgttcctcatcacttaggcaggaatctgtagtatattgcgtcagtgagttggagtgcttgacctttgcccacatatgatttaatagggacttttcagcgctagagctttctccatctctcataccattaaatgaaaacatcaaacctcaaatgtaaaactggaaaccacaacgttttgtgtttcacaaactctttgcagtttttacttaggatgcttaaaggtcagtttctttgcctcacaatgcttttcttcatattgtaaatacactggaaagtcacactaattctgattttgattaaatcttgaactcctcagtcatatacacacatacaccctgcttatttacacgtgcattcttttctaaccacataagcatgcgtgtgttactttctggacttattccattttagggctgatttaaatgtctgttcaagtgtgggatcaaaagttaactttttcccgcctattggaagttaaagttacaaggatggtgctataagatccgttcaaagaaagtcagagttaatcttgtgtattttggcgccttttccctgccagctactgtacttggggggtgggggaaaaatacttagagatcttgtctgtcctgtctcaagttcagtggcagttcttccaacccgagcagaagatggccatgttcacagccctaataataattctgatcacgccacttcagcatcttgtgtcaaagtcgaaactggcttccccgcccccttcaatctgaaagctgccaagtcctcacacacttcacattcaaccacaacttaatggatgggatattgtgcattaaaatgtgtctcagacgtattggggaaaagaagacaaggagaacgagagatagagacacacataggaagaggaaaaaaatcggcagcaaaaatagcggggttggggggaaactattaacaggagtggaaagaaatccatcaaaatcggttttaaaaagttggtggggggtgcggaagaaaggctaacaataggatgccacaaattcagggatgaggggatgggggttaggactaaactttagaatgaatactgactttaaacattccaacacaccaatcagagttaaatagtacttctttcacttaaaaatg

SEQ ID NO: 51867 - DNA, 1904 bp, Homo sapiens
tgcttcaagaggagagaatggcctacaaggtagaactaaagtatcatttgaacagtaatttttttccaccactgaggggagaggggcataaagcagagagttaaagcagaacaaaatgctagattctgcaccgtttggaccacaatgttactcactgattcccgtcataagagtgtgtcacatgtactaaagttgccaacgctaaataataatgcatatttgcaaattagttctgcaaatgcagcactatagcccacaacctgtaaaacaaaaatgacatttaggaaaggggtaaaacagccactttgcaatccacaaacaggaaaagaaaaactgtgccagggataggagggggtgcaaagaacgaataaaagaagcaaacaaaacccatcagttcaaagccacataccatcgcactgtattgcattaaataaaagagatcttgagtctgtaacagaaccctgggccgctgacttgacgtgtctcaggtacagatttgtggattttctcaggggttgttttggtgtcgctttttgtgtttagttaaaaaaaaaaaaaaaaaaaaaaaaaagcaatccgggagtagtcttatgtattttttaattgtaatttctgcactgccacagttcttggcccgagaagaaaaggcggtcaaagtcaagtctaaaagcaggcagcccttcagtctgtctggatttccagctttctttcctctcccttgcagaaggctgtttctcgtgcttgacttgaacgccgtccaggatggtgtgtgtgtgtgcgcccgcgtgtgcgtgtgtgcatgtatgtgtgtgtgtggtgggttttattgttgttttagcggggctgctccaggagtggggctgcgccggtcagatgcagccggcacggccccggggtcgcgcgatcgccccttccccgccctcggattggcctggcccgcggcggggctgccccggaaccgccacccagcagcgcacccttccgcgcccggcccgcgctcctcctgcagtcgcctccctggctttctctttctccggctcgcggcccgccccgccccaccctaccacggccggcctgggcgcgcgggaagcgcggctcttcgcttccgcctggcggcgggaaggaaaccgaaaggaggagccgggggcgggcgcgccgcgatgcatattcatcagggcgcccgggacccgggaggcgggagcgggcccgagtgggtgtggcggcctgcgccgcgcggcgcccctctcgagcgtgggtgggtgcgtgggtagcggtggggctctggtctttgtgcggccgcatggggccggagagcggcgagggcgtgaccgtctcgggggctgctgcccaggctccgcgcgcctttgtgcttcccgaccgtgtgtctgcggcgcgccgcgggcaaggggcccctcgccggccttctggagcaggaacccggccgaaaacgccgcggaaagactctaaaacaacaataatgataaagaataaggaattgctgttacttcctcacttcccgccacgttgctggcttcaacttcgccaggccacgtttgtttccgtgtaggaggactcccgaaatgttcctggctgcgcagcgttatcattaaagcaaaaggaccagaaagagcgcactttgacttatattgataggtagtcacgcgaatatcaaaaaaatagatcagtaatttagaagtgggtgaaacaaccaacaccaaagagataatacaaccccggagttcccagaagtaaacactctagaggagattggatagtgagttaatgttcataaagcaagcagttttgatcagcattttggaaacaaatatatgtagggggattttttttttcttagtttttgagtaatgcaattcttttcatgttaagtatctgtagttatgtcg

SEQ ID NO: 51868 - DNA, 582 bp, Homo sapiens
ggtccagcgggtgccctgcttaattataaaatggcattgcagtgtccctttgagttggctggctgtagcttctaatgctatgctatcaagcaaaatgtaattcttgatgtcctgtgaactgaacctctaactcaagtgttgaatcactcagagaagaataaaaaaagttaaacctttgccctcaggaaaaaggtatagggaaagacaaaacaaagaaatgctttctaacagcaactgagaagcttagatatgagcaagcatcccttatacagggaacggtggtggggggtggggactgattccagaatgactcacacttctagaatgagctgtttatatagcgtttcctcctcttcattccagggatcctgttaggaaggtcagggacaatgacaatcaagaagcaaagggaacactggagaagggtggtgggaatgcttggaacaccaaaagattcattcaccttgaataagaggacagatttctgtaaagggttatgcaatcagctgtggcccaggacctaacaatttattgttggaacatgtacacctgggaattctttttacagtggtgtgaatctct

SEQ ID NO: 51869 - DNA, 1504 bp, Homo sapiens
agggatcttaaaatgtgacccacatatagcttgaaaaagaccgtaacttaaatggactctgcagttacaatccagcgacctgttacagtgaacagtaacaagtgcaaactgctgccatccataagccattttccgaaaacctctttggatcaagaggagaggagtgagaaggtcaataaaggagcaaactgtttgtcctctctgcagcttcacaccagaagtctggaatgaatgaaaagctctggaatagcacagagaaacccgggatcccagtgcaggtctccagacgggggtgcggggagagaaactgtagtttacaagcgagaaactcaggatacagatttaaaataaataaataaataactagccaacatcgtctcgactagagcaggaaccccccacccccagttgagggaggagcacttagcaaggggctgtagctctagcagaagacgctctgaaaaaggccaggcctggggcggggaggcaccgagaaacccccgggttccaaacagagcaggtgcagggggcgtgcaggaacaggtgagggcgtcccggcgcggaggagcggcgggcgggcccggcagagcggagcgggggccggggatgggggtgggggtgcggatggggatgggggtgggggcggccgcttcgcccccgcgcctgcacactcaccgtcgccgctggctcgcctctcgctgccgccgctctcccgaccgccagcagctctttcccctcctcctgccgcgccacctccgcctcctccggcgccgccgcccaggccgggccgctctccccttccgcttccgggagcctgagggcctggaccggccgagtgggtgtccgcatgcccgcgcgcccgcgtggggagggacgactgccgccgtcgccgtctcgcttagctcccgggagccgcgatgggagccgctgagggccgaaactcctgcaatcgcgccgcagccccagagccgcggacccaggcagaccgcactctccagagcgcttgcacctggcgcgcctgggcgcctctgcccctccccagccctacttgagccgtccttctcattgtccccatatcctcactgctcacctctcccgagagacaggatgggggccttagcttaaaagattgcatgtatcctttcttcgggggatgtggccagcaggcctctctccccgcaggtgttctgggatgtcccatggtaccttgcttcaaagcgcggtctgcagcatcagcatcctctgggaactcacaatctttgaaatgcacaatttcaggcctgctgaatcagtacatgcacttcagcaagatcaccaggtgactcctggggtgcaccgtaaagatggaaaagcattgcactgtagtgcatggtctcgtccacttcagaccctctattgggttgcctcagacatcccaggatatttcctgttcctgtcctcaacctaaatccacacccaaacaatcttttcttatattttgggagacctccaaaagtttcctgct

SEQ ID NO: 51870 - DNA, 1832 bp, Homo sapiens
gagttagggaatctagcttctaaccctgattctgtgcctaagccagctgagtgacctcgggccaatcacttcccttctgcttcttctgtagaattctcttttcaattgactgcaaaaataaggtaaaaatatatttcaacatactgaaatgttagctgcagattcttcattaaatccatagataatgaaccagtagcagcaagactttaaaagcataaagagaaagtaaatttgcattttagtagtaccttctatgtgtcaggtgctttataaaatataatctgacttcatccttcataaatgaagaatgtcagaagtgaaatcacatgttcaaagtcagagaggaaatgggaagccagaatctaagcccagctggccactctctcagaaactcagtgctgctctgcacatggaggacctggtatgggtcaatgagcccttgattgatgattctgcacagggggtgacatatgagtacttttgggggaggattttggagtcaggcctcacttccccctcttgaggactctccctctctgtcctcatctgtcttgtctacctcctctcaaaaagataatactccatttggtctgaaaaacaatgtgagactctgaggtttgtttcctttggttctgagtgtaaggactgtgactcatggttgtccagaatgccaggacaaagtggtctgagaaaacagggagggaaaaaaggaggaccaagcatttcctcaaagaagctgtgactggtcctgctgcccacacgagcaccgtggctcaagttggttttctatctcagaacttagtccgaaggtaaaagtctatgtgatgaaatataaacctgtgaaattacccaagtgcctctgaccttgtctgtctccttaaccacccactgcatttcagtttacaggcatccgtttaaaactgtaccttagaaatggggttgggaaagggaaagtgaaaccaaacaaatggaaatcattattgttgcttcctttaccccaaaagaagaagaaaagcaaaaatattccccaaatacagaagggtgcatgtgtgtctccactgtcaaaaaaagcaattttttttttgagaaggaatttcactctttttgcctaggctggagctcaatagctcaatctcggctcactgcaatctccgcctcccaggttcaagcaattctcctgcctcagcctcccgagtagctgggattacaggcatatgccaccatgcccagcaaatttttgtatttttaatagagactgggtttcaccatggtggccaggctggtctcaaattcctgatctcaggtgatacccccctgcctcggcctcccaaagtgctgggattacagacatgagccactgcgcctggccaaaagcaaatttttttaaaaggcagggccaggcatggtggcttatgcctgtagtctcagcactttgagaggccaaggctgggggatcatgcgagccaagaggatcccttgagcccagggggtcaagtctgcagtaagccatgatcacaccactctaatctagcctgtgtgacagagcaagaccctgtctctttaagaaaaaagaaaagaaaagaaaaaagaaaagccaaactcggtagctaagcattcaaggccagattctgatcaatctggctggaacacactcacagcagctctcctgcattaatcacttaaagggggcatatactgtgctccaaccacatggcctccagcctacttcaccacgcctgaggagcgcagttcccctgctgttccctctgcctgaaggaatgaggggtgatctcctcccttgctgcctgctgaaattccacctcatgaagccc

SEQ ID NO: 51871 - DNA, 1732 bp, Homo sapiens
tctctgtcatgcagaggagctgtagttcagtttttgttttttgtttattttacggagcacatttaaagtatagtcttccttgtcaggagattcctggcactaaagagatggacgggaaacttaaccgcctcctccagatcgtccactattgcatcatttgaaaccaaagccttctaaaggcagcgactcgcacaattcaagtcaggtaagatggcaggaacagcagctgtgggtgctggctgctgctggagcctcggtctcaacttcaagagcagggagagcgctgtctctggagttgccaggtgctgaaatgaatagtcaataaatcaacaggtccggcgcgctagcccctgggtgctcaggcccgggcgcgccacgactgaaggagtggctaattactcaaacacagttgaaaccaaaggaggccggagtcggttctcaaagtggtttccctccggccaccaccgactctgaggacctgctaggggaagtgtcccggccccgtggagggagagggaagcaccacagcctgggctgcggctctagccctccagccccagcccctggcagccctgccctgctgtcgcggcaggtacccctctactcattgttcctcaggctgccccctcttttcatcaatcgtaagcctttcggttctgccaccaggaaacttccatagaaggtgagattcccaggtcgagggatgattccacgaacacccagagagccagtgccaggacttcagggtcagacttcgtaaagcccaggcgtcgctgggccggcccggaacagctcagagctgcgggtcctatggtcccgcgccctcacgcccatccaagtgctggcaggacgtgggtcctccatccccacgactcgcggggccggcgctccgaacctcggcactgcgtccgctccgcgcgccgcagggaccctcctagctccagcggggacagacctaccaaggccgggcgcccccacccggcgcccgccagcccaccccagagaggggaccaagggggcggggcctcggccgtcctagccgggctcactcttctctcccggactcctgtccagggcttcaggggccgggcccgcaatccccatcggatcgtacctcgtccgcttccagctccgctcggctgcctaagagcgccatattcctcctctggctgctgccacccaaaaaccaagcagggaactcagagccgactcctgctctcggctctgggctcagcccagcgcaaaggagggcaaaaggggacggcccggcgctccctccgggtctcgggcggggcctgagtgcagctactcgatttccccgcccccggagccggcaggccagcacagcatccatttcctccccggacgccgcgccgctggccgggccacttgcccggcccccagcgggcggcagccccgcccaagtgggtggagtcacctcccagataaagtttcccggtctggcacgccctctgggagggtttcctaagctttcctgccgcctgttctctgcggtggctgggcacacctggaaagaagctagagagcgcgggcatgacgaagccaaggtcaaagcagcgccccacctggggtccgtggaagcatccacctggtctttggtccggtgccagtccttttccctcgccaggtggccaccgcatctcgcagatggtgtggcctgagggcagccttgggtcacggtcactggtccccgagaggcctctgacacacc

SEQ ID NO: 51872 - DNA, 1273 bp, Homo sapiens
acatgtataaaaaatgacttcattgatttagcaactactctgtggagctgatattcagctcaaaccactattatggattacactggtgctgaaatgcaggaatatttctgactggctgagcatttttttatgcctgtgctatactggggttaaatacttgacatcagcctggtcactctgtgtcaggctctgttctgagcactgaagatatggtaatgaacaaatcagacaaaactcccagccctcctgaagtttacatgccagtgggggatgagagaaaagaaacaatgaaaaagtaactgtagcatgttagatatagataagttttaaggagaaaaacaaatagaaaaggagataagaactgttagaaattatgttcccagtcatggcagaggagctcctatgagactaatcctgctgcaggtaacaactgtaaattctggaccaaaaaaaaaaaaaaaatcaggccggcgcggtggctcacgcctgtaatcccagcactttgggaggccgaggcgggcggatcacgaggtcaggagatcgagaccacgctggctaacacggtgaaaccccgtctctactaaaaatacaaaaaaaaaattagccgggtgtgggggcgggcgcctctagtctcagctactcgggaggctgaggcaggagaatggcgtgaacctgggaggcggagcttgcagtgagccgagatcgcgccactgcagtccaggctgggtgacagagcgagacactgtctcaaaaaaaaaacaaaaacaaaacaaaacaaaaaaaaacccaaaagcaaccagactggagagagacccaaaaaaggcacattctgaggggtttgagagctgtgcaccaaggcacagaccaggtgcagtttattagttcaaagaatccaaggacagagttcagagaaaccatagcagctggaaactgagaagagaaatccaggaaaagggagaggtagagaggagaagcttcaacttctctgggtattaccctttcgctgaacctggctgacgtctgaaccaggcacatatgccaactccaagctgcccagataaggttaaaataaccaaactaaaattctgccactcactgcaaggaaaaaagtgaaactgttgtgttcagccaaggcaaccaactgatttatttaaaaaataaaaataaaaaacaatactattcagaggctctaaaagaatccaactcaaactccggtgtgttaaaagctatcttcctacctactgcaccttacctctttacaatctatttaatc

SEQ ID NO: 51873 - DNA, 821 bp, Homo sapiens
aaatgtgtacagagcttttttttgccacactgtgccatctcctggataccagatgccaactgctcgctggatctagagacaggtaaaaagaatctacaaatgtgacctggatgccaggacaggcagaggcaccagtaccagcaagaagcttcagaaatagagtagttattaaaatgaccatttgcagtgagaaaataaatcactacaaactaccaactaccagaggctaggagattcaggtcccttacttgtgacatctctttaggcaatttatcataaatgcttttatatggatgcatcctgcttacaatctggcttccccttccgcttaggtcaccctttaactctctgtaagtcccagcacccacagaatctgagcaagtgaaggaccaggaattttaaacctcagtaaagtccaccgtgctgttaatgttaatctgccctgagcagacacaccttgtaaatactctgagaataaggttcaaagtaccaagggcacttgaggaggacatggctttgcttcagtcagggaagatttcctagaaaagttaatgcttaacagaagccaacaaagaaatgagtgaaaaacggaagaggaactaggatttctgcccagttgggaattttggcgtttacaaaacaccattgaaacactgactcaattatcatcttcctcctggaaagacagaagtcttccctatgatgttaaagaggacacattttctttttttttctttcatctaattctcaaaatagtttctttcttttatgttttagattcactttttccatctgttttttaatcttttcagtataatgcc

SEQ ID NO: 51874 - DNA, 2292 bp, Homo sapiens
ctttcgagtggtaaaaatgctctcaaatagtggtgatggttgcccaagcctgtgaatataccaaaaatcactgaacacttcaaatgggtgaattatatggcatgtgattacagtctaataaataaatagtatgtcctgctgtatccttcagggcctctgagaaatggagagagctccatctgaagccagactgagttccgatcctgcttctattttccccgcaggtaaatccttcctcaacagcaacacggggtgatacgccctatccggaaaggttgttgtaatttttaaaaacattaaaaacatacattagggttaatcatgtagcgtgtgatacacagacgctctgaaacactactgcacacgcacaccaacatggggcctctgcggagcttgtgaaagaaccagatctggagggctggtcgtgtccctggtctcggccctcgccctccttgtttcttaggctctaaagcaatcaggcagcagagcagtccttgaaccccagtcaagaaaaagccctgcaccccttagtccgaaagccgcaaggaacggggcctaagcgcctggcgaggccgccctaccgggcagagacagttgctacgtaactcggggaccagaaacccagccccacccgctgcggttaaccgacagccgcaacggttcccgcaccgcccgggtcggagaacaatgctgcgccctgcacgtagagcctcgcggtgccgcgccctggggcgggcctgcccatggcctgccgggaaatgtagtttctgatgccctgcccgcgccgcctcgccgctcgccggccgggcgccccaagcaactacaacttccatcacgctctgcgaggccttgatctgcaggcttttgcaggggaaggagtggggcgaacatggctgaaggaagccgaggtggccctacgtgtagcggggtgggtggcaggcaggacccagtctccggcagtggcggctgcaactttccagagtatgagcttcccgagctaaatacgcgcgctttccatgtgggcgcctttggggagctgtggcggggccgtctgcgcggggccggggacttgtcgctgagggagccgccggcatccgctctgcctgggagccaggcagctgactccgaccgggaggatgccgcggtggccagggatctggactgcagcctggaggcggcggctgagctgagggcggtgtgcgggtgagtgcggagcaaaggggctcttgcagcttggggtcaaacagggtgcagccttgctcgtgcgctcctctgggactcatccctgagaagggcctgtggtttagacctgggctaggagtattaccctttaaagctttcaacccgctggagccttcctgggacaccaggagaagtcctgggacccgaatgcacagtttctacgagttggagcaaagggacaagacagctgcatcaaagactagtttttccatttgcttattctaagagtgcttgttaataaagaaaagcaatcagggcaacagcgacgtgtacctgccattgacagacactttgacaatggaggaacctgagtaatggtgaagctgcgggagacttcatcagaggagtgttaaaaccccgactaactggtttcttttggggaccttccgggtattctgttactgaaatatttcttaaaagtgccttatttggggatgaaaatataaaaataactttaatctctttctccatttaacagtactggctgccttcatcggccttttcattataaaatataatcacagaaatcgttgtcttaagttctggcctctctgagccgcctgctggattttatctgacttcgtaattcagtaatgtatttaggaaaacaaccctaactcgctgtgaaccagatgcagagtcgaccttaaagtattgcttttcctttttgttttagccttgataaactgaaatgccttgaggacggtgaggatccagaagtcattccggagaatactgacctggtgactttggggtatggaggacttggtttttatgacctatttatttaaacattttttcaacattatgttttgaaaagttgaaagtgcagtattgattgttgtctgtatacccaccccttaaattcagctgttcttaatatttgaccatatttactttagccgtgtgtatgggatgcctgctgtgtgttttttcattttgctatcccccattcagtaagttagacatgataatttacccgtaaatacataagcatatagcttctaaaagtatcattctcctacataattattgtggtattattatacc

SEQ ID NO: 51875 - DNA, 1462 bp, Homo sapiens
tcacttactcgagctggccaatggggataacctttcatcttggcgaagatgaggtctccaggtttgaaatcgcgagtcatgtttcgggggcgagaccgggggtccgaagcccgggaggcggcgaggagatgcggcggcgcggggatgcgggcggcggacgcgggcccagctaccgggcccgcgggcgggggaggatgcctcggggcgtcccgacgcgcctgctagggagagcaccgagggcggttaaagcgaagaaccccgaagggaggggccgcaaggggagggggaggggaaccggcgggtgggggtgggagagcgaggggacggccgcctcccgctcctcccccgccagtgcgctgcctccgcgctggagcaggtcctccaccccgccaccgaagagacgccaccacctgaagcagggatgctgcccggccagaaatcgcccgtctgcccgccccatctttctccgggctttttccaccgagcttaagccccaaaagggagggggtgcatgggagagaaaaaggcagggattccgagaagcgagcggcccccttccgcccacgcaaggcctcccccgcaacctgctgcccagcggctgcagcctcggccccctcggctcccgggcgggccgcgtccacttccccgctacagccaggagcgacgccaccgaggggggggcggggcgagtccccgtcgcccgctcacctgccggggccgcgggcgccgacgctgcggttgctggccggtcgcctctacccgcgtccacgcaagccacctgcgccaccagctgccgcagaggcgtctcaacggctcggaatcgcaaccgcgccgccgctgccgccgccgtagctgcgctgctcccgcgcggctcccgctcggcgcccgctagcactggggcgcgaccaactgtttaccgagagaggggggatgttgcagcacccggcgaagctgtgtggctccgaagcggattttctggaaaccctacgtccccaagttcgctttcatgtaacaggtgcatgcagatggagaggaagacgcaagcgaagaagaaaggactgggcgaaaatagctcggcctgccgcaagttccccctgcggtttgcggagtggtcgggcccggcccgcccctgctggcttctctgcgtgtgtgtatttgtatgtgtactgtatgtaaaaggcggggagggaggaaatgattgttgtggacgcggttttgggggcgggtatccgggcctctctcccttggctgcgtgttagggagaaagtggcagtaaagattcatgttcttgtatcgtttccagggtggggaggtttgaatgctgcttttgcgcggtttgcatcatccaaaaaagaggagctgtacgaaaaccctaagatgaaattggagcatgcggcggttgcagggtgtgctgcatctaggcctcttgcacctcgctgaatgggcctcgtagtctcctttt

SEQ ID NO: 51876 - DNA, 1280 bp, Homo sapiens
aaagacggcccctacacctggtttcaggttgattacaatcaacaaggacccagtttagtatagaaggctcgttttgcattaaacacctttttgtgcagaggaggtggtggtggtgaagataaaaatctttgaccaaatcctgtcaatttgcattgttctctggaagaataggctttcaaaagttaaggaacaaaagaggagttggttttccagtctcccttaggcggcagcagattgtgaagcagccaccgggaggaaccaaagtataaattatcaataagaggacggtgtgtgtgtgtgtgtgtgtgtgtgtgtgtgtgtgtgtgtgtgtgtcagagaaaagtgagagaagcgaggaaagagatagggaacacacatgctaaggctccgaggcgttttccacgatgtgcctggttacgtaatgttgataatgaaacgcactgcaagcagcatcaatgcattcttccgaccctgctcaccactcccagctgggatacaatggggacgggaagaggggacaggatgccctgtgcaggcagagagctgtccagacagaggtaaaccaggcagttgggcagaacccgagcccagagaatttctccccaggccccgggaccagcccaccgttgctgtggctctaaagatgggcagaagaaccagtttcaaaaagcaggatctgggatccgacctcttaggtttttattcagcaggcagggaaaaggggttagaagctggaaatctgcatttccactcggctctggcgactgagacaggaacgcggacacctcacgctgaaaagccacagcagcgcgtgggcagggcgcacccccgcgcggggacgcggagctcctggagcgagagcgcgtgcggtcgcgagcccgccgctccccagcaacggcgcatgcgcccgttcgtccctcagcgaaggcgcgctgcttggcgggcgggctcttccaatccgagccagcgttctcggagtacgtatccaggagctgcaagctgagggctgcgggaggcgggaggaaaaagtggggccgggcctgagttgggctgacctgtgaaagtctgggaaggtctgcgagagaagcggagtgttttcagctccggaagtggcagttgtaaacttcacctcccgggggctcttccccttctgtacccctttgctgtttgtccccctcctcccgggtcctggagtccgtcgtgttccaacagtttttgctcttattcccgtgggctgcctgggcctcctttcacccgtgagacttggagcggcccctggg

SEQ ID NO: 51877 - DNA, 1374 bp, Homo sapiens
ttaccagttgtctgaattcattctgtagaccatactgaacaataggaagttgatcctatttcactgtgcacttattctttttttaagagatgggctctcacaacgttgcccaggccggtcttgaactcctgggctcaagtgatcctcccacctcagcctcctgagtaccagggactacagatgcgtaccactgtgccctcactgtgcactttttatagacaagttttctaatataaaaggtggaagataattaatatttatcaagcaactgttttatgccagttattatagcaaaactaatgatctcacaacaaacctctagcataggagtttccatcaccattttagacatgaataactgaggatcaaaaatgttaagcttttggctaccaaagatcatacataacctaggaattagtaagcctagagctgcaattccaaagtccacattattttgaaacactgctagtcctgccttccagaaataattaacactttttaaagagaaaaaaaaattttttttaattgtcctgaccagctaggaataattttgataagtatgttttggtttgaaatctagatttcttatgaattgattagacaaaacaaaatacatacatactagcactatttatgtaaacagtaactgtgaagttggtgtctatctttcaaaggaaacaccaccctcactgtgttgcccagtgtctctagcttggccaaaagaccacacagatactctcagaagcagagtctctgttgagaggtactgatggtgagtcagcttgaccatgctattacttcccaatggaaaataatgacatatgccaaataaagctgatcaataaagcattcacttgtgtaactcctaggataaagatttaaaaatatattttctggactagtgtagtaggctgaataatggccgtacgagatgttcataatactaatcactgaaacctgtgaatgttaccgtctacggcaaagggactttgcaggggtgattaagttaaggatcttgagatcaggagattatcctggattagctgggtgtgctctaaatgcaataggaggtatctttgtaagagagggaggtgcaggggttagtttgactatggagaggaaaaggtgatacgatgatggaagccgaagttgaagtgatgtgctgtgaagatggaggcagagtccagacttaaggctttcagggcggtgctagaagcagaaagaggcaaggaaatggattctcctctcagagcctccaggattgtaagagaatacatttgtgctgctttaagccacaagtttgtggtaatttgtggcaatatgtcacagccaccgaaggaaactaatacaccagtaaacgtttagtaatttttt

SEQ ID NO: 51878 - DNA, 838 bp, Homo sapiens
gagggactcctctccatgcggtcttcagggctcaggccctgcctgtcgggtctggggtcctttgctggagcccccacaggcagctggcaggtgagggaagagagacctaggataactcaaatgaggccacttcacccactccttcctatgtcagtctggaaatagccaagtcatggctcatgttgcattggcaagaacaagtcacatggcctcacctaggtgccagagagctgggacgtgtgtgcccaagtagtgtgttcaagaggaggagttggtgggcgatccatgtccctgccacagtggattcaataaacacatacggagactccagcgcgtgccaagcaccgggatcccagctgacccgagctcagagccctccaagagagcgccatctagtggagaaaacacataacataaataactgtgataagccttgcaggaggaaggaccgcaggcactaagtgagcacggaagagggaggagtaaattccgcacagattacggggcaggttcaccgggctcagtcagcctgaaaaggactttaatactctaaccgctggtgtgctggagatgcctaactgtacaccagagatgtgtgtttcctttgcgatagtatacacatgtcattggtaagcagctgtctagcatggcgctcaaattcacagccttctttcacctgggtaaggcctgagacgagttctcagtggaatgttagccgaagggatgatgattacctctgggccatccataaagaaaaaggtgttccttcttcatcctctcattcctctttcatgactaaatgctgatgcccgagttgcttggtgagctttatttgggg

SEQ ID NO: 51879 - DNA, 899 bp, Homo sapiens
ccttcgtttatcattgtggcaacgtcaaaatcaggatggtttctttcaaccacctatgctgcctttgtaagagcaaggatgctccaagcaacactggtctccccaagtgtcagcgaggcccctctctccataatctctggccaccctctgtctgtctcagtttcttctgacttcactgtagggctccccaggcctcctcagtcttgtctgtctcacctggacacctgctcagtgggaacccatgtccttgaccatctcggctggcccatgcaccttggcctgtttgtattcagaccttttggaatccacagggacaactcaccagtgaccaggggcagagcagctgtatcaactcagcttggggaagctcaagtatccagtgatcttggctgtgtggagtttgaaatgaagcccagtgtattactcacggcaaaaccaggggccagccaagttaaatagagcactccccgaaacattcacggactgattagagaaggaagctctgatttgaagagaggctattttgtgtctgcttttatttttttaaacaacatgctttccattagtgagatgggaaaagtagaaacctgaaagaatgatatttattaatttaaaaagttcaggtctgtgaccatatgccatgtccctttgacttcataataatggccacactttgaggtcttcctttgtccagaaactgtggtaagcactttgtaagcactttctcatgtaatctttatgaaaactctgtgatgtaggtaccgttcttactcctgtttgcagatgggcaagctgaggtccagagagagtaagcacacactatttttaagtggtagagctaaaatttgaaccctggcagtctgccttcctattcttgcccgctcttaaacaaatgcaag

SEQ ID NO: 51880 - DNA, 545 bp, Homo sapiens
caagtagtggggtctcaatcaagttatttcacctcttcacgcttccatttctttaaagagaatggatgagtgccggggccacacacaacaaataattttcttctttccctcatttatccaatcaacaaacattgctaagtaccctgaatcagccaggcatggagcaggcaaccatggatataagatcagcaagatcaggtttgtgctaaaggtcactgtctctagtgaaatgaaaatatgtgcttcttagtcatcgtgagttcaccctgctagttagaagcaaaacaaatggactcccagtccagtgctgtttcctgtatattttattacttctctaatttttctagcaaagcccatgtttctagcaaaacatttctccttctgtttctgggtgtgcacataaccaatagtccctttctccaataagttccattactcactgcccatcatccacccacccccgccctgctgtcacctgggcccccatatcaacttgtcaatgatgtagcagggagatgagccgcagagtgggtcagcagcctggg

SEQ ID NO: 51881 - DNA, 2892 bp, Homo sapiens
caaaacggttggatctgtcttacatcaacctcctttaagcactttcaagtaacttgccttgaccagagagctaagaagtaggcatttcactaccttttcagcaaatggtgattttctttgtcagccccataaagtgaaagttctagctgttcctaggagaaaaaaaaaaagctcagtttcactgtcaaggccaagaactggaagccagaacacttagagctcttggttctgttgcatgattaattctccatgaaggcatttaattttctctccctcatcttctgcatctgtaaaataggagtaagcaataccctagagttgccagagatcaatgggcagggacaggcattaatgaggcagcatatgaaatattcagtgagattcttggataaggagttaccaatgattacatgcttgcttaccaacttccagatttagcaaatctgtattgttagtacatactaaaaattaaaggacagcaagaaatacaaatttaatttgtaaaaagtcttcaattactggtttggaaatgccccttggagatacaggcttcattctggcttgcttttcaaactcagtcactaaccacagggtgtgagggtcccgctcctgcagtcttcagggccattggctccactctccaccccctgctttgtgctacagcttccaatctgatttcacaataaaaggtcacacagctgcctttggctgccaagtttcaaatatgccctgatgttaaccctttagaggctacagagcagtggcatttttctcagtgctgttccagtattcacataaatgggtcatctaagttccaagaatatgcatgccctccaccctccacataggactccataaaaccattacatttgaatgagaatgtaagatgcttccaaaactacattgatgctatttcctaaattgatttttttgtgaagaaagttgtgttgtagtgttccaccctcagagtgtcttaaccagtgagcatcttgtagacagtccttccccgatattctgcaacacctcaccccatccctccaaagtctttggggaatgaagaaggctagagccaccagcttccctcagagaggagacctgggctttaggcttcctgaacctcattctgactctccttaatgttcttctttatcctgcttcttgaaaaagccaacttggagcatatgtggacaagctccagaaaacagtgtgctctcatcagtgagcccatctagtggggaaggcaaacagagtcatgcacccggatccccttggtggaaccaggccagcagtcagcttagaatgtctaaggaaggagactccagcagccaatctaacctcacaaccccacaactcctccctgccttgaatcactctttccccgctggcccacagagctttgatgcagcccttcagagacctgggtgcattgctgacacgactgtctagcccactcccctctgagacctcgtgggaagtgttatgattttctctgtgctcctctgtgcctagcaccgtgcctgacactttagaagccctaattgtccgtcagatgaatcaacaaagataaaatatcagttgacaattaacctgcttcaaaggatgaacaactctatttctggaaactgtactgaagtaattggttcacagattaaattgctaaagtgcttactggacaagttagtgagtgacttttttggcacacttcataataagtgacacatctttgactagtcaccaggaatgtgagtttatccaccaagcatttattgagactcgcgtacgtgcccaggagtgttccagtaccgtgggggagggtagcagggaaagggaaatagaacagaattgtgagtcctgggtcctgtcctccagcatcttaatcctaatgaggaggaacagattcagaaagactgtggcagaacacttgtgacactccaagctggaccctcaaccctggacaaacttgctgtgatttagacatggctcagccagccaggttggttctggccacagtatctctggaccacatcatgtcacaatgcagtatggtcacatcattaaaacatccagacatgccttcaaccattatatagccaaaccagtgtctgtggggagatgagtggtttcagtgaaatcacaagtctgagagcagaaatggcaaatgaagaacttcactgagcaaaacccctggaaaagcgagggggccatgccagcctcttccttcagagctcagagctgctgcctcttcctctcacctgcctaggtttcctaacttctcttgagaggcaggtgtggctaacacatttttaaaaataacttggcacctatttccaaccccctttttctttatctctctctgctatagcagctggaaaatctaaatatggtatttcccagcctctctggtgttctcttggccaatgagacagaagcacaagtcagctgggggcttcttggagggtttcagctctcctgacaccacccctacccaagtcccttttctgtcttgaccacagacatgaccgctcaaggtgaggcaagcctcttgtgaacatgagagaaaggttaaaatcagcacagagacattggtcccgatgccaaagcagccttcagatgtcttgttgtgtaagaaaacacaattctgtttaagtcacccttgggttttctgttacatgcagctaaacatattcgtaactggattagagagttaaaaatttccttttctttatatgaggaatgatcaataagatatcaaaagtgaataccaaataggaaagaggaatatagtagcagagaaactagtatccctgggacccacaatgacatttgtggaacagctcattgtgactggctatggacacaaagtgggccctttgcctgcctcccagttaatac

SEQ ID NO: 51882 - DNA, 1830 bp, Homo sapiens
atggatccttctttcccctgcgattacccaactctgtgatgattcttctcccacagcagtgttttaaaaaatcttcttttgggcgaacgagttcacttttcctcagtatatatgccatcaatcattgatgccacaaacaggcagtgaaagcctttcgtgagcaatgccctattgaatcctgaggaagccgccacaccttgggtcaccactaggagtcactctttagcactgggaatagacagactcaatagcgcttagcacatagtagggctaaatgcccatgtgtcgaacgcatggaggaactaccaaatgtgggttagatgccccctcttgggggtcccataaacctttgtagcatcatgtggtagggtgtcttgtgagtaggtatgatgtgccctatctctaggtcattcaccttagtattcggaaacctagtacagtgcccaacacgaaggagctactcagtagacatctgcagaatgagtgatggaggagaacatgcagtactttaaaatattccctaaggaggtttagtttcatttctttttttcactttcttcttttgttactattactattttcccacaaaattcctgctttcaacatgatgatacccaaagaaaaagagagagagaaaagagttcaatgaattgcagcttccagctggttattattattatttaaattttggctgtatctttgtgggcaactgaagcctatgatttaagctatctctagctgagcaaggggctgtgcccgcccaaccactcgtatttccagaatgcactttgctgtgtcaatacacattacttgtcacattgccatgagtctgagaagtttgatctctgctcttagattgttgtcatgtgtcaaatcatacagcccagggggaatgactacattgcgcaggaaaaacagacatcgagccgtggtcagaccacctcaaagataaacactgctgtgtggaccagaagaagaaaggtcgaaaaacaatctgaagcctcagacactgtaaggctttttcactttcattttcttgccactctgaggcttccattttatcagcgtgtgcaaatatacatttttcttccaactgaccttccaacagcttgtgccacaatacgggactagcttgagtaagtggccctgtcattggttaaatggggtggtatctacgataccctcaactggaagctgagtctacaagcccccacccactgtcccctgcaagatgaaagctcaggaaagatgtaaaaaatataactaaactcagggaagaaaagtccacttcagggagtatgagctacccaagcagaaaggctgaaatcactgtttgctgctgctgctgctggtgggttttctattttttgaagtcggctaaaaacaaacaaacaaatgagtactagttgttctcattaaaaaaggaaagggcagaagtcatctccctgtttaaagacgcccacacacttgaaatagtttcctagaaaggcagatagaatttaactgggtgtagcttagcacactcgcagagcatttttacacctcccaaatcctcaatggctgatcccgtggtatgacagcagcatgccacattcattgcaccagacaaggattagggagtaaaatttgtcatgtatgtaaattgtaatcacagtggatggttgtatgtgctcatttaggcattttaacagagtgtgatgctatcctctccgcaggactaataagcattagccataatgaggtcagtcagtcaggcattatcaggggatttaattgggacatgggtctctgctgaagtgaaaattaataacttttgtcaatgttctggtg

SEQ ID NO: 51883 - DNA, 1384 bp, Homo sapiens
aagtggcttcaacaacaaacatatattgtctcatggttctggaagctaaaagttcgctatcaggctgttggcagggttggctctttctgaggactgtgggggaaggatctcgtctaggcctccctcctagaaatcgctggcattccttggcttacagatggctgtccttcctcttctccctgagtcttcacatggtcttccctctgtgtccaaatctccctggtttttctaccagtcatattggatcaggacccatcctaatgactccttcctaacttgatcatccacaaagaccctttttccaaataacgtcacattcacaggtggggaaggttaggatttcaacacatttcttggggtcagggacacaattcaatccataataccttggcaagtctcctatactctctaacgcactgtttccagatcacgtcaacagggatgacactgcctttcccactgcgaggattcaatttagatgacaagtgaaaagataggtcaatgataggtagagcattgacccagtgtctggcccatggttgttgttcaataaacattggctaagttatcaatgaaaattcttgctataagtatctcatgacacacacgtgggatacacagaaacccatgctcaactgggcaggcacgtgtgtttatgtggctccccagtgtccctagagaagattctctcttacttttcaggtgtctttggccttttcctcttccagcctctacaagcaggttgtttgcccagacacagacctctctcccacaaagcccactttggagattggcgcccgccttctgctgctagttagttgtttgaaaagtgctgacgcttctcttcatccaccgtgccaggactccgtgccaaagccgcccacacaagcaaggctcgccctgcatgccagggtttcagaaagtggacctggcaccaaccaagcgtagaaagagaggcccttgtgatacagcctcccgacacactcacacacacacacataccagccagagaccagagaccccaatcagtacttttaaaaggaataaaaattgctcaatctctttgatgatattcaaagagtcttttttaatatatgaagaagcacattctaaattcttaacacatctggtgtcacccgctcttttccccctctaaaccctcttaattccataatttagaaggtcttaagataccgaaggatctcactgaggcataattggatatcttgtgcgttccaagttgcatctgatgtcccacctcatcccagaaacttttccactgagttggagagaaaagatttgggggttcggggagcaaggacggtgctctgcctgctcaagtgggctttgacagaaaagctgagctgcctgcaggaaaatgttt

SEQ ID NO: 51884 - DNA, 3383 bp, Homo sapiens
ggtgaggcctcaggaaacttacaatcatggcagaaagtgaaggggaagcaaggcaccttcttcacaaggtggcaggaaggagaagtgccaagtgaaggggaaaaagcccattatacagccatcaggtcttgtgagaattctctcactatcatgagaacagcatgggggaaacagcccccatgattcaattacctccacttggtctctccctttacacttggaaattacagggattataattcaagatgagagttggatggggacacaaagcctaaccatgtcaatggtcaaggtgataagatttgcttaaggtcagtggtaaaacccaagagagaccccaggactccagacactgagcttgtgctctgtctgtctctccagggtttgggttgtccagggggttgcctccactcttggataaacctaatgctcggcatcccaggagaagatgctcctggtccctaggctgaatctctggaatgggacgggaaaacaaatgccctccccgtactgggatacctgggcagtgtggcaggagtcaggaaggagggcaaggaggccacctggtctggtcccctggctgacaggaagtgatgcctcctgggctcattcagcagctgttgcttgcttggcatggtttagacaaacaggcagatgtcctcagagtgacctccctgactcagagagtttgggaactgaggtattcactccctggggttgggggtgctggccaaggacagggcatgagctgctgactcattctcactgcctctccgttctgatacttgaaaagttgggaaagaattgggaaatgaagaagctatctgaaaagggtgagttacaggaccgcaaaataacatgttctccttcctccaagccatctgctccttgtcccttctaagatgccaacagatcttggagggtttcatgcattcaggacacagtggtccttacaaggtctccggatggctgagcagacagaacggggagagagatgattctatgagatgccagagagagacacggtcaggtggaaaggctgtctcaaatattttcatggtgacctaagaataaaccagtaaggagggaataatagcagaaaacaaaaggaaaccaatattattgaataatagagcttgaaggacattaaatatcacatgggctcaccctgtctccaggactggcttcagggacatgtgacccattcagtcacacaggtccccacacttgggagaacctactcttcatttaaagctctcctgtcgccatcttgaaattcagaatttatttttaacaagaggcccgtatatttattgtacactgggccctgcaaattatatagccagccctgcgcatggccttacagattaaaaaaaaaaaaaaaaaaaaaaaaaaaaaaaaaaaaagcccagaaagggaaaatggctgctcaggatcacactggtcctttgctctagaaccagggtgagaactctcagttctgttgagagtctacattgagtgtaactctactggcagtgtctgtttagggcaagaattcctgattctggccttgcctgctccaggtaggccactgcaagggctgtatggaccacagcagcccacgtgtccaaaatggaaagcatgccttctttccctgatcatctcccccttctcctttggccaaccttgtctatataaatgcaataccatcctgtcatctcaaactagggactcatgattggactccacagttgttaacgggcttgatcttggactcccagccctgggtaactttgagcaaagttccttcatcttgctaagcctctattctctaatataggaagtataaataataatgccatgaagcctctggggttattggaaagattaagtgagacgatgcaaaacaaacatttagcatggcatctaacccatagctagtgctcaataaagtgttgtgtttatttaactttattctacagctccccttgtcctggcctaagactgtgactggataaatccctgcctttgtccttgaagctgctctctgataccctactattcagactatggagcagcaggatcagcctcacttggcaactcattagaagtgcagaatcccaggccccaacccaaccctgctgaatcagaaactgcactttcaccagattcccaggtgactcatatgggcattaaggtttgtgacacactgtgatttctagtacacacagttggcctttctttctctgccctggggatatgagtaacttcctaattccagccataatcattcttataaaggtagaacccgagcctaccatgacgggtttgaccaaagtctaagtcccttcctgaaggcttacgatatggctaacgtgaacctggtgaagagtgccattagtgtgaaaggtgtatggaaaggtgaatgagcaagaatcaggaaacctgtcagagactactgcaatgatccaaccaagacgtgaagggcctgaactaggcctggggccaagaaaacagggagaagggggtgagttatggagttttatccaatacagaattcagcagattgaactaccaggtagagttacaggggatacaggagatggagtaaagacagctctgagattcctttgaaataacaggatcatattgcatgtatatagacaaggttggccagatggtggagaagggggaaatgatcagagacagaagccatgcttccttttgtgggtatgtgtgctggcaagaaaagactttcaggaagaagggtgggcttcctctggcatttacttcacagtgagtgttacagagatgtgaggtaagtgcactagagctaaaaggctatgggttcaaatcttggcttttccacctaggaaacacagcttgtcactctgagcaagttgatcaacctctctgtgcctcagtttctacttttgtaaaataaccttcagagtgttgcagtgagggttaaatgaattaatatatatgaaatgtctagaaccatgcctggtacatagtgaacactcaataaatattatccattattatggctgcctctttgtctatcttcccaatgaaattctgaggtccttggggagagagacctcaactgacagtctttgtgtcatctagcacgtagcacaaagcaggtacacaaatacggtccacggaaatgtatgttgttcactaaaggtagccaggtggtcccgtgtggtatctgtgtacacagaaatacagatgttgtatccctttacaaatgttcatctcttccctgctcccttttcctaatcacagcttaataacttctatgtaatgagaatctgtgctcattcttttctcagtctaaattgatctatgggctaccctgataacgcagcctgcctcttgggtaaatccactct

SEQ ID NO: 51885 - DNA, 1292 bp, Homo sapiens
ggtcctgacactaaaatgttcaacttagaataaggggtcagcaaactatggcccttgggcaaaatccagcccaccaccttttttttgaaataaagttttgggtttttaaaacattgttatactcatgcattaatatattgcctacagctgcctttacactagtagcagtgagtagtggtgacaaatcctatatggccacaaagcctaaaacatttaccatctggccctttaacaaaacaattgccaaccttgacttaggccatcatgattcatcacttgggaatcagttcaaaagatgaatctgatgaagtctgatttttttctaccctggaaagaaaaatcaaaataaattttaatctattttctatataggtctgtatccattcagaaacaaaaaatcagggttctgttagctgtgaacaaggcagacctaacaacctctgtccccatgaaacttattttcctgttgggagtagagggtagaggacaatcaataagtcagtgttgtgttcccagcagccaggacagtgcccagcacagaacatactcagaagacactgttcgattcttgtcatgaggagtttagcaatctgagtttcctctcagctttagtgggcagaattttctaacatgtttctgattctagttcccacttctgcaagtagcaatctccatggacttttacagtctctctgtaatgctgatcaattatgatgaaactcctgccaggcattcttccagaaggatttcagcagcattaacctctaatgaaacaatctttgcggcaccagggtgggactatttccccacttccatgttgaaactgacagaacgaattgtgtcttagagactctcaaacactaatgtcccctttgactatctaagctgttgagcatattttaaatggctactctgcttaaaccacactggcccaggggagtctaacctctgcccaatgttgatagtcaaaatatttagcaaccaatatggcctagcatggaagccagctccaacaaccctatggccatactgatgcccccaagccgaaaatgagccctgcctccatggtctaccgggaatggcttcctgaattcctcttttgggggtgttgaataaggtttctcatattatgaaaccactattttctagattctttgcagtccactaaaagagaaaagccattcttctggagattatgctatctggaaatgtcctgtggtcacgtcctgacaagacctttggagaaggcatcaaagcagcatgtgttagtcttccctgcctaacccagctag

SEQ ID NO: 51886 - DNA, 3288 bp, Homo sapiens
agatgcatttgtacacctacgtccatggtttgatgccaaggataagaaaaaaaaatgaccactgtgcgtaaccagtttacaacatgtgcactttttgaaggggaagaaaaatattttaatcttttccctacagattagggggcaatataatcttacttatgccactgacttgcaggaaaatttgctctaattatagggccacacccattactctcaagatggaattgttaacacttaagttttcaaagaagcaaaggatgccgtcacagacagcatctctctactgaccctttatttaagaagtcatcttgttactgtccacttaatagctggagagggcatcgagaggcagccttgggcttcccacagatacagtaggtgtgtgtatgtgcttgtatgttaggaggggagaataagagggaaggagagagagaggggagagagagagagagagagagagagagagagagagagagagagagactgactgattgtggatgtgtgtgtacatcagggaactcgatgggaaagcctagcccttgtagtcaatttctccttcacaaggggataaacaggcaattacgcatccttttatatttgatggccaagtgctgaactggaaagcacactattagtttgtgtcccttcagggccagggcaataagtagccaggagagctgggctgaagcagagagggtgttgtctgctgttagtgtgacagtcttgtcagcagcgttcacattactggaaggtaataaagtgacaagtatgttattagaaagatacgaggtgaaattgaactgaagcttcttgctgctcagccctggcttttttctttcctcttttgtaatggtccactatttgttacagactgagccttggtcttcatatcctatataaaaaagatttttttttttcctgcagtaaaggtcaaatgaatttacaacagcactttagaggagaagaataaagatagttttatgacaactatagtatgttgctccaaaaatatatatagcattataatgaacaataatgctgatccaattcagtgtacatgtaaaaatgcttagttttttttttttttttaacctcctgttatttggatttggattaaaatcatttggattaaaaaagatttggattaatcttttggattaaaagcatttggatttttcaacaaatgccaaaaagacagtatgccgaataacatagttattgccgaatgagcacagaaaatcattttgcgcaagatgtgggaaggatgaggatgatgaaactacacaaggaaggacgggtatgtgggcaacagtgatgacagataactcactggtcagttgtacagctggaattacacaatactttttgaaaatgaccatttatggtgagcaacactccagctacaggaaatatgcgactcgtctgggacagatcaaacatgaccttagtactaacgcaaacaagactaccacgtgtggtttatctctgagggaaaatgtgaagagaagttacttacatacctcatagaacagtaaatgagctcccattttgatcaaggtctttagcctagtattaattacaatcatggctttgttgtgttgctacagtggcaagcatgagtaatgatcaagaaaggaacgatccatgctggtgccattcgcacctactcctctgttaggatgaaaacgaggtgttaccactggccttttctatagccttgctgacccctggcatctttcggttctcaggggattccagcaacacttcccactcaaaaacaaagcaaaagcaaccaaaaccccacaattgtcggctcttcctgaccccaaaggaacttcagctatttcatgcagctgtacttgctttcctaaccccttcctcagagccgactcacctggtcataggaactctgcaggtccctacgatcaatacgctctcacccactgcgaggcagagctatgccagtcttttctctcgagccaacatttccagtgcattcatgatttccttttctagctaccccaaaaccagggcaggaaccgaccctctacttagttctgatgaaaacactgtgatccctccagtctttctggtatcttttattgctcatcttactcatttagatccatccccaaaaaataaacaatgagagggaaaagcaaaaccacctaatttaaatacttcaagtttgggagaagataagtgattttaaagaatgaaattcgtttgtcataattttaaaaaagaagctcttaagaaaagggtgtgaccacaggatgaaaaaaagtttcttctggatgatttgtttcttgatgatagcagatgtagcgtgtcttatgacaggtgaattttatttactctgttagtcaatctaacccaatgctaacagaccagatacaagttaggactgctcaggtcaagctgtcagcagttagcagcatgtccatctcaatctggtgactagcttctttatgctttaattgtcaacggccctcattctcatttgcttggcacatatctggggtgtgtacagagaaaggggaaaaaaaggtcacattgtatttggtgggaacctagtgcatagtttctcctgaggagaagcctctggaatagcccattcttgatatattcaaagttttttttttttttttttccttagagcaatgtataataatggggctgttaaccagttaagtgcctttctcctcttactggaagggcctgaaaattcatgaccaaagaaataacactatgaggacagtggcaccattgtgccaaaaaggttttaaaaaatgtttgccatgttgaaaaggaaaacattaacacctttaaacctttaaaaggcatcaggctgaacagggcagctggactaagatctggaatgagttacattgggttgacttatttaaatacaattaatatcagaacaaagaatgccaaggatttttatcacacttttaaaccaaattcctcattatctatcctttttttctctctttccatagcatgcagatattcccgaaagcggactaaacctgatatttacaaaaacatagttttaaatgatcaagacagtacaagtttcaacatcagctagagaacatgcacagtcataccgcctaattttgtacctgtgataaactctggctaaaaccaatcacatggggaaaagcttgtcggatgaacatctacatcactattaattttcagccagcatagaatgcatgtggcttgagagaaactgtttaacaacaaaaaactcctatgaaaaagcaaatgagtaggaat

SEQ ID NO: 51887 - DNA, 1822 bp, Homo sapiens
gccagtatttaaaccctcagtcaaaaagtttaactgatctgactgctccctactatttcagagtcattttttcccttttttgttagattatgtttatctctctaatttataagacttggctttccaaagtgtgcatggatcaatgttgtgtgtctatgtgcctgcaagtgtgtaagtatgagcaggcaagatggggagaagaataaaaatggccacacaaaaaaaattctcattgaaaacaatagattctgggaagcatttagggaaatttttcaagcaatgttttgataatttctgagaaacacttaaaatcgtggaaaaagaacttggcatgtttatttgttttagcagatttacattaaacacatatttcttgctgggcactgacggaggaagatgcaccgctagcatacacaatatacatcagagcactttgcttgtgtaagtaaacaaaattacaccattctctattcacacaaagctcttttatgtgactgtgcttttccagaacttcgggctaatgtttctaggaggccagctggaacaactgtaatatttgtaggcagaatgaaacatactcattcatatcacggttgtatgtaccaaatggttcaaattagaacttttttttttttaaatcaacatttgttttgggtaacgaaagccctactcaattttcatgatttggaaatttgtattttgcagaatttctcaacagcatccctttaccttcaaaatacaatgctgaccaatcacatccctactctcctctctaggacagggatgccccatgagtgagagtcttcagggtgtggcatgggcagaaagaatgatttcgaaataaaaattcagactggactttacttgttaacattgacctatgtgaacaaatatgctttcctcatccaccccaaactgcctttgtcatgaagtaagtatgcaaacattagagataggtgtataccagcttgctgtgattacacagctaatgctacattcagttcatccagataataaaggacttaatttgaaatatctttcctattcttcctctgcccaaggggaaatgaatgctacaggaatatccaccattagttagaatgttggggctctcagaaaactttgtattaaagaagttcccatcaagataaataacttattagtctttgttagctgacatgctaacattaacattaaatcttctttctgtaaacactgactgcatataaagattgatactttaaaggagttactcattacacacatgtgcatgtacacaaacacacacaggaatacagaaactactgaccttggctcactcttattatatactactctcattataaatcactcttattatagcattcaaagtgcttcaacttagcgaatggtgatataatgaggtgaggtatatcaaactactagcaaaaaaaaagtacatagtcaaaagaatgcctctccttggattaaagtggaagtttgaggagcatggcccttgactctagtttttagaaggaagaagcaacatgataattttatgtgactttgaagtagtggctttgatatatttcccagtatacaaatatttataatttttttctgatccatatttgaaaaaaatttcacaatggaaaggatatatttttaaaagaagtaatgtattcacaagttgaacaatatactctccaaaaatgatcacctctctaaccaaaataacattatcaaaatgccagggcactagtttcatgtggttcttctgatttttaaaatattgcttgacatttgatttaaaaaatttactgttacagaatgttcttgatta

SEQ ID NO: 51888 - DNA, 859 bp, Homo sapiens
ttgtgtgttttaagacacacacaaaaaagcacacacgctccctccaagaatcctgcctccaattttctgtcacaaggagcactctgggggcctggcgggggaagtgtttgggaaacagaaggagccgtttcagcaggcatcggtttctctctgtgcctgtgaagtggacattggcatatcttgcctaggctgctcctgtggggttcatctggtcggcagggtggggaatagttgtctgcaccataccaaggtcagcctgctaggtctgacagtctctgtctctgtacaaagaaaagaatcaatacttttggactacggctgtgccctcagtgtaaaacaacaaacatgcagcgtctgacatgtttctaggtgatttgtggcagaacctcttgtctgatctgtatccaggagctgctgtgttactgctctttgcttttcgcctcccccactccttcctcggcccccctcctgcctgccccagctctgtgatgtctaatactttactcaggtacagaggcgggtgttctaccctacagctacttgtcactcaataaatcacacctacaagcgcagtctgcacagagtgatctgggctttaacaaaggatcagagggacaaagtgcaggcaagatgctgtaattatagcaaaaataaaacattcagagagagggacaaaagcacaggctcttaggcaactacagtagaaattgtattttttgtcctctcttttggtttcactctcttaatgcactcctcccatctttcctctgccgaaccccaacaccatttatttttgttgttcttgctcattttcattctaactagagttcagggcataacataagcattattaaagagt

SEQ ID NO: 51889 - DNA, 1342 bp, Homo sapiens
tccaggcgatcctggccaaggactcaggcacaggacgctgggatggcctgcccggcggaccggccttaccctttcgggccacggcgcgtgcgtaccccaaggctcgcgctgggcgcattgcccgcgggaagccggccaggaccagagaacacgggacaccgcgggccaaggcgggaaaagcctcgcgcatgcgcggttcggcgttccgggctcgccgggttggggaaagggaggtggagtttccaacagggaacttgacccgttagcagccgcagccatggcggcgcgttcgcctccctcaccgcacccttcgcccccagcgcgacagctgggccccaggtccccacgtgttgggcggggagctgaagtacacgcaatgcgcagcgaggcctcgggttttgccggcgcagcgcgggaggtggtcgcggacgaaagtgataaaatctgggtgggtgaagaagggtcagggggccggcgagggcctgggggggcagctccggctcatgctcccctcctcagcgcgcccatggggtccagacggctagagggcatctcggtagaggaggcgatggtgacccggacgcagctgctggaggaagagctgagcagcctaaaggaggagttggccctgtgtcaggtatcgaggagtctcgcagtccccctttccccaccacagcggggccgggacccgtggggaggcgcgcctttctccctctgccttgggacctaccccgcccagcgacgctccctggcagatgcacaccctgcttcgctcgcggccgggggctggagggacgcggctgcgcccggctccccaaacccgggcccctgcccctttccgaactgcggccagacaggcttcgcctccgcgcccgggtttggttttggtcacttggatactcgcagtcgcatcctctccgcttcccccccaagcccaagttcttggtggtgacggtagctgatacctgccgggggcccaggagtgacatgcagtccactagttgaaatgaacaggaaagtgtaaacacttcggttagagtaaaatccatcgatgaaggagcctgtttttaaaatttcaaacccacacttggctttgtttttacccagtcaaacttaagttgtaaacacagacgagtaacgtttagaaagtctcagagccgggaacttaacaatagatgatgcttggtacttgtttattaaccagctatggtaattccgcggtccttgagtgagaaatcacattttcatgtgatcttgccagtgaaaaacatttgctaaatcaattgcattaaaattactttcctgtttgtagagtttttgtaaggatggacttgactatact

SEQ ID NO: 51890 - DNA, 731 bp, Homo sapiens
ggaaaaaaattagggtatttaaatgaaatatgaaattagtttcatcattaaagctcatccactttaatgatgaaaccaacttttgaagcaggcgatgttggaattgtatgtgatcagagaagtcagccagttatattttatgttagaaatttagatgtgttaaaacttcatttattcacaaagaaaaacaaatttgagaacttactgtgtaattccaccagttgtttgtagctgtattctacttggcgagtctttttgtgaaattatttttcatgctaataatttactaagtggctacctggtgccatattttgtaagtaaactcttgacatcctttgccctgagctctgatgaccaaatatttgtttagatttaggaaacagtttcaagtgtttgttgagttcattcctccagtagaggtcaattgagggcttaatatattgccaacactaaattattttttgtgggactaggtacccagtgaaaaatggcaatttggggtgtctgtgtttgtatagatggtatctatttccaggtcagttgatgaaagacaaaaccaatccacctccagggaaatttagacctagtatttagtatttagtcaactgtttcatagcccaagtttaataaactttgtgaaaatgattaggaatttttatttttaatttttaaaaattattatttgattctgtttggaagttctatagtgagaaaaaagaattattatttta

SEQ ID NO: 51891 - DNA, 904 bp, Homo sapiens
cctattaattatacaatagtcccattgatgtggtggtggggtgttgggggaggagaggaagcggtctgtagtgttatgtttgggtttttttcatggtgagctgtgcttctggactgtgaccttcaaaagtgcttcttagttttttgtttgtttgtttcccccctccccttacccccttaggagagacaggaaggctagaaggtgctagagttgggtatttcccttttccaagttggttagttaggctcaggtaaaaccccatgagtctgggctctggtaaaatagtttttcttgatggcaggccttggtaagaagaaaagaatactctgagtgtgtttaaagatggttactttctccctccacatactggaaacaggaaggaataattgtgtgatcttccctgtgacaacatgacaggggtccagtaggttaaacttatgaaaatgtgtcacctcttattgttttatggttcctctgagtactgcttgcccccttcccccaagcatgactgagccatccttgagttttaaactctcagacttgtccatattgatcttccagtaattcattaattacagaataagtttttccaccctggtgctggctcctgtggaagttttttctcctgggcatctgttccattaagttgttattctctctattttcatgtctgtctcttcaattttgggagcgttggtttgctggatagtctcaattctctgatggatctgaaaagagttgttgattttcagtttgttcagcgttttttcttattgtgtaaatgagaaagatgactgccaagttccttatatgctggactggaaaccagaagccccctccattgaattgttgttgttccactgaaaaatattaaatagctcctaatgttcaagatttatagcta

SEQ ID NO: 51892 - DNA, 578 bp, Homo sapiens
ctaaaagtcagctttgtaatttattaaaaaatctaggggagaacgtacagcaagatggccaaatagaagactttatgctgtgggaactccaaatttaagaactacctacacacacaaaaaaaacacctacataagaatcagaaatcaggtgagcactcacagtacctggttttaacttcaaatgactgaaagaggcactgaagagggtaggaaagacagtcttaaattaccagtgccacccttcccctatctcctggcagtggccatgtgacatggagagagaattgtgcacttaggggagggagaatgcagtgactgttggactttgcattgaactcggtcttgccctgtcatagcagagagcaaaaccgggccaaatgcatctcatgcctgcccacagaaagagcatttagaccagacctgtccagaggacaatcacccatcccagtggttggaacctgagttctggcaagcctcattaccacaggactttggggctctatataaacttaaaagactgtctaggccacaatgacttcaactcctaggcaagccctagtgcagagttgggctcagac

SEQ ID NO: 51893 - DNA, 1110 bp, Homo sapiens
gggataccctaatcccggtaacactgtgattcttgcagacttgtaccaccttggtgggcttaggtaagatccaggagaattccctggattgccagacagagactgtcattctcttccctcactttgccccaaacaaaaggagtctctccttccatgctgggttgcctggagttgggagaggggtgactgagtcacttcgatgtccaccactgctgaggctgtgctaggtcactcctgaagctagcaacatagtggttattgcccaaggcctttggcaactagtgcctggctgccactgatgtttatttgaggtccaagggctctttagtcagcaggtaatgaatcgtgccagaactgggttcttctttgcagtgcagcaggttctcttctggcccagggtgggtctagaaatgccgtacaggagctagggcctggaatctggggcttcagagatctgcttggtgatttattttactgtggcagagcttttacccaagttgcaagacaaagtactctttactcttccttctcctttctgcaatcaggagtctctcactgagcttccctgcctggagtaaagggaggggtgatgtaaacactctctttactaccacaactgatgtctcagtgggttatgtgcacttcagttcaactggctccaagcccagcacagcacccagacttgcccaaggaccgcagattttattattgcctttcatatttattcagtactgcaggacactttagttagctggtagtggagcttgctggaagtcagtttcctaccagtggggtgaaggactcctctagggcggggatagtttaaatgcaccttctctgggcaccagcagaattccgccttgtgttgtgttccgctgtgacaggactttgctctgtcccccaagcacacagattctctctcggctcagtgtagcactgctggggaatgagggaaggatgatgtaggcaatgcaagactctcttttctaccctcttcagtgcctctttctttgctatgatgttaaaaccagcttttaacctggtttgcctgattgcttacctgaattttggttcttaggaaggtgctttcttccctggataattgttgaa

SEQ ID NO: 51894 - DNA, 1184 bp, Homo sapiens
catcattatcttctctgatttcttgatgaattattgattcccctaccgtctgagtcagatccagctaaattctgcagaagcacgttttgctgcagaaactttttcggcaatggcaatcttaaagcagtttcctttttagaatttgagctttcaaatttgcttcatatgttgtccaattacattaaccaaataatcttaaattagtttaatcaagcctcaaataaaagacttttgctaagtgtcagaatttggaattaaaaacagcagagcacagcccattcaacaaatgccttgggttttctagttaatctagcatataaacattgagcatgaaaactactaaatctgaagagacctttagcaaccctttaacactaaaagggccttatttcgtggatcttcattttaaaaatttctgtatttggagttatgtgattgttactgtatccaaacttatatttgtccttggtttatatttatttacagaattcttatttgaaagataaaaggtattaaactgtaccagagccattgtttttttcctgtcaggaattgcagaattttaaatagcctcatttccgtttttgtgatctgtgttcacaccgctagtaataatgaagtagaaaactactctttttgtaccttattgctaatctccagagttttcttttaccttaccccaatagtttgtgtagtacacattccttgtagggtattcattttatatacgtcagattctctagggccgtggcttttgccagatgaagcacttttgattttgaggctgatgaaacacagtgcggttattgatctgtgcgtgacatagcctgtctctctcctagcagagtgtagcaacatttatccaggaatttgtgaaatgtcactcggatcatgttcgcaaggcaaactgtgcaaaacccaggatcagagctgagaatccatgtggaattggacgtgactgtcttattcctatgtcctgtcttctattctagatgaagcaagtggtatttgttaacagaatatctgtgtcctatattagactttgtaggaaactattattaccacttggaacactgtatactataaaattgcacttcttatactctgttttcagattcatttcttatcttaccaaagaaaatattaatatgagaatatgtgacctgaatagcatcagttagaaa

SEQ ID NO: 51895 - DNA, 1376 bp, Homo sapiens
cttatactctgagcctcagtttcctcatctgtagaatggagacattgcagaagttaccttaaagggctatgatagatagtgtaatatatgtaaaatagcaaatactgtctctgatgcttagtaagttcttaataatgtaactattattactagcataagagtatgtgaccatagcattaatgaactactttataatatacatgatctcatgtttatgaaaagattctggaactagtgattccaagctctgccatttatcagctttgatgagtttgggaatgataataatgtcaatcttatagggtattatgaggattacatgaattaattcatataatacactcagtgaggattctgtaactgtcagatattgttagctcttttatttttattcaaggtccaaagagcacttagcagtatatattgttatctctattttgtaggaaaggaagtcaaagtacaagagagttaaatgacttacccagagccagataactagcaaatggcagaattgggctaaaaccaagatcctttgtatgtccaaagtccattcacttgctattacactgtgactgcggacccactgccaacctttgacctttagcatctgtttaccaatactctgaattgctcatcatcacataacctgtgagctaatattgaccatgagcttccaggcccatcctggagttcaaattctggttctacaatttaatagctaggtgactttatactagagaatggatttgagggagcagaggctgtgggtagagagccctaagcactgtggtagcctctagaccactagcttccaggctcatcctggagtccttcccagttccacgctgactccagattcttggcttgcctttttgacctgcgtgtagagctccagctactgacagtctacatgtccatgaagcagcatgagagtaaacaaaaatctgattcacccaagggttgttctacaagtacctgctgaaggttgcaaatactcaagagagagaggataccatcatacctgcaaataccaagtgctccatttgtttctgtgaatgtggtgaaaggaatctctcccggccagttccaatgatgctgcacatctgtgcacactctacctacatgcctgtctgcatttctttcccatcggcatgacctgttgttttactgcaacatgaatcagcactttggaaacactcaaagacttaccatttggattgtagtgtggatgcttgatgataaaagtctgactttgcttctactcttgtagcaagtcggatgggaatctcagttccaaatgttacataacatcatgacctttctttgatgtattgtgctgtagcagacaaaggtacttaaggatcaacatccagaat

SEQ ID NO: 51896 - DNA, 661 bp, Homo sapiens
gggaaccaggtgaatgtcagttttaccacttgctgtgtgtctttggataaactgatgaaccactcagagtctcaggttttcttgcctatgaaatggagacagtgatgtacattttgttaggggtacaaaaatagttgaaaacgcttagtccagtatcttacatctagtaggtgctcactaagtggcagctgctattatttacaataaataaaaatagaaaggaatgtaactccttgaaatataacatgtacttattatcccaggttagaaagaggctatgagtcccaagtggcagtttctctgtgtctttggataggaagctgtgaaattgctcaacaaaataaacacaagggaactttctgacccctggtggcaggattcctgaggcgagtctgggcattgatgctgggaaattcttactgaagtttgtgagttgcacctgcagcccatggatcatcagatacacggcaaccaatgagtgtccaagcagtcatctgggtcctcagggcaaatgtcttactttgctaagctgagattagaagaaattgattttacttggaagacaccaggcacagttttaagcgcttcataaatattttagtccttatgacaatgctatcagttaggggatattattatccccaatttgaggatagtgaac

SEQ ID NO: 51897 - DNA, 997 bp, Homo sapiens
gttcaagcgattctcctccttcctcagcctcccgagtagctgggattacaggcaagtgccaccacgcctggctaattttgtatttttagtagagatggggtttctccatgttggtcaggctggtctcaaactcctgacctcaggtgatccacccgcctcagcctccgaaagtgctgggattacaggcatgagccaccgcaccctgccccaagctcccatttataacaaatttactctcaagataatgagcccacttttataataataatgtaatccattcacaagggcagaaccttcatgacctaatcacctcttaaaagttcaacctctcaacacttgcactggggctgactttccaaaacatgaacttggagaatacgttcaaaccatagtattctgtcactaatccccgaagtcacatccttctcacatgcaatgtgcattcattccattccaatagtttcaaaagtcttaacttactccagaaccaactcaaaagtccaaagtccaaagtctaatctaaatcagatgtagatgaaactccaggcatgattcatcctaagtcaaatttctttctagctacaagcctattaaactgaagttatctaactccaaaatacaatggtggacaggcataagatagacattcccattataaaagaaataggcaagaagaaaggggttgctgcctccaaataagtctgaaacccaacagggaagacactattaagtcttaaagctggagaataatctttgattccatgtctcacatcctgggaacattagggtagaggttgggccgccaaggcctcacgcagcctcattcctttgactttgctgggcttagtccaccagcagctcacgtaggttggagccccaggcctacagctctgacagcctgaagctgtaagctggtagctctatagttctgggtccaggggtggccccatttccaaggttccaataggctttgtcatagtaggagctctccgcagtg

SEQ ID NO: 51898 - DNA, 988 bp, Homo sapiens
cataagtggccttggtccttaacaagccttgaataaccaatcagttgagtgtggctcccatgcagcctcctcctgccacactggaaatcctgagctaacacattgctgcatacttcctcagtggtactcttgattgcttggtccactagattttccttttggaatatataaaatctcttacacaggctgccaaggttgtgagctgcactagtcaggggtgttatgggaacataacaccagggacatcattggcagcctgaacaaaggtaagtagaggcccttcccttagtacctaatggattcatttaaaattaacttctataaaagtctttcactgcctggatttctttttattcgattaccacatttctattttgttttcttttcaatttaggagatttttaaataaggactaattaaatattagtgctcacgccaacttgctttaatttccctagaaaccctggcttaccaccttcctgttcactgtgatcttggttcaaaggtcatccctgaacagccacctcaatctgatttgcacttcaaccccaccatgaagctactcctgtttgcttttggtcatagcactcactgctatctgaaattaccctgttcatttatttaattttttccatacctttctcctctggctggaatggaagcaccacagaatcagagatcttacgtggctatctcattcattcatttagcatctagaacagtcccggacataagtgaggccctcagtaaaagtatgcaattttttgttttgaaagaaactgtttcatcatctgtttatcattttgtcaccccacatttcaaaatctttaaactccacacacagtgaaaaactacttttctatgcattttatttatattatactggagtgctgaagccttcccagttactgagctaatgttgagatattactttaaaaaaagcaaaaaactattttgataaatggtttacaaaaggggaataaatgag

SEQ ID NO: 51899 - DNA, 660 bp, Homo sapiens
ccctcattttgtaactgcatcaccccggtactataatcttgaacacttttggtgctaaagctgccaattttcctgattttgtgtaattttttgaggttcacaaatagaaacaagtgtacaaatattccattcacatgctttctaaatgtttttattttacctttgactgaaaggggtcaaagctgagtataaaggtgctttgatattggaacacactctccttgcgtcacgcttgacccaggctgggtggtggaagcagaggtaggtgctacttgtgtgaactgtgtgttcaagtcagcatgctctggaattgatagtgtgtcattctgggctttctacccctttctgacactgcgtggtacaaaccaaaagttcacattggggtcatgattgctggcttttggcagggcttggcgagaaggtctctgcagggttaggccgcccagatgcgagctgtttgggctgagttcagtttgtttccatttgctccctctccctcctcccctctcctcagtcatgccaactgctactggagatgtttttcctctgtttaaggtaataaccgagtcaatgctgaagccaagctataggcaagcattgaaaataaattttcaagggggttgttttcatattattaggaaaagccttggaatctttttg

SEQ ID NO: 51900 - DNA, 2043 bp, Homo sapiens
atcgcgccactgcactccagcctgggcaacagagtgagactccgtctcaaaagaaaaaaaaaggactttaaggtagatacagaggcttcagtatcctgatgactctcattcattctgtatgaacgatactggcgacactgattcactcatctacttgaagaccaagagcagaatcatattatgctttgagaggggcacagggtagcctattgttaggcaaatagaccgcagcaagattgtctaaaaccaaattccatttcatcatttagtatctgtgtaacttggtcaagtgacttaacctctctaacctttgattccctaacttgaaaatagggttattaattcacagggttactgtgaggatggaactaatgcctgggattccacattatcatttcctcgagctttggaattctaattataaattctaaagtctgagattacggaaaagcagatgtgagaaaggaattaaaagcacccactggaagccaggatgtctcctaggagggacttgctattacctagctgcgcagcaacaggcaatcgcttgcctacaagtctcactttccgcgcctgcacagtctccatctgccctgcccttgtactcactgggccgggcaagctggggaggcctaagcggactgggaagttaggctttccctccacttcaccagtcggctgcccctgcggaaaccggcccgacacacctcgctcctaaagccagttgcggtggtggtggcggttggggctttttttggccacgagagggcagcatttcccccggccaaccacacacgtacccctagcaacagcaaacccagctgcaacagaacaaaagaccgaagtcctcgagcttcccttccatcttagggctcacgccgccccggttaggtttcattagagcagcggcttttcaaggctcgtcgggcacggagggcggagcgagggagctctcgcgagatcgccgccggaagtgggtggtggcggggacgcagcggctccctcccggaaagcgagcgtatctcccgagccgttgccactgacagccgcgggcgctcccatctgagtaagagccagcccgtccgcggcctctccagccccgggttcgcgctctcgactctcctgcctgcccagctgcgcggcggagcggagcgaggcgcggcctgcgagtccccggcagcccccgacccctccctcggcgctgcgtgtaggccgcgccctcaggcccagtccgcggtgccccggcgggtgatgccaaatacagccatgaagaaaaaggtgctgctgatggggaagagcgggtcggggaagaccagcatgaggtcgataatcttcgccaattacattgctcgcgacacccggcgcctgggggccaccattgacgtggaacactcccacgtccgattcctagggaacctggtgctgaacctgtgggactgtggcggtcaggacaccttcatggaaaattacttcaccagccagcgagacaatatcttccgtaacgtggaagttttgatttacgtgtttgacgtggagagccgcgaactggaaaaggacatgcattattaccagtcgtgtctggaggccatcctccagaactctcctgacgccaaaatcttctgcctggtgcacaaaatggatctggttcaggaggatcagcgtgacctgatttttaaagagcgagaggaagacctgaggcgtctgtctcgcccgctggagtgtgcttgttttcgaacgtccatctgggatgagacgctctacaaagcctggtccagcatcgtctaccagctgattcccaacgttcagcagctggagatgaacctcaggaattttgcccaaatcattgaggccgatgaagttctgctgttcgaaagagctacattcttggttatttcccactaccagtgcaaagagcagcgcgacgtccaccggtttgagaagatcagcaacatcatcaaacagttcaagctgagctgcagtaaattggccgcttccttccagagcatggaagttaggaattccaacttcgctgctttcatcgac

SEQ ID NO: 51901 - DNA, 1648 bp, Homo sapiens
catgccttactaattaaaaaattaaaaattataaaattaaacaaccaccttcaaaggctcccttgagtccaaaaggtgttttgtacatatggttcccatgctcttccactaccacccgccatccctcccactacttcacagaccacccctccaccacataggcagagttaagctgctcctccagtcttgcactctccccatctgcagacttttgcactcccctacagagcgcttccggcactcttgcattatttactgtctgtctctgcccctaggctggcagcaactgggagtaggaactttggagccaatgcctggcacagagtaactgctcaaccaattctgattaatcaacctccggggtctacaaaagggggagtcccccggcgtcccccggttcaggctccctcgccccgccggccccggcctccttacactccgaggtgcgtgtgcgacacgatctttccgcaggcaatggttgccgggcctggctcgaagccgagcgcctgcagatacatccagagatgctccttctcgaaagcggtgaccgaggccgagctcatcctcgcggtaggcacggtggctgcaaagaaagaaagcgcaagcccaggggactcggagggccctcaagatccctccctacggtcagcctgaggtcgcggtggtccttccattgccaacgcctgctcctttcacgcccagagcgatttcgcctcaaagggcctcacaacctccgggaaattgagtttctaacggtatagtgcggccaccactgcctcagcgaagccaccacaaaccgagactcccgcccttaaggaagagcagtgtgcgccggcgccgccaggcgtccgagggaggagggacttccggcaaagactatatctcccgccatgcaatgcgtccttctctcctcccttccggccatgcccagccaagaaactgcaagacccaccgggcattgcgcggccagcgacttgctctgcgcttgcttaaccgctgtcgtgcccagatcctcgggccttcgggtttctgattcttggttagtggggtccatttgcttgtgtatcctagttgttacgtcacaaaaaagccataaatggagcactatgcctcggtgtagagttaaagcattggttccatcctccgctatgctcactgtgactctaatcaagtcacgtaatctctgagcctcatttctgtcgttagcgaaatctatgtcctcaaatgccggatgttccttttcctgctttaaatgaaatctggctctatactcccctgcagtcctgcagtcttttttttttttttttttttttttgagacggggtttcgctcttgttgctcaagttggggtgcagtgacgcgatttcggctcactgcaacctccgcctcccgggttcaagcgattctcctgcctcagcctcccgagtagctgggattaacaggtgtccgccaccacgcccggctaatttttttgtatttttaatggagacggggtttcaccatgttggctggctggtctcgaactcctgacctcaggttatctgccggtcttggcctcccaaagtgctgggattacaggcgtgagccactgcgcctggccgcctgcagtcctcttaattttttttttttttttttttttttttttgag

SEQ ID NO: 51902 - DNA, 1792 bp, Homo sapiens
taacttgataaaaacttttttttttttttttttgagacagggtctgtcacccaggcaggagtgcagtgtcacaatctcggctcactgcaaccttcacctgccttggttcaggggattcttgtgcctcagcccccaagtagctggggttacaggtgcatacagccatgcccagctaatttttgtggggttttttgttgttgttatttttggtttttttttttttttgagatggagtctcgccctgtcgctggacaggctggagtgcaatggcgcaatctcagctcactgcaacctccacctcccgggttcaaacgattctcctgcctcagcctcccgaggagctgggattacaggtgcacgcccccatgcccagctaatttttgtatttttagtagagacaaggtttaccatgttggccaggctggccactgttggcctctcctgacctcttgatctgccagcctcagcctcccaatgtgctgggattacaggccgtgagctaccaagcccggcctaatttttatgtttttagtagagactgggttttgccctgttggccaggctggtctcaaactcctgacctcaagtgatctctccacctcggcctcccaaagtgctgggattaccagcatgagtcaccgtgcctggtcgataaaaaactttaataaactcactcacaccaaaggaacatgtaaagttatgtgccgcttccttgttttcatggagagaaaggggtgaaccaggatagaaagagactaatttgagttagacttcccagttctgctgagggcagccctgcttaccttttagcagggacagccagaagcatgtagctctatttcacatttttttttttttaagacagagtctcactctgttgctcaggttggagtgcagtggcgcaatcttggctcactgcagcctccacctcccagacgcaggggattctccttgcccagcctccaagtagctgggattataggcgtgcaccaccaggccaggctaatttttgtattttttgtagagaaagggtttcacgttgttggtcagggtggtgtcgaatccctgacctcaggtgatctgcctgcctcggcctcccaaagtgctgggattacaggtatgagccacagcgcctggcctatttcacaagttctgagactcacttttaaaaactagtttgacatatttcatctgtgtgacaaggagattcaggatggttcctaaataaccaatgttgaatggactagaagtctggataccataggcaggaggtaagaagaacctttttctacagggggcttaaagtctttttacttctaattagtctcacatggtcttctatacgtatgtccccaacaacaactgaggttagtgactttttcccaaaatgacaacacagtaagttaagtccagctaaggctggacagtgaagaatctccctttaggactcacgctttaactggttccctggcaagaaatgcccaatgcctttacatgatgctgatttaaacaatcactcacttcctttcagctctgattccttttcagtgaggtagtcagacatgactaggcccttttactggtttaaaaacccactcacaggggtccagtaagttggcaaacaaagagggccaactgtcacctagtaaaatttgaatatgcacattagcttttaatttgttttaaatctgttatcaagcatcctatttttttttaatttgttatcaagcatcctattttcttttctttttttttttttttgagatggagtcttgctctttcgcccaggcca

SEQ ID NO: 51903 - DNA, 1232 bp, Homo sapiens
cctggagttgaataagatctattcctgctatcattattatttattatcaatatgtgtaaattaaccaagcagtagtagctctttactgcctctatttaactattaaatcactgactccacatttacttccagtttagcacaggtaaagcaactaaaaaactacaaaaaattttttttgagtgtcactctgtcacccaggctgaagtacagtggcgcgatcacagctcactgaacctccttctcgtgccttagcctaccgagtagctgggattacaggcatacgccaccatgcccagctaatttttgtatttttagtagagacaggatttcaccttgttggccagactggtctcgaactcctgacctcaggtgatccaaccaccttgccctcctaaagtgctgggattataggcatgagccaccacgcccagccagcaactaaaatttaatgtgtacatgagtaaaggataagttagcattacaaaacagaaaggaatttgaccttcctcttccctgttgccaaccactatttccccttctaagaagaaatggttttctcatggcagtacagaatggtacatactgttctttaacttggaaacctttaatggctacacagtagtctattgtgatatatcaatttaattagtcctgttagtggatgtgcattgttatagtctcttgcaactttaaacaaatatacacatctgtaagataaaaagtaaaacagctccaagtgtaggtatgcttgtaactttactaaaactgtctcttgaatcagtcccttagagcaagagctgcacaagtgtggttctttctctacaccgttgccaacagccacatttcccgtgtggcaggacaagagagatgtcagtatttgacccctcagagcgagattagcattgcttcctatatttcaactagttatacttcctttttctgtgagctgtctccatattctttgtccagttttctattgggttgtttgtcaactaagaatgaaattcttggattttgtgattacatttaattcttgggcctagagataaatgaacccacttcagacaccttaaaataaagttttactcaccaggtgaacagtagaatggagctgagaaatggtctgttggcttttttgcttagcttctttaaccctgctgagagcctgctggtaggcacgggagtgaagcttggtagacagggatcccagtctaacataataacttggcttc

SEQ ID NO: 51904 - DNA, 2713 bp, Homo sapiens
tactaaaaatacaaaaattagctgggcatggtggtgggagcctgtagtcccagctactcgggaggctgaggcaggagaatcacttgaacccagcaggcagaggttgcagtgagccaagactgcgccactgaactccagcctgagtgatagagtgagactccatctcaaaaaaaaaaaaaaaggaaagaaaagaaaagaaacagtcctcttacggtaatgagggtcacctgaaagtttctaggtaaaggcagtgtatgccccaggaagggctgaggagttccagatgttactgctgtgagctcaggggctcgccactgaccagtcccttgacttgcatcttgaaaaatcagaactcactttgcggctctagcttctggatgatgggcagagcactggtcatggccacggaggtgatggtcttcacaccgttctctgccatctcacacacagacttcaggtagggatactggtcctttgtactgagataggctgaggacatgaggtcatacgtggagctcaccaagggcaggttgaccacccgagtcaccacactctgcaatcaaagtagggagggtatgcttattaatctctcaaaacacaaaaggagagaaagtagacaaaggctactcaaaattcataccggttgtggatcaactgcaacggatgccatttttcttcctggagaaagaaatctgcagaaaagagacttatttcagaacaccgggataagactctcccaaattcattccccaacccaagcaaatgctgattacaagtagagaaaaatgcagggtgagctccctgtagtcttctgcacttctttcctctctccagctctccaggtccccctcctgaaagacccacacccacacaaccccactccctcttttgaggcaaagtttcagagcttatgtgtaaacttgcaatactcaggagggagaagtaaagttgttgacatacttctcttgtttctccgagtatctgttaacaaaaatgctagccaagccggacgcggtggctcacgcctgtaatcccagcactttgggaggccgaggggggtggactgcttgatgtcaggagttcaagaccagcctgaccaacgtggtgaaaccccgtctcttctaaaaatacaaaaattagccgggcgtggtggcgggcgcctgttatcccagctgctctggaggctgaggcaggagaatcgcttgaacccgggaggcggaggttgcagtgagcctagatggcgtcactgcactccagcctgggcgacagagcgagactccgtcaaaaaaaaaatgcggttttctaacgcgtttccctttcgataatgtcccttcgacaaatattgttttcccacaaccacccaagcaggccaagggacattcgatagcaatcgccctaaatctgttggcaggaaagaagcctcaacgcacaaaggcaagggtcgaaagcgcgggttcagcagaccgcccctacccagccaggacctggaagccgcgaggcgagcggggggtctcggaccatcacccccgcgtcccgtccacctttgagccccgcggggagcagagcagcggtcccaaggccccggggagccccccaccccaactgggcgccgctgggggcccgggaccggttcgctggggcacccactgggcgcgcactcaccgacggactgcagcgaaaggcgaagagcaggcgcgtcccgaagacgactccggctgccacgacccggtcaaagcgtggggcccgcgggcgcccgggctataaaccccgcctcgccgcccctccccaagcctccgcagcacgtgacccgcggcagcacgccctgtcccaagcccgagtgtcaccctcgggcacgtcccggcgccctcccccaacgccggccctcctagagtggtgggggcccggtcgggttgagagggtgtgctgcctgggcgaggggccccgccacggggagaggagcctgtcgggagccgggcgggggcccggcctggggaggctgggagttggaggtagccctgcctggagtcggggcgctgcctggagtcggggcgctgcctgtggtcggggtcctgcctgtggtcggggtcctgagaggcccggggcaaatggggatggcgcccaggccggctttggggttttgaaaaatgcaaacaaattcacaccaacttgttgaacggcgttagtcctcagaatagaactctaaaaatggaagcggtggctcacgcctgtaatcacaacactttgggatgctgaggcgagaggatctgtcgagcctaggagttcgagaccagcctggcgaagatttttattttattttaaaaaatagcccagcgtggtgtcgtgcgcctgtggccccagctacctgcgaggctaagatgggaggatcgcttgagcctgggaggtcgaggctgcagtgagccgagatcgcgtggcgctgcacaatggcttctacgctgttatttttagcgaagtaataacttttaaaagttttgtggcggctgggcgcggtggctcacgcctgtaatcctagcactttgggaggccgaggcgagcgaatcaccagcctggccaacatggcgaaaccccgtctctctcaaaatacaaagaaagcagcccagcgtggtggcgcgcgcctgtagtcccagctagtcccggctgtttagcggggttgggggcaggcgggtgggtggctgaggtgaaagaatcttttgag

SEQ ID NO: 51905 - DNA, 1568 bp, Homo sapiens
tgcctctgcagttttgttggaggcaagtgctgttgctagccacgtttgggaaaaaaacaaaaaacaaaaaacaaaaaccctgaaaccttttattttggctcagtatttttttttttttaagaggcaaagtttcactgtgttgtccaggctggcctcaaactcttgggctcaagccgtcctcctgcctcagcctcccatgtagttaggactacaagtgcaggtttgagaagccatgtccagttcaagctaggcttccttcatttttgtgaagatgcctgatcctttcatttctgagtcctgttttttgagagccagtaggaaagaggagtaggagaaaaggagtgattttttatatatattagtacgttaattttggaaagagaactgagctaaagtttcaggaataacttaaccattatattcactgtctatacctcaacattccagctatggaattgcatttggcaaatattcttttcttaggttggcttctgacagggctaatattagtagttcttaatgactcaaaaacaactgagggagttaggggtactatgactttaccaatcagtgccagtgtatctcattctctgagttggtagagtgaatccctcaaggtcaggattaatttttgtcatccctggacaagtcatttcttttatctgggccaattactcaaagttccacattcaacttaatatttcattaaagaaaaatccaaaaggcttcactatgtgaagacagagggttacatcatgatttccaaagtttagcaaacatgtgattaccacactacttacaaatgttatgaaatccatcaagaattcagaatttatcttctaaaatgtaaggctatattgatgtcaagtcagcctgatgtaattttaacagatctctaaaacacacaaaaaatcatctgattgaggcatgcaaagaggcagagaaaaataaaagaagaaacaaaaaacaaatcaatggccgggtctggtggctcaggcctgtaatcacagcactttgggaggctgagacaggcagatcacttgtggtcaggagtttgagaccagcatggccagtgtggtgaaaccccgtctctactaaaaatacaaaaattagccaggtatggggtctcatgcctgtagtcccagctactcgggaggctgaggcaggagaatcgcttgaagctgggaagcagaggttgcagtgagccgagatcacaccactgcactccagcctgggtgacagagcaagactccatctcaaaaaacaaaaacaaaaccaaatcaatctgtctttgaagttagagcactgcaatgaaaaaataaaaaaggtttgtgatccaaagttatgctgtaagaatggcatctaccatagcaacaacacttttctttttttcttttcttttcttttttttttttttttgagatggagtttcactttgctgcccaggctggagtgcagtggcatgatctcggctcactgcaggctctgcctcctgagttcaagcaattcttctgcctcagcatcccaagtagctgggattacaggtgcctgccaccaggccctggcta

SEQ ID NO: 51906 - DNA, 1370 bp, Homo sapiens
tatattgcagtgattacaagcatacctacaatcacccagatctatgtttgatgacaaaatagtattcaacttgtaggaaatgcctctaagagaaaatgggaaggagccaggagaggctggcaggcccatcagactgcgatgcaggcctcaacccaagtgaagaagagaggaaaggagagaagggtgggtagaagcacgttacattatagtgtactctaaagaaatttcagtgaggctgtgggagcaccccagtcatcagaggagtcccatatctccaaagtatcaccctgccttaatatccctgccacactctgtcactggctgagagtagcccatgggtgtgtggcctcagctcacatgtggtgatggaattcagaaggcagcaggggccctcagtcaattgctccccgcagttagaaggatatctgagcggtgtatctcatggtcaccacactcagttttcccctttagtaagacaggacaaaatccttgcccacttgccatccagagaaattggatgactcagagaaggtaatgtctgtaaacactttgtaaactttaagtatggaacaggtaaaatattccttacacaggactatgacccagtcgtgatgtgtagctcttcactccctatctctgtctacatcctttaacacacacctatgagacctccagtctgcctctggctacccaacctagatacttcctgagctcagccctgtctggaacgcaggaatggaaaatacagtcctttgggtcatagctaaaaatgtcctcaaatagatccagccagctggctgtgcataggtcaattcaacctcattatgtaccacttcaatgaagctggacattgacctctttgataaccaagggccatgcacagcaaattctgcaacttaatgattaaactgcttagaagagaggcaaactattagactttgagagctctacgtttttattttgattttatttatttatttattttgagatggactcttgctctgtctcccaggctggagtgcagtggtgtaatcttggctcactgcaacctctgcctcccaggttcaagcaattctcctgcctcagccttctgagtagctgggattacaggtgcttgccaccacacctggctaatttttctatttttagtagagatgaggtttcaccatgttggccaggctggtctcgaactcatgacctcaagtgatctgcctgccttggcctcccaaagtgctgggattacaggtgtgagccaccatacctggccataattttatttatttttgaataggtaatacttacacatgatctgatatgcaaaacctacaaaagataatacagtgaaaagcctcccttccattctgtcttct

SEQ ID NO: 51907 - DNA, 3742 bp, Homo sapiens
ggcgcctgccaccacacctggctaatttttgtatttttagtacagacagggtttcaccatgttggccaggctggtcttgaactcctgacctcaggtgatctgcccgcctcggcctcccaaagtgctgggattacaggcgtgagccaccgcgcccagccctcagaaacattttatgtgtatttctgcctccaaaataatttctaaaattgctaaaagaatgtcccttagagagtaactagtgttcagactgggctaatgttatttacattcctctattttactctaatgtatctaatttcaaccttatttggaggcatattttttcaacatttcactctgaagatttttcaaacatacaggaaagttgaaagaattgttcagtggggccaggtgcagtggtttacgcctctaatcccagcactttgggaggccaaggtgggcggattacttgaggtcaggagtttgaaaccagcctggccaacatggagaaaccccgtctcgaccaaaactacaaaaattagctgggtgtggtggcaggcacctgtaatcccagctactcgggaggctgaggaaggagaatcacttgagccccagaggtggaggctgcagtgagctgagatcacaccactgcactccagcctgttagacagagcaagactccatctcaaaaaaaaaaaagaaagaaagaaaagaaaagaaagaaagaattgttcagtgaacacccacactcccaccacctagattctgcaatgactaatttgctacatttactttaggtattgctattattattctcattttaccgctgatgaaactgtgtcttgttgcaaaagcttctaatggtatcttgcttaatcttttttttttttttaattattccagcatttcaaccaaggtccaaagagattaacgttccctgagaagaatttcaatccagtttcttgtgtccgaatatggtctgtagataaggcccaaagaacacaagttctctttttcacttgtaattgcgccatcctttggcccttatcattccacgtggtgctgttctccctaacagtttaacctccctcagctgacctccttcttcttgaaagcatggtagcttttaggcatgtgagggaagcagaccaggcatcccagctgactcatctgtttttatctcaacagcctacatggacaaccacttttctactcacagtgtgtggttcacagaccagccgaattacatcataaatgcacagtatcaggcccacccagacctatagaatgagaatctgccatttcacaagatgtccaagtgattcctatgcacatgccacatcattacagtctcacttcagccatggttaaaaggagcccaatgtgatttactggtcatacgtggaaaaaaaaaaaagagtagttcatgacatttttcttgatcagccatggtaactcatgtctgtaatcctaacactttgggatgccaaagtgggatgatcacttgaggccaggagttcaagtccagcctgggcaacatagcaagactataaagaaaaataaagacatttatctttaaaacaacctttccttcttcttgtttttacatctcatttgcctctttactccctttcttcacaacctgtaattccacttattgagcctgctgtgtatgctacgtatgaggaacattattgctaaccctcagaggtttacagaagatgttttattcctaatttacagatgaggctcagaggattagaaatccacctaatattaaacagctgtaaatattaagtatgttcttttccaagacctactgctctctttctactgtaaaacaatgtatttccaaactctggcaattgtctcagcctagacgtttcccactagggccagagagcttatgtctgcctgtcatcaaaggcttgtggacttgtctctctctcaagcctctttctcatgtcttgttcactactagttgacctggatcttgttcttttagctcccaggcatcaaccaggtgttctataatctaagaacttaggtaacacctgtgcattgtaatgatagcctcctacagatggtgagaggaggtgggagtgagaagatgacagacaggtgaagaaatatttggcgaggtaggatgcactctgccagggcatgccccatttcaacctaaataaagagctcaaatagctgttgtgcatatggtatcttgctaatgcctatgctgggtacagagatctataaaatgtaattcctgcccttaataaggataattaatccagcaggggagctagaacatgcacacataaaagccccatgaacaaagtacagcaggaacatagaagagaagctgcttctgggtggtgaaatagatgattacaaagagcatgggatgggaggcagagagcctctcaggcaaggggagaatgtgcagaaacagaaggaaggaaaagcacctttggggagtctcctgcacagagcccagggtggctgatggagaaggtatgttagattaagggggaagcttgggaatgcctcatagggagtcactgaaggttgataagtaatgtgatcagaagtgggcagttcggttactactttggcagagaatgtggctcagagcagacagtgactagattgagcaaggtgacagattcatacctagaatgaaactcagagaacaggtagacaagcagctttcaaactttttggccctgaaaccctttgtacaaatgaaatgttagtcagccattgtaaacaaatagattaaagctaaattactctggttggaataagtgggagggaagaactgagttctttccttcctctcatttctttctttctctccaagtggattctgaaggggcttcttgtttgaaaatcaatgatcaaagggcttagcaaaccacaaccagctcctgcctgccacctgcttttgcaaataaaaacctatggggatacagctatgcctctttgatttcatattgtctctgcctgctttcatgttacaatgaccaagctgaataatcaggacagggaaaccccatggtccacagaattgaaagtatttgctatctggccctttaaagacaaggtttgccaacctaccatctagggctttattacaatgcacaggtgttacctatgttcttggtctgtggtctaagtgtcatccttagacaccagcacacattgtccctctgtgcacagatagctcagggtggtgaaggttgatttaggagtcattgacagccaggcgcggtggctcatgcctgtaatcccagcactttgggaggccgaggtgggcggatcacctgcagtcaggagttcgagaccagcctgaccaaaatccaacatggagaaaccccgtctctactaaaaatactaaattagctgggcatggtggcacatgcctgtaatcccagctactcgggaggctgaggcagaagaatcacttgaacccgggaggcagaggttgcggtgagccgagatcacaccattgctctccagcctggacaaaaagagtgaaactctgtccacccccccacccccccgaaaaaaaaaaaggagtcattgccttggaattaggagttaggagttgtgtgagatggcttatgatcaagagagagggtccagagagaaaagaaaggaggttctgagaaaaccttcagtaatggctagatttagagaacaggctgagggaatcataggagaaatcactgggaaaagtaccaattctcattgatgccagaaa

SEQ ID NO: 51908 - DNA, 2484 bp, Homo sapiens
cctctgcctcctgggctcaagggattcttttgcctcagcctcctgaggcaacagctgggattataggcatgcaccaccatacctggctaatttttttatttttagtaaagatggggttttgtcatgttggccaagctggtctcaaactccggacctcaagtgatccacccacctctgcctcccaaagtactggggttacaggcatgagccatcatgcccagacaaaaaaaaaaaaaaaatctaataaaaaaataaaatggggataataacaatagagcccacctcatgagagtattacctaaagggcttagaacaatacgtagtgtgtggtaaggactctatcaatattaattattagtatttccacaagatgaaaattatagaccagtgctgttttttatgggtgagatagaggagttttggccagtcccagtcgctcatgcctggaatcccaaagcagtggaagactgacccaggtgcatcattcgaggtcaggagtttgagaccagcctggccaacatggctgaaacctcatctctgttaaaaaatacaaaaaattagctgagcatggtggcacgagcttgtaattccagctgcttgggagcctgaggcatgagattcgcttgaacccgggaggcagaggttgcagtgagcggagactgatccactgcactccagcctgggtgacaaaacaagactctgtctcacaaaaaaaaaaaaagaaagaaagaaagaaaggagttttaactttacacgtatttgctaatatttatgaagtgtttagatatctcaaaatcaataaagaggattattaggcccacctgcagtactcttaataatttcagggaatcagctatctaggtgaaagttcacagggaagtacatgtcattgtaacacaaattagaccaaagttcaggaagagacagttactgagtcatttatctgtcttatcataagaccagtaagcctcttagcaccacaaagtagatgtaacattttaacaggaaatgactccaatctagagcaaagttagtcccatgcacaaagtgaaaggttgcacaacacaaaaaagatctgtgctacgtgtcacacatgatcaggtggcgtattgctcaagatgctggtatgcaatcagtctttgcaagagtcagatcattgtctcaccttaggaaaggctttccatgtgccctagagagacactttccctttctgggttacttcctaaagtacattcaccttaacttataagaaaaggaaatctttctcaagtgctctgagtttattatttcccttttctagactctcatcagggtcatctgcatgtggatgaggttcccagagaggactgctggaggacattgcatgtttatgaatttcacaggtattcaagggtggctgcacctggagctgggagctgagcatcaggaagattaaaacataaagtatgctcatcaaattgagaggagtgggccaggcacgatggctcacacctgtaatcacagcactttgggaggccaaggcaggcggatcacctgaggttgggagttcgagaccagcctgaccaacatggagaaaccccatctctactaaaaatacaaaattagtgtggcatggtggtgcatgcctgtaatcccagctactcgggaggctgaggcaggagaatcgcttgaacccaggaggcggagctcgaggtgagctgagatgtcgccactgcactccagcctgggcaacaagagcgaaattctgtctcagaaaaaaaaaaaaaaaataggagtcaggaagaatcatcttctcaagtcaattaacaacattgggaggcagtgtggtgccacagcttagtggctttacactcagatttggtttataatactagcttcacctttgcaaaattccatatgtaccaggtaattcacagcagcattgtttacaataaaaaatgactggaaagatactaaatgtccatcgatacggaactaattaaataaattatgggtatgacaatgtggaaagttatccaaatggaaaagcaagatacagagcagggtataaattgttaccctttgtaaaaaaaaataaaacgggggaattttttttttttttttgagacagggtcttactcagttgcccagggtggaatgcagtggcatggtcacagctcactgcaatctctgcctcctgggctcaagcaatcctcccccctctgcctcccaagtagttgagactaccggcacgtaccatcacgcccggccaatttcttttatttttagtagagatatgatctcattatgttgctcaagctggtctcaaactcctgagctcaagtgatgttcccgctttgacttcccaaagtgtagaaatacttacttaatagctgcttgttcagtaagtatctctggaagggtattgaagaagttagcaatgctgatcgcagtggctcacgcccataatcccaactctttgggaggctgaggcgggcggatcac

SEQ ID NO: 51909 - DNA, 1358 bp, Homo sapiens
aaaaaagacagaaatttctaaattgtcttctattaacagtaatcataaaccagtgtacactctcactaaaaatatatgagaatgcctattattctaaaccaaatatcagaactgttgatatttaccatgtaagttaaaatagcatctttttgtagtttagtgtgcatttcttttattatgaagaagattgggaatcttttccagaatttggggaggtaggtgggtaaacaaacacaatacaaaagtactgtgacaaagagttttctaggaaggtcagataaggtcccacagaggaggtggcatttgatctaggtcctgaaggatgagggggaattccgccatggagcttattgatcctggtatgtagtcagccaaaatgttcaacaactatatgttgacttaagtgataaaatcagccaggtgcagtgtcccacgcctgcaatcctaatcccagcactttgggaagctgaggtaggaggaccccttgactgcaggtgttcaagaccagcctagacaacacagggagacctcatgtttccaaaagacacaaaaattagcctggtgtggtggcccgcgcctgtaagtcccagccactctgaaggctgaggcaagaggatgacttgagcccaggagcttgaggcagcagtgagctgtgactatgtcaatgtactccagcatggggaacagagactctgtctgaaaaaaataaaaagaagttataaaattgagatgtttgggttgaggtgagaggattgcttgagtctaggagttcaaggttgcagtgagctataattgcaccacttcattctaacctgggctacagagcaagaccctgtctccttaaataaataaataaataaacacatatataagacatataggcaacaagttttctggatggctaaggggattttttgctatacgtggcaagacactgacacacaaataccagtacacgattaagcaagccacccagtatgactgggtcagtcccgggggaactgggcaggagctttatagtgtacatctggtttcttctactttttggatgttgagcgacatctaatggccaaataggaaaaagtctatgttttcagtttcttcttttcctttccttctttctttcccttccttccttcctttctctttttctttctttctctctcttccttccttctttcctttctctctccttccttccgtccttccttccttgtttcattctctctccttccttccttcctttctttctatccctttctctcttccttccttcctctattttttcctccctcccttccttcctttcttcctctccttcctttcttctttttcttttctctctgtctctccctccc

SEQ ID NO: 51910 - DNA, 2283 bp, Homo sapiens
cttcctaaataactagtaattgctttttcatttactatgataactcaaaaacgttgttcaaaaatatcctgcaaaatttgcattatagagaaacgactctgcaggcgtctgtgtcgataatgaggctacacttaggaggcgtgagggtactgactatgcaaatgagcgatttctccattaggaattcccatccccaaatctgggccgaaggagagacaccgagcgcggccagggactcacatggtgcactggagccaaggggtttcgggaagggccagcgcgcgggtctctctagagccctctactcatgcgtgggaattccagattccttccctgggaaggaatcttcacgtatctcccggcactgtcctcagtgaccttcagccactcggcatcactttccctgtctttgaaaactccgagagaagcagccgccacctgcctcaggccaaggcaataaacccacatcacaccgccagtctgagccctgcaggaaggggtgcacagcggcctccagagcgctttctccccagctctgtttctgcaggctcggccgcgcgaacgctgaggaggggatcggaggcccgcaaggctcagaccccgcgccccgcgggggtcgcacaggggtcgggcgggggaggggagcggtggctgcagggcctcggccctccccgggggaggggcctgagcaccgcaccgcccccctcctccctgcgtcttctccctcccaccccccgcccttttccacccgcccccgcaggaggaaagggagagggagggggaaaagaaagtgctgttttgtggaaaggggcggaaggcgggggagaaaaagggaacagaaacatggcggtcaggtcttgggacggctgcgccgcgggcagctcctaggcgacgcgccgcccgcactgtccgacggctcacagcgcggaggcacccgcgcgggccagcgctccggccatcgcccctggctgtaggcggcgcccctcggagaccctgcccgcgaggcggcgcaggcgcagaccggactgaggcggcggcggccgctggagctagtcccccgccctgccctgccgagcgcgcccagtccgcgaatccggtgctttcttgccccaggaagaagccgtgtcggggctgcgctgacagaggagcaggcagcaggtgaggctgcggcgcggggcctttggcggaggaagcctgcgccgtgccctcgcggggcctgcgctgcaaggctgggagggcgcgggacaggtagagcccggagggctgagttccgagtggctggcccgcggggggtcgccgaggaggcggagagtggccgcggctggcgttcgtggcctagtttctccgcggtttccgggggcggggagtccccggatcctgcgggatgcagtcggggaaaggctgcccctgaagagcctccccgcgtcgcccgccgggcccatgagaatcgtttgcgtacaagcgcgaggggtctgggcccgggggaccgccggggcgacggccgctttggtgggggccggggtgcggagggagcaggatcggggcttcccagagggggtcgaggctgagagagcggagagctagagccaggggtggcgggcagtctcgagaggagtcgggggactgagaagtgtcggggacaacggggaggagggggacctgggcaggtgtctctggtgaattgaagacatttccttctctgtcttacggtggccgatcctcagggcttctttgtcggggatgactttctaggagggcagtatccttttaactctggagtgactaaacacaaaaccaaggaatgaagtcctaaggctgactcctgtaaagagctgtaactttttctgttttaagaatgctgtcacgtctttttttttttcctccccttttctgcttgatagaccttttccctctcgaagaccgtcttttatctgcactaataaggaattacccagtttttaaatagtaccgcctccttctccccttatgtatgtttgtcacacgggaaaatttagggtagttaccgcgggtacttgtgcaaatttgagggaaagtgtcatttccagtagtgaaccctcagctgtctctttgtgcctccgagatactgtcaagcgttgtagcctgagaaattgacccactgagcctgcttaattgtgtgcaaacccgtgttgaggcgttcttcctaggccctaatttacgtaggaataggttttcccttccggtctgtgtataatgagaggggagaacgttagtgctaaggcgctaagttctggataaatactt

SEQ ID NO: 51911 - DNA, 2254 bp, Homo sapiens
acaggattgtgacctctgtgaacacacctatatgagaaagtataattatgaaaaccaatttgaacttaagcacgttttctctgttcagtgagttttgtctatattcccaacttgtcaagttcaattatcaaatgtctttcaagtcgcatttctaaccgatgttttattagagataacagcactaagaagataaaatatcaaacagcaacaaacaaatcagatacaaccctttttggcactttggggattatgaggacagctatgtgacatattgccaaatgcatgatgcagggcaagaattatgttgatgtaaactttacgtatattttatggcttactctacgtccccccctccaaggtaatacctctaactttataaagtggcattcggaagcaacttaccaaaggtcagaagccagaacccggagtctgaaccccattccaaataccagttaccaatggcgtttaccgtctctgacttaaatacctgcaacaatttgtcaacttttaccttccattcttcacccagagcgtcagcagcaacttctgtggccatacgcttctcatagaaagtacgaagtttgcgttcatcgtccacttcaatgagtttctggcagccagtggctgggaaggagatgttcagctaaggattaaaaggggggaaatagtttacgaaactatctatacaggtaattgtagagccatctacaaagttaattccactgcaaaaagcctttcatgttgcctccacacaagcaggaaatataagatgccgactgtactcactaaaagcacgtgaaagcagagtagcagtcaagaagcgccgcactcagcaggacgttttcccctcaagccccgcggaatgactctgggggcgagggcactccgcagccgttcaccctcccgaagcaagaaagccggggtcaagagccgcaccacaggcctgccgcaaactgggcaacacgccgcatccgtcccggctgggcgcggggacgccaccatggcgctcccggcccgccgcggctccagccgcaatcgcctgccatccgttcggccaaaaagctccatgccccagaaaggcgagccttctcctacttgagacccttctccacctaaagccaggatcctggagtgctggaactgaggcaatgccgcgttctgggactcgattcacgttccccaaacccagtctaacactcgccaccatcacctaccttcatcttgaagcagctgaacgcctccgaggcgccacggaaaagagggccaacttccgcttagcgcaggtcacataggcgctttcagttctcgcgagatgagcagaagtacgggatagcggaagtgagcatgggtgggcggtacttccgggcgagattaatcagggcctgggaggtaaagtcggttgggtgtgggtctgaggttgtgccagtggtggtagtctggtaaggcaaacccgcgtgtaattctgagggctaaccccttccctgtctagtcttttccacgctgcctgggttttggagctgggcgccagcggagccccacttctgtcccaggcactttgcatctgacggtaccaaaataggagggcaaggccgggcgcggtggctcacgcctgtaatcccagcactttgggaggccgaggcgggcggatcatcttaggtcaggagttcgagaccagcctggccaacatggcgaaactccgtctctaataaaaataggtaaaatagccaaaaataggtaaaatagccaggcgtggtggggggcgactgtagtcccagttactagggaggctgaggcacgacaatcgcttgagcccaagaggcggaggttgcaatgagtccagatcgcaccactgcactgcagcccaggcgacagagagagactccgcctcaaaaaagttcgagttcgagaccaagtaaacaagaataatttttactatctaaaactatcacataccatctccccactttagtgtcacaaaggtttgagtttaggactgttttacattcgaagttgaacgattctactgaatcctctttgatcatctcacattaattcatggaatcttggtgaaatgatgctttttaaaatctgagtactgtgtgtcatttttttgttgaggtgaaattgacataactagtcattttaaagtgaacaattcagtggcatttagtacattcacaatgctgtacaaccaccatctctatcgatacagttccaaaacattttcatcatcctaaaagaaaaccctgtaccc

SEQ ID NO: 51912 - DNA, 792 bp, Homo sapiens
aaaaactggcttttcctgacagagattttaatcgtgtgctacacacgtgaatcctttttaaagaaattgctaggggctggggaatttccaagccaacctccattaacctgcagattgagcaagacacacatctgttctttaattgcacagtatttcgaatcaaaacaaacaagcccttccacagaaaagggcctgttttcctggtgatggttttggctcgagttaccctttgtgttgagtatgtctactcttcaggccataaggtagcgatctcaccgacacctccctgtgtcacgattccccttagtagtctgtgctgcagtcactaagcatgaccactagatggcgggagaggactgagttgaggttatggcggcggctcctttctccctgcagggtgggaggaacgctgttgtctctttttcttcctgcccctttgtttgacttcaccattctctgtttccttttcgctccgctgtagttacgtgactcacctttcattcagtacctcccttcaaggaaagccctgtctcctgtccttggactgggatcacacagagttcttgggatgaccctggctctcccgcgccagccgctctgctgccaagcgcaagcattcgctcccagatgcttcgcccagttctttgcaaatgtcatccaatcagtgtccaggtgttcacggctcatcactggcttactgctctggtctacatagcttgggacattgctgtttatgcaggtataaaaaaaaaaaaagaaaaacaaaagaaagaaggaacggcagcatcacag

SEQ ID NO: 51913 - DNA, 1109 bp, Homo sapiens
tgtgtgtattttttaatatgataaagcttgtttaatatgttacaaagtcttatttattttatttatttagttttttaagagacagggtctcactctgttgtccaggctggactgcagtggcatgatcatagctcactataactacaacctcctgggctcaagcaatcctcccacctcagcttcccaagtagctaggactacaggcatgtgccatcatgcccagctaaatttttttcatttttttcttggtagaaatggggtctcactacattaaccaggctagtctcaaactcctggcctcaagtaatcctcccaccttagccttccaaagactgggattacaggcgtgggccacagcacccagccacaaagttttctttaaatggccaattcggctgaggaaaaaaatactcatcgtgaaaatcaagtaggtcaatatgttggctaaaatttccaattgcctttagcagccagcagatatgaaagtaaaaggaacaatcccaatccttgagtttatttttaggctccccaagaaagaataataacatacctggtttaatttctcaagtactcctatatttgataactcactgagctgctttttgtggcctctgtgactctttaatccaatgcattccacaaagcaaagatcactttaaagcactctccccaccccatcctctttctcacaaaaggtgatgtttcattttcccaacttccttttggtaaattattacatggacctgctttccctgggaaaagtccagaagcatatcttctaatttaaggaatgtaccaaacattttgagtcctacagacccttctgattggtcatgaatgtaacaatcagcctttctcctgtgacacttttaattcaaaaacaaacccaaggcaaccttcaaagctgaaagtgctgaaattccagaatcagaaaagaaaaaaaaacttgctcattgatcaaggtgacacagtgcatgacttcagtatttaatagagtgctaactactgtatacttaaatcaacttccataaattcccaatgatgatacaaaccatttacctggaggccccaaaacataaaatctatgacagactttgatattaattttt

SEQ ID NO: 51914 - DNA, 850 bp, Homo sapiens
cttgattttatccaaaaagttaattgttaactgctacataccaactaaatcacacccaaatgctggccttatctttttagaaattctatcgtaatagccttcttcagtcgtcaaccactgcaaacttaccacacttaagtcaaaaggattaagtcatgcaacattacttcttaaaacaacaccctgcatccttcatgtaattgcaattcttaccactgggtgaattggggacaaaatatcaggagataactaccacccagcaacaattttttctaatgatttaatctcaaaggaaaactttaattcatatagagaatttgattttgtctgaaagtagctatagaactttttccttttaaacagcatctaccatggttaccaccacttaattaaatcctagatcatgtctacaaaagcagctattgctgaacatttgtctgctaatataagtgaattattactcaatgttttaaaagtaaacattgaccaccatttattactagttatctttgcacaggcatacttgtgactcattgtgtctacatgcaagattgctccacatttctaggcttctgattaaaagtaaaatgaaagggtaatcgaagatgaagaatctcaagtgtcctttccagctctaaaaagacacagcacactgaaggcagggacctcctcttactcttatttgtatctccctcagtctttcactgtatcctacatatatattgccttttggttaagcacattactatggccacgaactaaattcttaaataagaccctaagcccagagaggaaaacaaaacaaaataaagcacatcagtttgacaaaattaaaagcttgcatatggca

SEQ ID NO: 51915 - DNA, 1080 bp, Homo sapiens
caaaaaatgaaattcagaaaggcagggcggcgggcggacagccgccgagcctcggctcgcgctcagcacctcccggcgctggggcaaagttgcgtgcggccccgccgctgtcagccccgcacacttcggctcacacacgcgcgccgcggagaacgcaccatcgtagcggccgcggcgctttgcggaggtgcggccgccgaggctgctcgccgcgtccccggactgtgcccgcagctcccggcggcggcggctgaaatatggctgagttattattcgcctccttccaccgtgtgtgtgtgtgtgtgtgagtgcgcgcgtgtgagcgagagggagtgtgtgagtgcgcttcttgtgactgcaaagaggcgaggagggagggaggcgcggggggtggaggggcgagtgtgagcgtgtgtgagtgtgtgtgtgtctgtgtgtctgtgtgcgcgccgggggggggtgggggaggaggggagcggaggctgagggagaggcggcagctccctgcaagccgtaccaacctttctctaattggaaccgcggagcgctggcgctgtctgggctgcggcggcgcagggcgaggaaggaaagtgggggagggcttttattattatttttgcgcgtacttaccgagctagccatgcctgggggcccggaggtttgctggggtgttgtgtggtacccccccctcctccgccccccctcagctgtaattcatgaagaggctgctatgaatgagagcgcgcccaggagcggagggtagatggcggacattctctgcctttttccccccgcgctcgcttgctcgctcgctcgcttattaaactcagccccaaaagcaaaagcagcagcagcagcagcagctccagggtaaagaagatgattgcggagcatgcgccgtggcgcctgacacccgggctccgagcctcacagggcggagggagggcttgcgggcggggcggagcgcgcggggaggcagagcgagcgagccagggggagctcgaaagagccaatcacctgccacctcccgaaaccccggcggcccgcagcgccacactggaaagcctcgcttaaagtaac

SEQ ID NO: 51916 - DNA, 716 bp, Homo sapiens
ttaaacttttcataaaataatcaaatttgagagcagtcctttgtaataatagtattggaaactaaaggttatctggacgtgccattagtaaagccatttcttattaagaagtaaccattaacagcgagtgtagctcaggacacaggcaaaaaacaacaatcccattccccgtttgagttcatttcagggtttaacttcttccggcgccagccaccggactctcttgagattgtctccaaaacttgtacccgcacaacagatagaggtctcttttttgaattatgtgtttgctgaattcagatttattccagcaatcactaataagccatagagtctgaaagggtattttcccagtacccctccttcctcaaagaatgctctaacaacccaacgtagttactcccaatctccaaatactggacatttagattccgtcagtagatggcgcacggagctcttccacggacgtccttacgtgaccccttcacaacaaaaagatcaggaagggggagaaaagaaagaaaagaaaacacaagactgaatactctcccttcaactttggacaaagaaatttatgcaagtctgtcaatttattaattacaacctattttaataagcttgccattaaaaacaattaaaatcgattaatttcctgtgcagatcttcacactttaacgtgaggtaaaaatgtggaaaataaccttttgtgtacttga

SEQ ID NO: 51917 - DNA, 1870 bp, Homo sapiens
tctgtattgccaaaagctgcataggggcaggctgccaacaggactacccgggcacgctgcagtggcatctctaggcagtttcctttaatctgattttccttgggctaactcctcactgcggtgctgctccacagccagcccccgcgcgcagccctccccgcaccagctcggctgcagagcgcgggtccgccgcccacgccgcctttcaaccgcagtgcgcggcccgggccttagacgcgcgtgcgcgcgagccggggagggcgggccccagccggaggaggcggaacagggcctcgcgatatgcagcccattggctctctcctgcagtccccgcccccgggcgttcgaggcggcggggcgggccacgtcaggcagccggcgctgggctgagcttgtggcagaagggaggtaagccgtgcggggcggcgggctgccaccgctgcacccctgctcgggagccgccgggtcgcgccgcctgcggcccggtcggcttgcatggagggcggctgaggccctgcggggctggggctgagctgggagacggggcagtggagcatgtggcggcagggccgcgtcgcggcgaggggcagccgggagggggctttttgccctcgtccggtcctgctggggctctcagcttctggaggactaggccttctgaggttacggagctccgagatacctgggcagggctggctgtggtgactgcggtgggacttagtgggatctcgactcggaagccggtcggcgcgatccttgcatacttagctgcagcaggttgcagtcgtcccactctccttcgaccggttccctagttgggggcagagcaggagattctggccgcgtcctgcctggcctggggtgactgtctccttctcattcccggtgactcactcagatcatgtccacttataatgcaaaggcttatgggtgagcagggcctgttttcagtctcctagttctctggctccgtccgcacttgcggcaattacttgaagaaagagtatgttagatgtatgttttgaaattttcgcagcagctaacgcgtggagacgtgcagttatgttgcatttacccttcatgagttttagtttcagctgtggcgtcctgatatctcagtgtggttcctgaatttggagcttttgaaatgaatgaaatcctgccaatttcatgcagtcattcattcatacattccaaacttttttgatggatgccttaatggtcagcctcataccaggtattaaaatcggcatttcctgcgttttattccagtttatatgttagttttattgtctagatttgagttggaaattttttttttttttgttattttcaggttctagtatccctgaaaccatcgtggctctgagggtgtaatcctgataactgtatcagtaatgactccaggtttcagtggcctatctgtaagaagaggaatgggattagtataattttgagattttccaggagaggagggtagatggcatgtttcctgaactgtgttaacaggaagtaactattttaaaaacacaggatgcattttatgattatgttttactgtgtcaacgaacattgtatctgtccacattcactttttgactaccaagcaagtgcatgtttacaattttgattcacatccaattcctgcgtagaaagcactgtgactcatctgaattttgaaatgaagtaatcatgagctttttaatgttacatacaaaggtatgatattgaaacaattgcataaaaatgcaattttcaaagcattttcacttgcttttatagattagtggaagctaaaacctctgccttgattatttgcttacttaatcaatgttaggtagttaccatctcttggctaatgtttatcaat

SEQ ID NO: 51918 - DNA, 961 bp, Homo sapiens
ccaaattaacttggaaatgtgttgtaacatggagatttggagatattctttcatttgactataattcttatggttttgcagttgtatcatgttgccttattaattgtgataaaagtgtgagtgtagtttaggaacaatttaaattttactatcagccattgactgatttctcaacctgtgctccatgttgtggtgaatgagtcataatatttctgaaaggtaattctctaactgggtaagaatcaagtaacattgctactgatgtttcaaggagaaaaagaatgttcagtctaaacaaattgtccagggttggagaagaaatacaggatgtgccgaaattaaaatcaatacattgttctgaaagagagagattaacttttaacattttgtctcccaaagtcttgagatgggaatgtgaggcagtgccactcctgtgttttcctaatcagctgtgagtctgttgtagcaaaaattaataggcgttgcaagatcatgaagaaaagctctttcatcttgcccagctccaagagggtgctatattttcaaagccaagcattgtatgattgagcaatagataaggaggaggggcggcctttcctggggattcttgaccgctagaagagttcatttcaggccatttgtcacagcagtgatttccccggaaataccctgtgccaaggttatgttttggctattctatccccttttatttatttactttctgaaatcatggtggaagatagttgtccctgccctctctcatcatcctaaccctttgtctaggggctcctttggagcactatggggtgggaatgattttcaatgggactcagcaggtttgcaaggttttagggagttagtgtggtataaaaatggccaatagaaatcctgcattttgtttaagcattttttagcgtggtaaatataatttaatatggaaatgtgatccattgtctgatgg

SEQ ID NO: 51919 - DNA, 2993 bp, Homo sapiens
gaagaataaaatcgctaaattctagaaggtgtttattgtaagccatgcattgttgtaacacttacaaatcagtcctcattttaccccatttcaaacacccacatttttcatatttattgaaaacttaccagtgctcagttccatttaatcactgtagatatcattgtgtctgatggttaattttaggtgtcaacatgactgcattaggaatacctagcaacctggtcaagcattattttggggtgtatcccaaggtgtttccaggggagattatcagtgctctaggtgggtaagatccgacctccatgtaagcaggcaccatgcaatctgctctacagtccaaagaaaacaaaaactctatctgtgggtctatctgctggaactgggatgaactctttctcccctgtccttggacaacaactccaagctcccctacctgtgtactctagggcttaaaccagaagccaccaggttctcaggactttggtctgggactgagagttacattatcagcttctctggttctgtggggagcttcagactttgagtgagccacactaccagcatcccagggtctccagcttacagatggcatgtggcatgggaggggcttttcagacttcataactgcatgagctaatccctctaatgatgtatttgaaggattagctcgtgcagttacgaagtctgaaaagctttttaacttaaaaagatttgagggatcacaataaatgataaaatgtaattccactgattttgtctcactggaaaacacctgagtaatggaaaacacctgagtcatacagtgaccaaagcagacagtgaagtttctattattatatccatttatagaaaaaaaagacagaagtgcagggagctattgaattgtggagccactgtctgaatccagaaaatctgactgaatcgtcaggtcttacatgctccctgggaatattttggccataaaaaccagatgtgatttctagactgatcagtgcttttccagtagagtcttgcctaagtaatgacaggctctttctcttcagccattattctttttcttcactgtaaagtctcatttgcttatgccagtcatgttacatcatgaataaattgggtcctattttacttacacttgttatatcctactttttgttttcctaagtatttacttcataggtctgaatgcatttgaaaaatattttgttcatcccagtaatatacacaacatacataattgtggcacagttatcaaaactgagaaatttatagtggtacagtattactaactaagcttcagatttcaacaatcttttactaatattatttttctgtttcaagaatcaatccaggatcccacattgcacttagttgtcttatctctttagtctcctttaatctgtaacacgtgcccagtctttcctagtctttcatgatcttgagacttttaattaaaattggtcaattattttgtagaatgtccactgatttgaatttgtatggtattttctcatgactagattgaagttatagatttaagggaagaatacaatgtcattgccaagatgttgacctgcctgcctatgtgcacaaatatgtatgactcacacagacacagagtcacatggagccttttccacaggtcccagactgcacattgagtcagtgtgtgaaaccaccctaatgctctggcaggactcccggtccaggtgtcttggtggctatctaaaaagttggtgtggtgtcctagcatcatcagtgcaacatgtagcttgcttcacatggaatcacagtaatttgagctcattataaccctttgaacaggcttagctggaatttccatttatatgaggttttatttgaatgtgtctttgatctttaaaggtttcataatcaccagcttcatgattaactgtgacaagctgttatatgacagacctttagatactcacattaatgactaatgattcaaatttgttatttatctaggtttaatgttcttgtttcatggatcctaatcctcaggaagtgttcaaattctaaatgagcctactcagtgcagagtacaccaactggaaagagaagaaacggaactaaactgccattgtcttcttcttctgaattaactaagttaaattaataaattttgtaaaagtctttgctgtattaggaattgtgatcttgcaatgcgcattgctctgcagataaatctcctgccagaagacagacttctgcataaacagaaaagcctggtctccacagacttggttgcggtcttggtgcattttcgtcatcagtggctctcttcacctaaaaatgttttaatagcctcagagtaaaatggaacagccttttattttctttttgctaagctaatgttacatcattataacagggacattccctcttatccagaaatatttataagaaaagaaaaacagcctttcatataagagtttctgaaaaacctagaactttcattcaacgtctgctttaatttgtggttttgtactcttaaggggaaattggtggacaaaacccacaagagaactgagaacagctgtatgaagaggcaatgcaggttaatgaagagtgaagagaagagaacagtgcggatttctagaagaagaggaaggaaattattgtgatatgggagttaaaaatgggatccagaaaaacagggaggaaagggggaagtgtgccaggtctcagaaccagcaaaggttgctatgtatatttcacttcagtttaggagactaactttatatggaagtatattctggaattctgagagccagaaagggaatgtgccaggtgccagaatcagctaataaacatcatatatcttctgcacttcaatctagatggtgcttcttctctctcaggtatttatacaagccaccatttcctgactgaatacaaatagcaaacttctttgaaataaggagggataatttttcaacccctccagattttttgacagaattctaggt

SEQ ID NO: 51920 - DNA, 1692 bp, Homo sapiens
ccccagtactcaataaagcaggaaagttcttcaggatgaaattattaacatatttatccacttctataagattgtaggtgttagcaattcgtccaacctcaacacagttatccaaagagactcctgatataagaaatactttacagaaatccaaaacgggtaatatttgtaaaaagctagcagcttcaagtgtgtcctgaagattgtccatattaagagaaagttttgcagtataaataaaatcaatgattttcttcagaccaaccttgttcaccccatgaagcttaatgcacatcaaatcttgttctttcattccacctgtgaacatggctttgaaataatcactagcagacgccatcatagctctgtgaacagggaagatttcatctccatcacctggtaccagggtcacatcacaaagcaatccttctattctaagctgatcaaagccttgcaataccaccgaactgtgagtattgctggtaaaaaagcgtgtggttcctgccttacaaggctgcaaatgggcagagacgcccatttcgccgttaccaagggacactttcatgtgaaagctttcctcttgcacagagatgcaagccggataaagaagttataaccggaatgttttacaggtaacgaggtgtccagaaagaacagaaagctcgtttccttatcaagggaaggcagtcactgcggcacccctcgggccacgccagtcagtcatccactgaaaatcaccctgtagcaggaccacaaagggctgtggacctcaaatctgattattagacagatgattcatcacctgaaggcggttaaatgacctggttcacctcgtccggcctgcgctgccgctccttcagcagttccgcttcgggcaaggaagaggcgccgccacgtactgtggctccacggcccgctcggcggcgggtccggacacctcagcgaacggcccgctgcgccctccgctgtacctagagtgtcgcagcggccaccggcctgtctttgagcaagggccgggaacacaggcctgggcctgggcttgggcctagaataccggcctagccccaacaccgagccgctccttccggaaaagcctagtcccaggataccacggggtgggagcggccttagcggctactgcggctgcgcggcctccagacctcgtcagtcagcgggagggtgggggtggggaagggggaggaagtacccgggaggcgggagggcgagggttggggaagcggagctgtgtggggtgggcgccagcccggcctcttagagctgccttgtatgtgggaccaaataggacagaatgtgtgcaagcaagtgtgttatgctgcacgtttgatataagtttttcgcatatctgagctcttacgttccccaaatgcataatttttcaaagctttacgcttcctagcttctgtttttttgaataacagtgaaatgcggcatttgtataaattgagaggaaacctggatgcttaattttttttttcctctacaaaacaataattgttatcccacattatgtagtagatacttcagttacaattttggttcatattttcaaatttgttacaatttcaaacgcaaaatatttgtctttactagattgttactttattatgtaaatgatatattctaaatttttggcttgaaatgcctttgttttccacaattttaaaaatggct

SEQ ID NO: 51921 - DNA, 1152 bp, Homo sapiens
acttaaatttatcaaatcaggatcaccgaggctattctagattaaaacacatttatctgatttttgccttatgcattctcatttccttctccccagactgatcaaaagctcagagggacttacttttgcttctcatataggagagaatgtctcggctggaatttacttttgatgacactcctgtttccctgttgtgcaagtgcaagatgattgctgttggaaactcagcggcctgcttctgctgactcactcctacctcagggtggctggcactgtgatcctttcaggcttagtcacatcctccttgcattcacggcttttgctggccaccctgtagtttctgcaaaaggctctcctggcctcattttattcttcagtaactggtcattttgaccaatcatcttttgtggtaaccccttgcaggaagactacctctcaactctcagctatttctaatgttttattagacacacaaaacatttttggatctcatacatctcaaggaaaaaattcaagagggctgggaggtaggtggagaaagtgtgaagaggctatctcaacccactctccgcctatatctgcccgcaaaatatgtcttctttcctctggctactccatgttggcaggagacccttgggaatgctatctctttccatagtttgaaaaaagaacatacaactccttggttttcagtctccaaacccatctggctatctccgtctcccaaccaggtttttactttgagatcagcactcacatcagcatctaatcatattgctattctctattcctctccagatttctccctcagccccccgcaaatacttctatctatggtgcaaatcttctcttgaatgatcatgaatcgtcacaaattccatagtttaaagaagaaaatgctgagtttaccagacccttagccttggtaggaggtggaaggaggccttaaaaaaaaaaaaagaaagaaaaagaaaaagctttctcattcaaagttgtctctatcactagcttttgagagcttcctttgaaacttgaacagaataatctgactgttttcatggtggatttcttcccttttattctttgtttcctgaacacattaagtcttcacatcagggtttacagttaactacatataaaaggaattggcaa

SEQ ID NO: 51922 - DNA, 2369 bp, Homo sapiens
acttgtgttttgtttccgtgttttgctgctgtaaggaaagaggaaagcatcccctttctcggccctcctcccacgtccaggctaatttgcagcatttctacatctcagagtccacccttaagatccttgccacccattattttgtttcagaacgcttaatccatcaaggaaggttaaattggattaccccagtagggaagggacgggggctgtaagcatgagggattatccctgtaaagggctcgtggtgtgtgtgtgtgtgcgtcctgctagtgttgaatgacggagacctgagtttggattctgaatccaggtgtattcgatgccgctccggcgtagaacgggttaaagatgcccccagccaggtagagccagactgggagttgtgcaaggtctcaaccccctaaaagcggcccctcaaattgaagatgagtaaatcatagttcgtaaatcagaaagattatccagtactacgttactctgtttatttccctttcgtcatccctgagtcttgggtcaagtccatcccagctctgtcctccaggaatcaagggaaatacgcaaacccgcggtgggttcgcagccgcaggaaggacaaatcttgcccccgccgcggcggccgccccgcgttagctgcctaagagaatctccgtggccggccagtacccgccttggtgaggattctccctcccgcgagaacttctggaatgccgccgggccagattttgcagctgaggcctccgacgccactaatattgggccaagcagggagtgctgctcttccttataaggttttagcgaaagttaagtaagccaattaaagtgcaaaacacacagtctggaacaatacagcgctctataaatggtctccattattatcattatccgttagttataactggggataaaaaaaaaaaaaaaacgacaaaaacctggagaaccggaaaggtctgcaaaaggggcggaacgcgggaacttcgatttggggaaggggtggcgggggagatcccacacaagcagccaatccagctgtcccggggaggaagaggaggagtcaaggcccgcccctggtctccgcactgctcactcccgcgcagtgaggttggcacagccaccgctctgtggctcgcttggttcccttagtcccgagcgctcgcccactgcagattcctttcccgtgcagacatggcctctggcaccaccaccaccgccgtgaaggtgagatgagccctcccagccgcagcggttcgccctgccggatgccttctcgcccccgcgccgggggaccgcgcctccgggggccatgcgcccggcccgtgcgtcccttgccgccgcggggagggactggggcgcggcactcgggactcacttgccgcgcgaggagagggtacgcttgcaaatgatccccctgccgcaccgccaacacacacacacacacacacacacacacacacacacacacacacacacacaccaccttttggcttatctgcacccgcaccctgtagggcgtaggcacccctttagagagagaggtcgtggatgggagaggctgcacccatgccaccaccattcctgagaaccactcttcttccaagaaagacacccggctggagtcaggaggtgtccgggcgcctgcagcttctgtgaccgtctcctggtgccttgcgggactccagcttccgctctctgactctgcttgttgcctgcggcccacgtgggagaactgcttacttgctcttttgtatgcttccggcttctttttcctccaaacgtaggccttctccgcgctgaagttttccccagcagcgtaatactgtaagaattctgagactttcttcgaaaaggagtacaggcgtccgtttttagggctgcactgtttggaggcctctggcttgaaactgctttgttttgcagccttgcaagttagagttcaatttccttgtgccctaggccctgagaggccttgatacaaggggtcattgtgcggtgggaagctttgtgctgaggagggcacgagttctgagagtagcagctggcttccctggggttttaaacacttctctcctggttagtattccgagagagaattacagcacgtaaagaaaaattgatgataaaacttaagacctcttctaggcagtttattactggctaagaatgcgttcttgtttgatttttagaaatttttggcctatgggataggaaggtctgcgatcttctccaaagcatctcgattccctacactcgactgcagttttcccgggagaaggcgaatttctgcggtcagtgtgtaatcagccagattagtttattacgcccttgcaggtttaaatgagccacttagaatgagaggaatggtgaagggt

SEQ ID NO: 51923 - DNA, 2174 bp, Homo sapiens
cactagcttttaaaatctgtcaaggaccttgattgactccctatttcagaactctatcttgtgtaataaagaagtcctggctgggcagaaattccatctcaggtcttgaacacatttcctacacagtctagaattaactggactgaggactgacgcttcctgcccaggaggcctggcaaggtcttgtcattgtttcctgagggtggatgaggtcattaagaaagagttttcctcccctctgagatgattcactcagatacctggagtcactgtttctgtgcttgttctgtgaccttcgtcatgaacttgacctctctgagcatgttgtctcataacatggagacaaataacttttctaataaggtataatgttatggaggactccaggggatattgggagagggcacatcatagtggttaagcctgaaagacctagatttgtatcccagctttgctccttatgattggcccctggacgaggtttttaatttttgtgcttctctttcttcgtttgtaaaacgggtaacattctatagggcccatcttatggtcctgatgatgaaataaggtaaggccactgaagcacttagcacagtgcctttaacatgtaagtccacagacacagttactttataactaaggcagtactgagttgacacaaacttagagactcaaaggaatgtggatagaattgggccatcagtgcttgggtacttcatcccagttgtactttgctgtggagccagcaggtggcgacattggccacatcttggccctgctggcctccatcttagaggtccagtttcctgggatggcgggactcagttgctacacttgtccctgtatccctcgcacaatgtaggtttccgtaaacaactggacctagtaaagtgactggatgggcttgcctgcagatcattccagagcagtagccactcttgctttcatgtccagggctactacatgttccttgctgagggctgagttgccagctacctggtgcagagtcattatgcagccaggtggtgcagactgaagcttggggttgctgagagtgagctcaggggctctgaaattcagcgggacacctggttagcatttctcaacaactgctacaatgctgggcaagttcacctaaactcagagggtggctccaaacaaagcccaactcgatttgtgtatttgatcccgagcatccagtgttgaatccagaatctgagatgccctggctcagggaacacccagaaacagccaggccaaagtggtgataagttaaaaagctagtagctgaatccccagggagctggctgagagtaatttcagagtcagcagttcatatctgtgtcccaggtgaggatatgggctggatggtttcttagcctcctcatgacctgtggtgcttcagaggtccacggaatgaaggataagatggagaagccaggctaaggaaggattgggatttcctaaaacagtatgaatttttgttattttctattgaagtgccgtaatttaaatgtattgacttaagtgaacacttctgttgatttgaaagctataatactggttactctttgttcgttgacataaaagtatgttaacctgctgtggttttaataatatacctccacaagatggcgccaacatcaaagcctggctttgccacttaaggaaattgtggtggacagtcacaaattatgtaaccatgtcatgggaaacaggcagagttcttcagtaaaaacctcactaaattgtccttattttcttgtttgttttttgttgttgttgctttttttgtgtgtgtgttttgtttttttcaggaaactgagccagaaaggtaaccatttttttacgtgttgataggactcaacttgtgtaacctgacctgaaaattatttaatgcagatgttcactgaattcttaatcctggaatttttttcttgaggcctactttattttatttagttacccttgtgacaatagatttaaagcttttcattgaaaaacaacaatgctcaggtcacttcgcattaattaggtttctaataaagttagcctggcactgtttactctctaggaggtaccagcccaaggaaatttccctaatgatttgttacttatttttagttttaacagtttagttaatttttatttatttttgtaattgttcttgtttg

SEQ ID NO: 51924 - DNA, 2511 bp, Homo sapiens
aactcctggcctcaagcagtcttcctgctttggcctccccaaagtgctgggattataggcatgagccactgcacccagctacatattttttagaaaaggatcagatgagtaggacttgctcaactgctatcactgtcagaaatatctcaaggtgaaacttgcaaacatatcagtaaggagaaggatgagatttcttttttaatagtcttctttatcaggaatgttttgcagatattgattttttttttttttacaatgagaaaaatatgaccaaaaactgaatattaaaggaagcagagtgtgattcccggtgctaaacagtttctataaaatgtggctaataacatattggcctgttgtgcctaaggcctgtgtttgggttatgccttctcaaagaatgcagtggaagaatctcagcttagaagtgaggacatccagaattctttcctggctgtgccgtgaaattcctttgtcacttagtgtcctcatctgctaaatgagggtgttgaattgattcctaaaagttctggtatcctcccctcttcagattatttcttcaacttattttcttggtagaactgggagaggttcgactttgcttttgtcacgcattcttactcatcaggaaagtcccgctataaacacagtgctgagggatcagttatgtcagtctgtttccttctcccagagaccagccctgccttgggcttcccctagaactttatgtcatagcataaaggcccgtgtctgggccctgaggttgggagtatgctctgatgtcaagtatttgatcattctctttctgcctcttgatgactagaaagcgttttatggtaaagagttacgcaagaagcctttgtttagctctttctctcattgctaaaaatagtaagctgtttttaacccttactgttcttacttcttcttactcatttccctcactctttagctgagaatgtcacctccacctttatagagaagacagaaacttaagcataaactcttcaccttccttcaccttccctttccccagttacttgcgtccctgttctttgtcatcctcttgtctgtagctgtccttgaagtggtgtccactattcccctggatgaggttcattcttacgttctgttccataacctagttgtgttattaacttcccatcatacatccttttattaaaaatcctacactaccagtttttgagttcctattaggtgtcacaatcagttaatcccacttacggcatacagcagtcattattccagtttatacttgaagaaacttaggcccttactatgtttctggcactgcttattatcacagctctagaagacatcttctatctaccttatccttcccttttacaaaaggtgagaaaactgaggcccaaagaggttgttgtcaccacctatgtagagtgaggatttttatttttgtgctattgtttagcatgatctcatgaaatataatagaaaataaggggaaactatggtacctgtttattgagcagccttccttgactgggatataaacatccattggttttcctcctttttcatgccaccacaagcactcaggggcactcttgataccagaacagtgggaggatcttagtgatattggtccaaattcataagttttcacttctcttttttttgagacaagatctcactctcgcccaagctggagtacagtggcgccacagctcactgcagcctttacctcccaggctcaggtgatcttgccacctcagccccccaagtagctgggactacaagggtgtgacaccatacccagctaattttttgtatgtttttgtagagacagggtttcactatgttgcctgggctgatcttgaacatctaaactcaagggttccacccaccttggcctcctaaagtgctgggattacatgtgtgagcctcacttccttctggttatagagacagaattgttccacttcttagtctgatgtttctgtcagaattttttctcatgactgcctattcacgctgctgtttgattcttgggatatattttaaatgatgggtagattcacttcccctaaaccgtcctccttatgagcagccgttattctgctctgccagtaaattaattgactcacgattctgcatgttggggcttgttgtggatacagaccgtattctgaaatgtcctcagaggtcgatgattgtgtttgcttctgccaggggatgggtgtttgccctcagcttgtttgcaacaccacatttcctcaaaggaaacgtattaactaacagctatcttcaagccaatgtaagagtcttgattcaagaaacaacctaccagtcagtctatttctaggcttttctccctctctttgaaagtgccagtgttcttcctttcactctcttgaactcatttttcctgccagcacacatcattttgtctcctttacttttccataggctgtttttttttatttgtctactagcttttcttatcacatatccctgcttgacaaccttaag

SEQ ID NO: 51925 - DNA, 1838 bp, Homo sapiens
ttcttgctgagttataaaacttctgatttatctgatagagaccttcagaaggaggactggtgctattaaaattatacacatttcattctggaatttcttttgagggcatcatccactcccctcagctgtgattgtaaacctcattgctcttggtcagaatttcattcagcattaacaatgacacatcctgttatgctgtgcaggtgtattgctgtttataggaatttaagtttagatcattaaatgtttcaatactgaatgtattgacagttaagttgatgacgcagaaaactacaaatagctgggcaaactataagaggtgtttctcgtctgcaccttcccttctggtatcttgatagtatagcccaaaaatggttttaagcccttgcttctcccccagggctaccctctttgcttgcaccttacaaggttgagtgttgtgaggccccatctggtgccgactccaattctgtctctagcccagacccacacttgtgagctgctatgagttatctgggcatcttggttgacttaatcttcctaacatccttgtaaataggtggatgaatactatgttttatgattggaaaatgaagaatcaaaaagatatggcaatttggtttaagtccacatagctagtagttagggagctttgttgagaaagaaaaatgcatgagaggaaattaagactgtagttaataattatcaggtgcatattaacgttgcatgaagcttaacttaaatacatgttattcttaaggttaaaaagttcaaaacaaaggcgggggttccaaggcaaatgggtggggatagacaggagatgggcagaggtagatgaaatgcgggtgttatggtgtggaagtcagttggagtatagccactggaggcttttgtggccctgttcatatcatagttataagtgggatgttgctaatgcttgactcatcaaaggctgaaacaaagccagagctgaagttgagtacgtgtcaccgttttattggttaatctttcaaaaagagaaaagcctctgtttatacaggctgaaacagtcatttgacctgttcttcaactccatctggaattgctttggggttaacttagcatttcccctaaagcgcatatgacagtgggttgggaggagctcggatggggtttttgttcctccagagcgctgaggccttatttctgagtgaggtggccttggtgccagctaatgccactgtttagtgtgtgatgaactagaagtaacaggttaattttggccagtagacttgccagctgtgtaaacggaaccagtgaaactatttctcagtgctgcctcccacccctggaagaggacatcatgttatctacctgcccctgttggcttcccttgacccatctctcccatgctgtcccctcctccctgtgttactcatcagttcaaatttagaataattgaatgcacagagaaagtggcttgttctgaaaacttctgacaagaaatttccaggtgacttggtgctagattaattttagcctctcttatggattcaaaactgttttgtcagaagacttgaactaagacactttagaattaattacggctgggaaaaagaacaatctaaatgaggcagcgaacaaagattcctaaatatggagcaagacaagtggctctttatttcagtgggtcactggcatgaaaaaatatagttggggttacaggcaggaattactcttagagacatgggaattaaatgcaaggtaagtaccttgtttggaccctgaaactaacaaagcaactgtttaaaaacaaatttttttaagacattggggaaatttgcatctgctctgagtca

SEQ ID NO: 51926 - DNA, 3238 bp, Homo sapiens
ttatatacatcacaataaaccacttgctccccaaaaactattgaaatgaaaaaaaaaaaaaagcctggtaataatggtttcccttgggaagggacagtggttttccttgtactatttaagttttgtaccatgtacaaatacgtgttccaaaagcagtgttacttctattcattttaggagttaatatgaaagtcctgacattaaatctgtttaggctggtgatctaatattgctagttccttggtgagggttgtggtactttcactaccacatccgtctgtttagtagttcagtgattacacgaggtaagaaaatgaaatcatcttaaactcagacctggaccttgaccctgtatttgatattttttgctgccttaagatagtgttagctgttcttgaaggaatgcaaaatgctggttcaggtggctgacatatattcatagcctccatttcttcctcctcctcataagcatggtacctatctcccaaagtgccagagtgacagtgaggacttgtcaagagccattcatctctagaagcactgtgaactttagccaagcatatggttcagttattcaggatctttaaagacattattgaaccagcgggagtgggcttgttatgtcttaactttaggggggaaaagggggtggggtagagatttaggcttttgcatttataacatatactttttagggaaaagtgttaattaagcataattttattttcagcatttataagataaacatgatgtagcatcaactgttcattgtccatagcttgctaaattttgagttgccaagactcttgtgaaaattctgtttcccattgcagtggcatagtgtaagttattttttaaggaaataggttaatttgtttatgtgatgaacacatgtgcaggtgagactttgcccagattggagactttgactttgagtcactccactttatttatatagtatcccaggaaggttagccaaatatgtgtagaagctgccagtattaatgattgttagaagaccagcttagtgcatacagtgtttacagcgcacctggcatgcttctatgcttgtatataccttagttcatttaatcttcctcatacaattgaattatgcgatatcattattctcaatttacacttgagaaaactaaggcatacagagatgatttttcaacagtgcttcagtaagttaacagttaagttgaaaagacttttttttaattaaaagggaatattgaataagctaagaaaaaatgaaggtaattaataacttgaagattagatgtgcagtattaaataaaacactggagaaaaggatcgaacttttcaatgatgtttctaaaaatccatgcctagccttgccactaaaggaattccaagatgtttatccctgtgaacagaaaaacaatcagcacaactctgtggaaaggcaataggcaaaagagaaatcactttctaaccagcaaaagcttttacagaagtcttcagattctgtatttttaaaagtaatgagaattaacttttcagaagcctggaaatagaactcaacacacctgtttgagaagataagcgacgagaggcaccttagcttagcctgcgaggttaaaagttaagactccagtctgtattctcaaaccagcttagtctcttaaagttgttaagaagcaaatgagattaaagcatataaacaaatgcctggcgagtagaaagagctcagtgcttgcttgtgtagctattagtttctacatgcaaagggctggggaaacaggattatgtgaatgagaaagggtccaggaaacacccttctgtggtcctctaggttttttctgagagcctggcagatagtaggcatttattatagtgacaaatcatctttaagaaatcaacttggtaaacattggggggaagtgcagccttaagttgtgcatgtgctagtatgttttgaagtttctggtttttcttttctaggttcttatagagactgctaagaagctaggactccggtgccactcaaaggggacaatggtcacaatcgagggacctcgttttagctcccgggcagaaagcttcatgttccgcacctggggggcggatgttatcaacatgaccacagttccagaggtggttcttgctaaggaggctggaatttgttacgcaagtatcgccatggcgacagattatgactgctggaaggagcacgaggaagcagtaggtggaattcttttctaagcacatatagcatgggtttctgggtgccaatagggtgtcttaactgtttgtttctattacgttagtttcagaaagtgcctttctacaaggttttgaagttgttaatattttctgtagttccattggaaggtaagaacaaagatcaaaggaaagaaagagacacttttacccaaggatcagtagtgaaaatagtacattgtaggcaggtagatgtgttgagaatcatactaagacttgggccttattttcaggataaaggtgtattttgattgccaatttctgctgctatgctactgttttttgttttcaagaaggaaaaaaatctattaaccctttcctcatgagagggctgtatgttcacatccatctatttaacgtaccgtggctggatactctgttcagcatagaaatgtgacaacaaacagagaagtccttaaggagccgacattctgtcggatggagatagaagttaagcaaaccaatataagaaagctaacggttataaagaaatagaatggtgaggtacaagggtacactaggtcaactgaatagagttgaccagaccaaatatttgaagtatgagaagccttcctgttttaagtgtgatgggcaagaagggcatgattgagtagagtggaaaggagggagactggggagaagggagagagaggagggatgcaatacagtagggccaggccatacagaccatggtaagggtttcagatggaaggacagtgaggggttcaggcagggaaggcagcaggatccagctggaatttgaggacactggaacaatgaggtcagcttccaaaacaaaacaaaacaaaactttaaacatctgtgtaagtacagggtggaatataatgaattccaggtacccatcacttaggttccacaattagccatggccaatcttgtgtgataggtatgtccctacctatttctcccctgccctcattgtgaagtaaatattttcctaaaaggtctttttaaaattaagttataa

SEQ ID NO: 51927 - DNA, 1091 bp, Homo sapiens
cacttttgaagtaaggaaaacatttaggggtgactttctgagcacatttagggtaagtgacatctccaaagaggcctaatattgtaccaccgttttagagagtttgttttactatctaatgtgtacagtgttttgggtcatagatgaacacaggttctttgtttttcatgaattccttatgatgactcttcagtgtaataaactgtttgcttagtactaggatgccttttatgtaagagattcgcaaattattacattaagtcacaacataatatcttatttggcagctttggtaacctaaggaacaactcagcctcgtaatgtcaagaagctgcttccaattaataggaaactccagcccctgccacaccctgagagcggtttgcttcctgcctgtggctttctgctcagtctaataacatatgtctcctcctttgtagaaccagcagtgatttcctttagtagccaaatgaggttggggaaatagtcagctggagctactttattgaaaagcagagaaattaagctctgtaagtggaaaggcttgaagacagtgttaaatgctacaaggaaggcccacagaaagatggcattatttcagccaatcgtgtgttgcagcctggcatggcaaaaaggatttggagttctctaaacccatcttcagatttgagttgctccatttgcttgtcacattgggcgagttatttcacttgtttactcttctgtagaatgaagccagggctctgggtgaggagtggaggttgtttagtcattgtttagtcagttagaccttgaaagattactggaagaattaaaccaaatgagatatgtaaaaaagctagtataatgctggcttgtaagagggtggtcatcagatggtggctctgatggagtggggggcctgagaggtgggtagtatcagggaaaagcatttaaactgcaccttgaagagagggtttattttgggaaggtcagtaggaaggacattttgggtgaagcccaacagctggaacaaagagaagggaggtcagtgtctatacagaaataaccagtcacaggaaaaatatataaggaaatgagtaaatacaagg

SEQ ID NO: 51928 - DNA, 2234 bp, Homo sapiens
ctctactaaaaatacaaaaattaaacaggcatgatggtaggcacctgtaatcccagctactcaggaggctgagcttagcaggaaaatagcttgaacccagaaggcgggaggttgcagtgagccaagattgcgccactgcactccagcctgggcaatagagaaaaactccatctcaaaacaaacaaccaccaaaaactgtctgctctcaatcttttgattgaatagtaaaaccaatattttttttaaaggaaggctacttcccgaatgaccttatctacctatgtgtctgtgtagttggccattaatcaaatgtcatttatatcccaaacttcattttcattcattgttgattcggttgatactcatgtccatctgtctacagatatacactgtcactcatcagtgttatatacaaaccttactcattttattatcactaatgggctcaatcctaaataagatcaaagcttatttttcccttttgcatagtatcttccaatagtcaagctaaagaagaaaaaagcaaattgcattatgaaaatgctatactacacagtctgttctgtgaggtgtagagcaagcattaatgaccctttttttctgtgccagattggaggagaaaagagagaagtagaaacaattaactgtagacagatcagacctttcaactttttcatgctttatgactgcagtcctaatgataaagaaccccagaggcaatgtgagcactccctcgggagggaatgtgagtctggtatctggtcctctctaacagttcatgcctggtaaggatcatggtgtcctggcatgacagacaccaaaagtccacattttccaagggaatgaatgtttacaaatacattggttccttgatgttactagagccctcttcctattctctcctcttttcctaattcatgcccccttattaccttaacagaggtgggagttaatcaggatgtaataaaattgaaaaagtacctaggatggaagggatttggaattctgaatattgtgttttaagttggaaaaaaaagttacataaaatgtattctattgtcttggcagttatttactttgttttttatcttatagtttgtcttcttgagactgtaggcgtctataaactgtgaactaatttagatgccactcctgagggcctggcacatgatttgcacttaatgaacagctgctttggtctgaatttctgtgtcctcctaaaatccatatattgaaatctaatctccaatgcagtagtatcaagaggtagagcctttgggggtgattaggtcatgatagtgtttccttcatgaatgagattagtttctctataaataaggcccgagggagctcttttgccccttctgccatgtgagaacacgtctagaaggtggcatctatgaagtagagtgggccctcatcagacactgaatctgttggtgccttgatcttggacttccacccccgccccccaccccaagaactgtgagaaacaactttattgtttttaagttactcagtctaagatactttgttatagccacccaaaaggactaagacagcagccactaaaaagtgttcattttacctcaatcagcaatttaaaaggaacagctatagaagttgaacaacagtcgtactaaatggttcctaaggaagttatttttgaaaaagtataaatatcaacatgaaaaggtttcagaattcagtgtataagtgaaaaaaggacatgttcttggtttaataatcattttgttgcagagcacttttttcggaataaaaaaaatttgattatttcatttagggaagattaacaggaaatagtgttatcaaactgtgccctcagttttatagatgactcagtcttaaaaactccacacatcggaatgtgatgatgtgttcattagctgctctgtttgacctcactttagtttacgaattcccaccctttaggaatcaagattacaaggctaaagcagtaagtaataggaaagtcaacttcaaatatatacagaaatacaaagatcaatataatgaacccctgtctgccacccggcttcaagaattacttcatagacaatctgtttattctataatcccactgactgttcacctccgacgttattttgaagcatttctcatgtatgatttcatctatgaatatttccatgataagaataaaaatttcttaatgtcagaaaatatttagtgactattcaaaatttcaaatgtgt

SEQ ID NO: 51929 - DNA, 1000 bp, Homo sapiens
gtgagatctggaaggaggtggaggtgaagaccctcccacctggcctgcatccagagtacttggggtgtggcactggcgtgggccccaggaaggatcccagccagttttggtgctggaggcccggccaaaggaagggctgctctcccgtcccgcgggctccgaggtcgccgcacccgggcgcgcctgggcctcgtcacccgcgctcgtgacgcgtgcttacaaaggaaacttttacaggtttcggtgggcagggccttttattgcccttctgctccacagcccccgtgcttaatcggttggttgggaggtttctttcgtccgtggttttggaaagtccccgcctccaaaccgcagtcccgcagtcagttctgcagcctcagggcctcgaacagccatgcttagaatccgtccttctttcctgctccatctacccttcccctctggcttcttttttttcactggagaaagcccacccgagtctctcagcctgcttcggaggttactgcggcctcctccacgggtagttctgggacccgggtctagtccgcggttccggagcaggtccctccctggagtcgtcaggcccagtatgcgtgtgctcagtgtgctcgggaaacacgcgtgggctttaacagcagatctccataaaagggtcccggagatagcctctgcctggcccgaggcccagtgcctcaaagcggacgcctttgcgctcccggaggtgctcacaccacagcggagcctgctggcgagtggagcgtaggactgcgaaccagcaatctcccgagaagcggcgagggggaggggaatgtctgtgaatcggttatccctcccacccccagcagaagtcggggaaatgggggtggaagggggaaaaagggagagaacaggagtggggttgaggaagggtaaggaggaaggtgagcttcctacagctgcgggggaaggtggagaaaattttcagggggacagctgagtggtagagctagcgagcttcaga

SEQ ID NO: 51930 - DNA, 2090 bp, Homo sapiens
ctcctcctagcctgggctagagacgaattatctgtttacgaaatcacaccaaacaaaacaagtgccgaatgcgccccggacttttcgagggcctttcctacctggtcttctaggaagcggctgctgccctagacgctggctcctcagtagcatcagcacgagggccacagcggcgggcgcccctggcgctgcccactcccccgtgagccgcgggatgtgaaccacgaaaaccctcactcgcggcgggccgcacgcgcgccgaatccggagggtcaccaagaacctgcgcaccatgttctcgccgcctccagggccgagctcggcagccgctgcgccgccctttggcaccagaggtgagcagcgccactcctgcccccttaactgcagactgggacccacgcaccgccccctgcccatctccgccccgcaggcgcgcacccgccttccctgagcgcgcccgccccccaccttcacccccacccccaccccacccccactcccacccggacctccaagatctcggaacggctctgagccctgcgcacgcgggaagggctgccggaggcgcccgtagggaggcgcgcgcgcgggcggctcagggcccgcgttcctctccctcccgcctaccgccactttcccgccctgtgtgcgcccccacccccaccaccatcttcccaccctcagcgcgggcgccccgcggtgacggcccaggggccggacgcctggaacgcaactccaggcagctcgccccctagctacatccgtcacctgacacggccctaccaggaacagccgcgctcccgcggattctggtgctgctcgcgtccccgctcccctattccccttattttattcctggctcccctcgtcgaaagtcttccattcttcaaactagattatttaaaaatgaaaaaggaagaaaggaaagcgaggtcatctcattgctctatccgccaatcaggaggctgaatgtcagttttgaactaaaagccgctccgctcctcttctagatttggaaaacaagcgaaattaaactaaaccgctgcacgcctctgacgcgacatctggacacggcgcggcgctggcgctgccggagctgtcgacccggcctggcgccggactaggtaggtggagtcgcacccgggggtcccagctgggtccgggcgcccattcccctcccagctgcccgcgtcgccgagggcgcctggctgggacaagcaccgagtcctttgtgtctagcccatttttattttcggttttaaccttcacgacagccgcggagcatctgagcgcttcttcctctttcctcttcccccgcgctcccctcccctgctggccgctcccctcctgtcgccgcgtcctcgcgtagaatggttgtcttggcgaccgttggccgctgccgcctccacgctctgccccgcgcccagacaccccgactccccttgatcccgccgcctgactcctcggcgtacgttctctctccggtctccccctccatgtcccctcctccccttttcttccacatcaccgatcctttctggactctctcccttcctcctttccagctgggagacaggaaaagcggtcctgtttgggaacagtaaaagcagggcaaggaaaggaaggagcggcagaaaggaggggtgagtcgaggacacaggggcagccggagaatgcggaggagccgggtcctgagcgcggtctaagcgaggctcggctctcgtccaggaactcggacgcgggctcgccggctctccgcgcgcgggaagtcgagcccaggacgccgccttcaggccggcgcgctgacccggtgccccgacccggagcctgcggtctgcctggatccgtcctaaacctcgcgggctggacccgcggcctgagtgggtgggtgtgtgccagaggattcgggactaggcccagctccgggaacctggaaatgtggcccgcttctcagtggcttcctgttcatgcgcttgggcctagtggcctagttgaagaagtggaaccacagcgtgagccgacagggccttacagatcagacgtcaagccccccagaccttacaggggaggaaagtgaggcctgcactggc

SEQ ID NO: 51931 - DNA, 1932 bp, Homo sapiens
tgaatatgaccactagccaacggtaaagtacaaaagagttgtccgagattgtaaaagaaataaaaaatatcagtactaattaaagcaggattcgtacttaaacattgaataagtgtattttaacaatgaagataaagatgcattatttatgaagatcctttgccattcaaaaaggacctaacagttgctgcaggaatatttttgtaatctgggcactgagtatgataattaaagaatgagaaacctatagaactatatattttttctcttatgcatcactcataagacactgctaacataaaaggaactaagtactgtggttgaggaatcccgtctcattctcaattaacctctatgagaaaacaatacaacagatttcatatagtagcttagaagtttacattgattttttccatgtactatgattttgtagaattccttaaatccaatctagaatgcgtaacttatactttacttatctttatcgttgaaagcagacagacaagataatcttcttccctaaataagctttccttttctccttttctccccaattcagtctattccttgcatctctgatcatgagatggcagaacaaaaaccactaaaaaaagcttaaacagtgggtttttcaatgtctctctttaggatttttgctgggtaaaagcctgttttacgcgtggaatgcacacctccggccaacggagactcctgtacaaatctacatcggcgatctaggttccagccccgatccgccgaggccgcgccccgcgttcgcgcgccccctgccggcgaggccctggggccccagctacctggatcgcgcgcctcccgaaacggttgactccgttgggatccgcgccggcttccaggagctgtcgcaccttctccactagtccccgcgccgcggcgctggccagaccctcatcgctgccgcccccactgggcatgcccttgttctcctcgcgcattccgcagcccccagacgcgcagcggcccggataatccaccgttggccgtaaacttaacgacactcttcccttctttcccacgctgctccggcgcactctctccttcctaggagacctgggctcagcttcattaccctcccgtcgtccttctgcggcttggggccccgtgcagtggccgagcggccggtcgttagctccgggcttttcctggcgctcaagaaccagcgggcgcgcctggattgcttctgggaaaaagcgcctagcgcggacgcagccgagctcaaagccgctctggccgcagggtgcggacgcgtcgcggagtcctcactgccccgcctcgctctggcagagtggggagccagccggcaaagaattccgttttcagctgggccaaggggccggcgtctccccacccccttaggctccgccccctgtccgctgtgatcgccgggaggccaggcccgggccgacgcgtcacgagggcggggaagcctgcccaaagatgctaggacgcatgcgccagagactgggccagggagccgccaggaatgctggctgcactgctcgctggatgtccagtaaagccaaggctaatattttgggaatgttcaccactgccctcagctcctaatccccagtaggcggagcagaggatttctgttccttcagccagccagttggtttcactgtggagacgttggtggctcccttgtgaccgagagaaagtcattcaaaataactccgtgtttcttaagatgtctgaaagcgacagctctgcacctgtcatacaagttaaattcatccccaggcagtacttgggcttcacaagtttcataacttgtatcaaacttagcaattttctcttggatgtgtctttctgtttgaattagtcaaccataaaaatagagaaaaatcccgagaatcatgttttgcgtgtgctttttaattctttccatttttg

SEQ ID NO: 51932 - DNA, 481 bp, Homo sapiens
tttgtaatgtagatttcagctttttgcttgtagaattatcattggcgtggaggttatacaggggaagtagtgaaaaatgtagccaataccaggaaccttaggaagtgtctgaacttcatcttttctgtgttcctttgcccttagggggtcagtgtaagagtttgggctaggaagagattgcttcttttactctatttagtttgtacttcctatctgggtatttgacaataaatgactcattctctttgtttgccctggtgttgaaaaattttcccatatgccagagaaaaaatgttacagtgacacaatgtaaaattgtaagaggtggaaaaagatgaggtatggacatagtgaatggaagttcagccctttaaaactactggcagagtagattttactcaggcttcaattaagtagacctgaatgtaaattcaggtctagctctgcaacttactaggtaagtgactttagtcctctttaa

SEQ ID NO: 51933 - DNA, 1459 bp, Homo sapiens
ggaggttacagtaagccgagactgtgcctctgtactccagcttgggtgacagagcaagacagagtgtgacagagcaaaacaccatctaaaaaaaaaaaaaaaagggaaagaaaaaaaagaaaagctgaagggtgtgctgggtcctgtcctgggtgagggaacaacttgtggaaaagtgaattgaggcttatcggaatgtttggggctcctcaataatgttggcactctgagatacagaccaaaagtgaggtaaaaagcgagtgtttcctttttttcagaataggactttactccagattttcttactcttctcttgattccttcaccatccttgatcgacattcacctcagatgcccatgtcccttctccaccggcatagcttgttttcttcttaatcttcttgtgttcatctagcctcacattgcatttgtcacacttcgttgaaaacctactgtttgtcaaagtgtctttctagtaatccagatatctcttcccccatgcctttggtgtggtttcggtagagtcatacagagcagcaatgccttatgaaaacgaattttacagaatctgcctgttcatcaaaggaggccagacaggaggtgagaaaaaccaggtgtgtcccacaccagtctcaatgaagccttttggggtgtcttgtgctcttgactaaatctcagatggtactgaatgaataatcaccaaaggcgtgagctgttaaggaatcccagtttggctggctctgtgcagtcagatgtagccagccctgtttatgtgtgaaaggattgggttttccccaagctgtttggtaatgttgcaagaacagactttcccctccctggctccctggagtaaaatggctgccaaagtattttggaacagaaacttagaaatgtaccgaccactagaagagagtaacaagggtcctttgatattttccgtgttcactatgatcaagctggcatcgtttccttctgagctaaagattctgagctatcattggctgatgtgagcttgtgacctagctacttctgttcacaatacactgtggaggggcagcgggggcagccctatttgggttgagagtctttaaggagagctttacagatgagttctagtgaagcccatcagggagaagaaaatcaaacacaatgggaaatgtttaacaattaaaaccaggctttgcctgtgtggtcctgtgttttaccacatcactctatggaaatgggctgttggaaggaagactgtatttctgacagtttgcagagccaaaaacctgttgaaggctttttgtaaggtagtggagaaaatggcaaaacctttaaaacttaagggaaattacttgatagttctgatgaccacaggccaccagactgctgggtcatggaattatagctacatgacaaagaaaataggagggtgggctgagccagactcagaaactattccaaaagtactatg

SEQ ID NO: 51934 - DNA, 1169 bp, Homo sapiens
ggattcacaccaacaattgttaaagtaaaatttatttttcctgtgttttagatgaagagatttaggcaggttatgtaacacacccaaggtaatatagtcaaataattgagccagaatttgagcccaagtctctttctgactctaggcttagagctttagggctatttcacaaaagggctgttcctaggtcaggcatgacaacttctatattaccttcgtaaaagaagcaatataatctaccactattaaattttgcaggttaattttatattatgtttaaatacagaaaactttatttaaaactcagttgaatttctcttgagaaattggccatgtagtaaattatatttaatagaagagtttgtgtacttcccagggagcagagtattggcctgatcaaagcacctttcagcctttgtctaacagcatgtgggtaggctacattttttttactctcagagaaagggggtgggcaggggtgtgatatgggtttttgtctctgggagttctgttgcatgatttgacctcccaaattgttttgtggggcatatccaactttgggttgaaactaaaatgggttcttggtaatcccagattgaaaatatgtctcagcagtaacattgtttatctttaggtttaggtaaatacagacatttgccatgtcttcttggtagcactgtaagaatgagtagggctgtgaaaaatgcacagggcattcattatgaagactggctggttaaaactgatacactaaagaaattgcattcttttccacaagctgagtcatacagctgaaattgtggaatcatctgagccagcagctgtaatatgatacttaatctccataagtgacagatatctaagataacacgaacacccagacgacaactcaggcaaccccagcacagtgttttggtatgagaacaggagaaatgttagtagagtgaacatttttccacagagaactcaaatatggtaacattctcatagctttgataatccccaataaactgtggttactaaaatgcatgacaaaaagaacttctatctataaagaacttctttatacatttccaatacttgggttatgatcaaggagaaaaaagtttatcagttaattaagagttaggtagctagtttgcccacagattaatttgtatgaggtaaag

SEQ ID NO: 51935 - DNA, 979 bp, Homo sapiens
gacaagtaataatttattattctctccatgtcagtggtatttacctttttggaatcatgtgccccattgagaatttctggaaaaccatggttcttctactcaggagaatgcacaattgcacacatacacaaatgtgcaagcacacacacacacacacacacacacagaattgccacagaaggtcagtaggttcacaggccctaggctaagaaccagcattctgtatattttacatgtgttctcttacaagttaccgtgtgattcagttcactccaaactgcggttaagtgcaaaacatggttttgaatatttctatcaattagtaagagtggtatgttaatttaaatacaccaaagtggagaattactgtcctctcaatagctactttaaatagacataagttacagtgatattgccttccaggaggcttcaagaaatgagatcaggctctataaaagaaaatcacccaaccctataaagtcatctttatgaactttgaaacaccactgtatgtacctagtaaaaattattcctgggtaagcagactcccaggcctgggtggagttcacatgagtccctttgctaaaataaacagaagtgactgggaactttggattgcctttgtctgaacttgagtgtctggatggatcagcatcagcagcataccacacacctgcttgtccagccaaagagaaacccaaagacttggcatttgttttttacattgtcaactgtgcaaaaatatcacgattctaatttatgagggtccatgagttttaaaaacaccccctgacatttttctagccaaataatttttcctttaaaaggcacaggatgagcaacaagattaggtagatcacttcaatctctaatttcaaaagataatagttaaaaattcaactgtaggactaacacattaactatgtaataagacccagaatagtctttggagcaaatttcagtggatacttgatcaaaa

SEQ ID NO: 51936 - DNA, 1214 bp, Homo sapiens
ttacttataggggttatgggaaatgccatgggcaagaattttttttttttttatcaccatgctttctgaaacaacacgatatgtatcacctttataaaaataaaataaaataaaaaatgaaaaacaaagtccacttgtaaccacatgtcagtagcatgtttgctttcagggtacatcaaatgcattctatagcacaggatgttccagtcactctaacaaaagatgtcctgtttggaacaccaactctgtatcagttacttcagacactttctctcattgagtcccttcagcaagcccttttaggtttatgttcttagatgaggaaaccaagtcttagaaacattaactggccaaactaagatcagagagttagaaatgtcagagcccagaactggcatcttctgacttcagatcccatgtactttcccctacactgtgctgaccacacctccattactacagatgtgttgattacatctaggggccaaagtacacattcatccaataaatgcttactgaatgcttaccgtgttcagggcactgtggcaatcttttgtaatgcaagaaaaataagagtagtgaagacagtcaaggaaacaaagaagcctaatactaggcaagaagtgcttttgatggaattaagcacaatgagggtgttagtacagaaaggacatttaattgaactgggaaagttcatggcagttttcccagagatgagtcttgaaggacaaatggtatttagccaggaggaaagggggtcaagtgtattccagggagagggaacaacatgtacaaaagcacagttttgaaagaacactccatttttgaggaatagccaatagctgggcacgtctagagcatagggtagtagagagaaaggaggccggaaatgggaagagacttgaatgccacattcagttatgtggacttcatcttgtagcaatgggagcctacaaaattttaagtagaggaataaaaagattccatctaaaacttagaaaaattactttggcaggataagagacaatgaattgacggggagctgggtttgatagcaagaaactgtttgggagactgttctaattacatattttcttgtttttagatgcacatatacgtacttttttagctggtcatttctttctgaaattggaatgaatcttacaatcaatggcatgttataatttcattggcagcattatttgtctcttaag

SEQ ID NO: 51937 - DNA, 2936 bp, Homo sapiens
gaaggaggacaacatggccatgttcttggttcggtcatgaactgtctatggcacataccttaaatactgttggaaggatccgttagctccagagactgcaaccaactgcctatggtcataactcagctctcagacacattttgttgtgcccacagagtgctgtttgcctgtttggtttttaaaccaacacttaaaatgcagggaatttaagataaaaatttgataaaaatgggaagatttggccgtattgggctcatggtaactgagatgcatctgaatgacaggcattcctttgaattgcacatttgctcttgtttttactataggccactctcactttctgtttttttccccggctttgaaacgatcagttttagtactgaaaaattatctaggatactaaaaccagaatttctctgctagatggcttgctcattacattacctacatgattctgtgtaagggattgtgtaagttttctatggttgccataactatcacaaacttgatggctttataacaacagaaatgtatttacagtttggaggcagaaggtctaaaatcaagacttctgattttagtctgtccaagagcctctgctggtagggccatgctctcggcagaggctcttggggagaatctgttccttgcctcttccaccttctggtggcttcaggtgttttgtggcttgtggctgtatcactccaatttctgcctctgttttcgtatggccttctactctgctcctttagtctctcctttaggctgtttcttataagacactcacctaaaacccaaaaacaatctaaaagattttgcaaatatgaacattctaattaccttagagttaagattttcttttctgctaagtgagggcatggtgcagagagcaggaaagatgtgaaactagatagcatacaaaaataggtgttcatagatctgggcctaacaagggtgtggccagcaactctgccctgctttatcagcattagaaagccagtcctctcagaaagtgcccagttagctaaattcatgagattatagactattaaggtggaatggacctcagagatggtccttgctctcatctgaggcttcagttgggccagtcagaaatgtgggaaaattgaggcaggtcaaataaccaggagtacaaacaaacacaatctatccagaaaactagaaatcttactagtgactattcacaggttactttctgcattctggggttttcattctagaacagatgtgtgtgtgtgtgtgtgtgtgtgtgtgtgtgtgtgtgtgtgtgtgtggtgcgtgaagagaggggaggggtgcccagaaaaccatacccactttcccacatatcccaactatgactgggcaattatgtcattatcaccactgatatatagctggaagagtttagtgttgccctgctaagatctggattttcttttctggagcttggctattggggcattgagaagtccagccaggaggttggtcagaggctaacccaaaaagctttgcttaactctgggctacagctgggggttgccagagagaagtgcctggcattcctgcatgctgacatcaagcttcgaagttgctgccctctggtgagtcagcagcaaaggcccacatcgttcgagaatgctgcccaatcagaagatgtgatgccacacctcagaaatctttctaaacctcagcattctgtagacttcaaacaactcctcctgagaaagaatgtagaaataattaaatttataagattaaagttataaaaagcatagagcctataataataacagcaataagataaactccacatttgcttttaaaacaatttatttgagtagacagccaaccccctgtattgtactcctttaaaaaatattttaggctttttaaatgctgaggcaaggggacataccaaacactaacaggcacattggggttttctggctattgaaataaaaatgtccttacataacactgatgtactggaatagcactgcgttccagtgacggttattgcaactcagccagcatatctgtagcttgtgagcttttcttatcagaattttatctataaatatacatatacgtaaattctattgtgaaataaaaataaaatgtagaatcttctcatctttcttattagtcaatattgtgctactctttaataatttctctcaattttttcattaagcagatattactagggaaatatacatgaggcagaaggcaaattatttgcttagtgcaatgcaaacttgcttaacaggtaagagcagagtcccttccatagcattgccaccatatggcattgccatatcgtggaggccataaagaggaatgacattgtaaagattaactggattttacttggcaaggtcaggcacctagatggcatgctataaaatggttagaagtgcaaaggaaacctgtagctagaggccatgtgagattatggaagtgacttttcttacaatcctgccatctggtttggattgtcaggatcaaaacatttcacttgcccaagtgaggatgctctctacatggttttggggatgagggagactcagaaataatgtttgtggtactgtagcaccactaggaaaagagaaaaattggacctgacatgaagaaaagcatgcagccagccactaagactacttcccacaggactggaaatctctaccaccgtacctctcctacatgctgggtataagaagttaaagggaagccagattatatttacctactctttcattcattcattcactcattcatttattcatccatttaccatttgtttgttttttgttcatttacttatttaataaaaattgtgttttgcatattctaggtgccaggcattgaagaaccactgttattgttctcaaatgactgacagtttagaggagaaaatggaagaataaatagac

SEQ ID NO: 51938 - DNA, 3041 bp, Homo sapiens
gcatgcgctaccgtgcccagcccaagttgtctgactcttaattctcagctttcttatttgtaaaatgaaggtactagtactaatttggagagttgttaaagattaaataatatatgtaaatgccttggcataagggactggcacaaagtaggcacttcatatataaaagctgtgattattgatgaaccagtagtgaggtacataactggggaaggagaaggggccagtttgtgggaatgcttttttagttattaatagtaaggtggtaaaataataatagtaataataaccaaaagttactgaaaactaaatacagtgctaaactctttaaaaggagtatctaattggatcttaacaacaaagctatgaagcaggactaatgttatctcattttataaatgaggaaatgtaagatcaaacaggttaagaaactttcccaagttgatcagtagcaaagacaggattcgaaccaaggtaattgtcctatcagaaactgtactaggatagtctgcatttcatggtaaagactatcagatgccactaaaactttttaaaaagggaagtcttgtggtcaaatttgctctttagaaggcagtatggagtgcagatcagatgctggcagcagggagatcagttagaagatggttgctctaattcagttgagaaatactgagacatctgaaatattgaagacatcagtagtgtgggtgatgtgaaagtggttctaagaaactagcggcaatcatccttcattactgattgggcgtggagagaaagagaggtagcattggtagccgttagtcaactctgagtgcaggcactggcatgtgcattattacccagggctctaagtggagaaagaaaacaaccccagggtgtcttcaaacctaaagcatatttcctaagcctttgcactctcagtctagactaaaaacaaacaaagcagcctcctctgaaatgctggaaactttccccacttgaaactctcagatctcttaccttgcaattctagctttcaaattccaagctgagcttcctttcccacaccccgagtccttgtactggggattacaatgatcatttgtatgtactaggtgattgttccttccacatcaggggccttggagcggatgacctaaagctgctttctcctgtcctgactttctccacccagcactgcaaccatacatacaattttctggtcttgtagagaatgactgactggtcattatagtcttccaaaaggataagagattagtgtcatgatgtggccttcaggcagccagggggaatctccatatgaggtacttgttgactgtattacttagttttaggtgaacttcctgtggagggacaatatgtgcttagaaggacagagaaggaatgtattaggtaaggcattctacatctcagataaagaacttcaatgaattgttgggtcaaggtctaagaaacaaaccagccgtcaatgggaaagttaactaaaatgaagaacccaacatacaaccccaaatcctagtttttctgactatgttttcttaaactgaaataatttctgagattaaaaagaagttgctgtgactttgtctgatagatgtatttttttgttatatattagtttgggccttctatctctcctactttgttttctttataatagaattaatctctgaaaagtaactttactgtattctgatgctccattttgaataagtcagttcttctccgaatgggctctggagattggcatttgattgaacagcttttgtgtattgattgttttaggtagactgggtactccatttaacttagtatttctgacaataaatcagtcgagaagggagtattactctaacggtttgaacacttgtctatgcacattgcttggtcattcaataagtagttattggtgagatcgggcacgttcagggtggtatggccatagacaataaatggttacgactctgccttcagctgtaccagtatttaagttataaggtagttaagttacaccagtgcaaaatcatacagtttggtcacagtcctacttgaggatctcaaacctagctccccttaacaaacatggaggcttaatcttggctttgcacactgaattattcctttagaaaaatacttggtgtacaactcatccttttcatttacaaagaaacaaatttgagcagtttcacaatttaaaaagtctcccaaatggattatatttaattgtccatttccaatgaaactcactaaattggtaaatagcagtgagtgaataactgatgaggtcatactttcttgttttggactactacaaacaccacggagcaacaacagattagaatataaaggttaagcaagggtttagtttttgttcaaaagccgttttgcttgttacaaaggctaccaaacctttgaacatcagaccaaaccaaaaacaaaacaaaacaaaataaaaaaaaccccaaaactgaaagatgaaaacatagtttgataatctaagctgctcttcctttatttaaccttgaatttatgagattatttttttccccagaagaaaaattctcttagggacactttcagcaatttaacattttctaagcattacagcaaataagaggcgatcatcattcttcagtcataaagataagccaaggaatgaaagtgttttgcaggtcatgtcacctgacagaaactttggactggtcctttcctggttcaagagttcagccataatacctactttccctatcagctggctcaagctgataaggtcctgaagcaagcaaagcttctttatgagcttttatttaattgtccttgccacataagggttgaggggattcgtctgtacagagttacttcttgttggtctattttttctttggaataaatcgctgtctcccctgactggatagagtaaatagagtttgtttaaacacttttcatcaaattcctagtgcctagtacagagcttttaaccctaatacgtttcctgcgtgtacttattgaaggaataatgacaaactctgccttagattggt

SEQ ID NO: 51939 - DNA, 534 bp, Homo sapiens
ttggtcatgtaaatttctggtaggacactccttatgagattacaacccattctaatttatgctagctatttattgttaagcagtatgttgtttttattacaaaacctcctttaatcattgcatcagtctctggcagaatattaaaaacaactcccataatccctggcactctgtcctgggtgtctttgggggtacagtggctttatttccttccctaatagttcggaagtttgtttaatactgactcagaggaagcattctagctgagtcctcacatggtcttgtttacagctccggagtgtacataatagataagctactgacttccacaagacccccacgcttcctgggtgtgtgggtgtgtgtgcttgtgcttgtgaattaaggttgtgcaatctccctgctagctgcatcaggttgcaaagtcatttacttctctaaaatattcctctagccagcctgacttgataaaccaaaatcattgtattccatggtggacatgctggtaactcatgataaacactaaaaatccta

SEQ ID NO: 51940 - DNA, 1802 bp, Homo sapiens
tttggttagaaagtcactttggtcttgagggagataaacaacacatccccaaagggcaacctggagttgccctttgatgtgatagttgccctttgatgtgatagttaaccacatcagttagtgaagtgagtgaggggaggggtagtttgatgagctagctcccgcaaggagacaaggtatccccccacattaacctcatgctttgtgtcccaaatcaggacaactttgactcatttcagtctttattcctaggcagaagcaagtcttagtccatgccagtttatcccttgatctgaaaatagtctctggctgtcagacacaactatgtctgaaattaagattaagccctatgagtcttcagtgaacaaaatggaaataaatgctgaaaatccccctacctatcttgaaagcataccctggagtgagaggttgttttctcaattaaaatttatcttttcaggtgttttgtagaagtctaaagactcagtcagtgggcatgagtcatctggctgtggtaagattagaaattcctaacacatgatataggaggccagtgctccaggaggcagagaaaatgaaggaaaacagctttctacagctcttacccccacaacccccatctctctgtaacttaatttttcttctcaagtttcgaacaagtacagatagaacaacttgttttctaatctttttctctttttctcattcctcttctttctttattcttcttttcccccctctttttgtttccttttcctgactcttgaaaaccatggcaagtgcttattatttcagttgaatatgttaaaaattgttatcaagaagttgattttttgtgtataaaaatggtgaactaagatactgttaaaagagtggaataaatgaagaggagagacagaagaaccaaagatgggaaaaggactggaaaagaaaaagagactaaaaggaaggtaaggggcgaggaggaaatgggcctctgagcctgtagagaccaatggggactacggaagtctgagtttatttaaaagactaactggggaacatactttgctaagttgtgctttttcactagctaatatcataactaaaaaaccaaaggtattgcagcttctatttcaggaaatcgcaatccaactattcaatttttttttcagctgttttgatgttaaaagataggccagagcacaggttttgtgcatttgaaattgctaagtagctggccccacgggttattcactcacagtgctcttcaggtgactggtcagtgttggtgaggataatgtttccattgctccttcagtctctttggcctgctttcctgaaggagagtaatacaaatcctaattaaaatgaaaatgagaagttactaaaatgccctttcctttacagaactctatttcatttacagaggtcggatgttcgtgtttaactaccaaatccctctatctcacttagagctcaggagtcaaataatctagacaaataagtcaatgtagttcctaaaagtgccgaagtacttttctgccataattttttttttttttttttttttactttgaggacatctagcggcggtttagtggctgtgttcttcaaaggcaaactggaagaaacttcaggacatagtagcaatggcagaacctatttttctgaacaccttcacacttacagtgatttatcttaagcctgaagacaaaactgctgtggtcctggaggataaacaggctcattccagaatctgcagctaaatcctcacttccttctttcactgttatcagacaaaattcccttggcctaattgt

SEQ ID NO: 51941 - DNA, 613 bp, Homo sapiens
catttgctgtgatgctaaatattgcacattctgtcctggcagagttggcacccaaatcaaaacataaataaatacagtaaaaagaaaaatgaagggctgtacgtgtctggaagtgtcttcagtgaatctgaaatttcaaggatgacttggaggtcccagtgactcatgaaacaggaatgttagccaaccctgatgtaatattttatatgaagggcttttcatttacaaaggtctcagtatttagcaaacttagctatcctaaggcattcatttcatccttcacagactaatgatgtgcaaataagattggatggacctgagaagtcatttaacatacagcaagtgtttatagcaactgagctaagtggataaaaaagaccctgttcttttgaaactacagggtaaggctttaagccagcagccacagtgatccagctcagctgactctgtccaggattctgggctacggggaacatgaccatgggccaactatatttgctaaccacacattaaaagttatgaaatgtttatttttggctttttcgtctagggaaagttaaagatcatatctgtaaccaaataggcttatgagccctccatactttaggccttc

SEQ ID NO: 51942 - DNA, 2989 bp, Homo sapiens
atctgggaacccgaaaggagaactcaaaatccaaatcttcagactttcttaggagaagcgtggaagtgggaaaaggagaaattcaaactctgcttaatttcaaaagggcagtaaaaggggaggctgcaaaggctagtttacaaaaatagacgtcgagaactcctagggaagcaagtagaaacgggctttttttgggggaggagacatttgcagcccattggacggattccccgccgccctcctcccagaaggtccccactccccgccccgggccctcccccggcttccgcgctgggccgggagcctgggtgggcggggtagcctctctagccttgccttcttggctggaggcacaaaggcattaacttagcgcccggggtctctgccaggctcacgggacagctgcacctctcagcgtctccagctccaggacgcggtcgtcccaactccttccgagtggaaagagtgtaaaacttttgtccgtgcgcgggtggagctcagtaggaccacggcgcgtcctgccccggcttccccagcctcccagcagggttagctgcggtcagcgcactttccacttgggactcccggccagaaatttctcgggaatggagcggtcacagtgtggcagcagagaccgaggcgttagcggccgacctcacttggcccctgggctagtggtggctgcccctccgcccccgtccccggcgttgccggtaccatcggggatgcaggttcccccagcgttcctgcggccgcccagcctctttctgcgagcagcggccgcggccgccgccgccgctgccgccacctcgggaagcggaggctgcccgccggctcccgggctggagagcggggtaggcgcggtgggctgcggctacccgcggacgcccaagtgcgcccgctgtcgtaaccatggtgtggtgtcagcgctcaagggccacaagcgcttctgccgctggcgggactgcgcgtgtgccaagtgcaccctgatcgccgagcgccagcgcgtcatggccgcccaggtggcgctgcgcaggcagcaggcgcaggaggagagcgaagcccgggggctacagaggctcctgtgctcggggctctcctggccccccggtggtcgggcatccgggggcggcggcagagccgagaatccacagtccacgggcggccctgcggcgggggctgcgctgggactgggtgccttgagacaggccagtggttccgcgacccccgctttcgaagttttccagcaagattatcctgaggaaaaacaaggtgagttggtctttgatttactctttgctcaaggaatggttgttctggaaagaaactctgaaacaagccaccgtgtccataggcgggcaggaatagttgtttaaaagaaacactttaagttttggggaactgctcagcaatatggacattaatgagagtgtgagagaccccatcgccttcactttggaggaatttactgttgttccctcaggtgataggatgagataatgaaaaaatgaagcatgggtggtaacaaatgagcaattcaccctaggagtagagttatttactcggaagttgatttgactttcactgtgtgagtagaacttcaagcaggcattgagcgaaaagcttcgtaagaggtgctgtgtttgagtctgctctgtactctttccagacaggatctcactctgttgcccaggctggagtgcagtggcgccattacagctcactgcagcctcaacctccccaggctcaggtgatcctccctgctctggactgttttcagctgtaaaaccagagctgattttgcgtgggaaactctgatagttggggatgcagttctttactacatgttggggcaaacatttgttgcaagcttgatgtggggaagagactgaaatctaccaaaccatcgtctttctttgtttcttcactctaaattgttttcgcaaaatgtaatttgtaaaaccataggtaagaatttcaaagttcaatattagaggttttttatccaaggagttttcattatttttctcttattttttgactgcgagtcagttgccttcatttcctgcgttaggagatatattttagtgaacttcatagccctccacagggcctactaagcagtgaaaatatcattgtgattttttttttgtataagtcaaaaacttatacaaaacttataaagctgtattatatgaaattgtatgatagctatacagtaaactattaattagaaaccttccttgaattatgaaaattgcagatctcaacagattttttcgctcaatggctgcttgaagttctactcacacagtacattcgaaaaattctgtgaattgaaatgaggcattcagttcagagtgaattttgtgtttgcatgtgtcaacttttgcacatattctaatttatttgagtaggcaaaacagactttctacaattcccatgaaagatgaaggtgctaaagagcacagttattaagtaaaagtgctatgaaagagaagtaaaagtgagaattcctgaaactacaccgatagtgaaatggctgacatctccctgtgagacactgatttatgtgatttctagttggtaccaaagtgttctgttttatagagctaattattttactttgttctttgcctcagatgatgccccctcccccataagaagcaagctaatgtttgaaaggttacttcaatagctttctaaattgactggttctcttacacaatagccatgaactgtggtaaaatagtctatttaatttactcattcattagacaaagactaacagtgatttagaagtgaacaagtttttcctacacagaagaaccttatattcaaaagaaggcagactatatgtatccaaaaactacaatgcaaggcttaatatacaatgataaatgcaatagaagtaaagcaagctgtaggacttgagaagacagagagacgatataagtggtattatattttaaagacaccatattttcta

SEQ ID NO: 51943 - DNA, 816 bp, Homo sapiens
cctaaaccgtagtacaatgtctagcaagtagttgaaattcaattcatatatactgagtaagaaactcttatatataatagatctctttgagactctgataaaactgaagaactctacaaaatggcgtacagacacacagttttgcatacaatttcactgggttcttgaatctcctaaatggtattcaggttagattccttggtgattcttcagttgtttctattgcattaatccacttattgaatgctatttttctgaaaagtgctagatcctgtagaggatactgaatgtaaaatattgtgctctaaaggaagttacattatacaatagagatatggtttaaaaaaaaatcctagagttactgcattatgtatgtggttttataatgatgtgcttgtatctgagaaactgaattgcttttgaccttgggagaacatccattttgggcagtattcgaatttataaaatagttttataatcataaaacttaatttatataatgccttacacattccatactctttataataatttaaggacttaatcttatcaaataggtcatttgtctaacaactcagtagtatatgaggaaattggggctcagcagtagggttttttctccctaaggttagtaatatgagtcatctgcagtggaattactgtgctcacttcagcaatttcagactccaatgtctgaggaaggattcatgtctgtttttttcattcatggccttgaacagtgtctgatataggttctcaacctatacactagatttccactgactgaaaaaaaataaaagcaagtattagcttaat

SEQ ID NO: 51944 - DNA, 1078 bp, Homo sapiens
ttaagaaaccttttagataactagggatgaaaactatgaatagatccagtgataagaaagagacattttaactaattcttactaaactatgagttttaagttgttgaatggttgccatatgcctgtcttttgtgtgtgtgtatgtgtgtgtgtacgtgtgtgtgtgtgtgcatgcgtgtgtgtggtttccctcatgttacagaggacagactgaggaacagagggtcaaggaatctaagttcatgttgcaagtaaagtagaggagctgggagttgaacttcacacttggatagcctctatcccaaatttatgctctgtatgacctgtctcacactaaagtaggtaaagctggtaaattttatacttatttcattactcaggagacatttaatcagtggttcaaggatatcagaagttagcatgttgtgattctcttgttctctcttgctcacaataggtctatcatagtttcagccatcacatttgtgttcttgtaaaaggaagaaagactcagcaaggagaaagatgtgacaccagtcatctactgataaatatttaacaataacgtcaggctactaggtggtggtgaacatatctgattgtagcaattgcctaatcccatggtgtaaatacttgaaccatgactaattttaagctatcaaactgatgtcactgaatggggtttgggaagaaatgtacaccataggttatcttggcaagcatggattggctctagagcatggcttggtggtgcctatatcaggaaagaaaaactatcctacaaatctccagcagaactttgctcatgtctcaatgacaagagtagtgtcacatcacctgctgtagctctaagaaattgtatgttttatttgagcacattgccacctcaaataaaattgtaaggaaatgcctattcattaaagaaccaacagcttctgcctttaatgggaacttccttaatttaatgcagcaaacatcatacttaatggcaactctttagagagatcttaaagtcagaaatatgacaagaagagtcactcatactgcttctattgagcattgtaccagaagtgttagc

SEQ ID NO: 51945 - DNA, 569 bp, Homo sapiens
atagtatatctactataaagaagctaataataactaccatttacaaaatctctgccaaatgttaggaagttcatacaagctctctcatttaattatctctccaatcctgaggggtattaaaaactcttattatatagttgaagttattgagagaaggtcttgcatttagtaagtcaccaagtagtcattgaaccttggttctcttttattctaaagtccacattcttttcactttgcctcactgtcctggcactagggggagaagaagccaaaaatatgacagtctggtggtgtcaggcaagtaaacacttcaccatatgtaatgcaacctgaaaaatattctaatgaaaaagtaagtccaaagtacagaaaatgctttatgtgctttggcagatgaggaggagagtattcttgctaggccagggagtgagggagatgtagagggtgctgtcatgatgttaagttcagaggaatgatatttaagctagtccttaaacaataggataaattcacaaagcagaaactgagaaactgaagccaacatttagagtcatttgtacatttgcctg

SEQ ID NO: 51946 - DNA, 1596 bp, Homo sapiens
tttaagtcttttacacatttgagaagggactgggagaggagcatgggggaagggggctggatgtggctggcatcttctaagatttatgaactgctaaatttagaaatgtcattttgttattgccagtgaactgctagcatcttcgtatgagtcactaagaaaaaatagcaatcacctcctttgcaagagctagtatgagtaacacaagatgggttcaattaatcattttaaccactaaattcactctggataaacaaagtgtgtatcagatgatgtgccctagaaaggttgtcatccttacaaaatgctatgctctgcagctatgctcttctcattatcgtattgcaaatagttctctgaaagaaaaaactgttcaaacaaaatattaaacagcattcatttgtcattttccttcggggactaggcagcaacctgctgtggctgaaaatatgtggtcattatgaagctggtattgaattgtttgtttatctttagcaggggagggaggtttcaatgatgttactatttgattggtaatttcaggcacttctgctttctaaaagcgtatcctctgtccagaattgatattaataaatgagtgtgtaaatatgctgtttgtatgtttctttttaatgttcatataattttcagtgtcataagctcttatcacctgaggagtgatggtgagttttattttcttgttagtgtatagggttttatatcacagtgagtcaggttgcttgctctttcagaaacctgaagcatttactataaatggagtgagtcaggatgtctaagatgccttgttcactgatgacagtatgactttcgcaagtagatcagagagagatttcagtgtctgcatgtggtgtgctatctctttcatctggtcacaggaagcagcaggcactttttttttttttaacgtagagaaacctaggttctgtttctcctctttttcctgattctccatcttttctttttttccttcccattttctttctctccatctttttcttgttcttattcttctctgcactggttaataatggattcaggggactaaaaagtgacatgagaaggtaataggctacacacatctactcaaatcccccagacagataagaacctagtccacttaaaagtaacttcagataccatccttatagaaatccatgccatcacttaacaacttttacaaaatcctttattctgctatttaaacctgcttccttttataatgtgcttagagagcacaagaaatttgtcaccattttctgaaacattccttactcagactgcaaaatcactctttcagcctatttaattggaagcagaattaaagcttcattagctttatctctaaactttttatcaatttatggcactcttcagagcctcctttgcagtttttcagatcctctttaagtcagagaatgtagaactgtacatgtgtctccaaaagatatttgcccagggcaagtcaatggtaaagttcaaaaatttttaaaaagccctattcatgttcttcaaactcttatggtcacatttgccaagcagaatatgtttagtaaaggtgaggatttgctagtacaa

SEQ ID NO: 51947 - DNA, 427 bp, Homo sapiens
tataagcatactaaggcctattatttggtaacagaaaagagacttagtgatacaaactacaatgtggatgaaccttgaaaacgttatccgaagtgaaagaagtcacacataaaaggccacatattgtatgattctattgacatgaaatgtccaagtgacacaaatccctagggatggaatgtagattattggttttcaggaaactgttgcaaaagaaaggtggaataactgctatttggcaggaggtttcatttttaggtgttgaaatttcttagaatttttagtagtaaaagttgcataactctgtgaatttactaaaaacactgaattgaataaagagataaattttatggcctgttaaatatatttcaacgcagctgttaaaaagttaggaaaaattactcaaaggaaattaagaaagctctct

SEQ ID NO: 51948 - DNA, 711 bp, Homo sapiens
gggaagaagggagaaagaaaataaattcagtgaattttatttcactgagtgtcaggagattttataaattattggggaaagatacttagacaaaatttaaactaaatgaattattaaataaacagatgccaagtggaaatgcataatttattgctgccacgcataagctagtttaaggatcccaaggctttttcttgtttgctcaactaaaatatttccacatacgaccttgtgtacaaccgaggaaaaagtgtagtacagtcatagtcaattaatcaatcacgtttcagtttagttcagcacatatttatacaatgtataaattttcttatgtgttttgaagggtacagaagtaattgaagacaccgagatttaaagaagaaaaatacttaagcatcaacatttgtttccagactcatccttcaccaaatattttagcatgtttgccttgcccagttaagagtattttggccacatttcccaactctaagtcctggaatgtttctgcccacttcttagccctgtaaacatttccttcaatacatgattccagggtgttttccccagctggtgaatagattcatttactgcatttcgtatatacacttcataaaaatgtattataaaacttatcatggaatgtggttgttattggtttaggtaaaagtgtcatccagtaaactgtgagttcctgggcctgagaaagatgtc

SEQ ID NO: 51949 - DNA, 1153 bp, Homo sapiens
aaataggtattactatgatctacattctgttgatatataaatttaaaaacagagacattaagcaagttgtctcaggtgaaacagccactgtcgtaaacataatggtatatcagatgcacagcccggcaataagtgaacatgttacccaacaccaggcaatttcaatctttgagatatatatatgtgtgtgtgtatatatatatatatatatacacacacacatatatcataaattttatgtatataataaaatgaaaataaacattttattatatttatgtatatatgtatatatttacatacatatgtatttttgtatatatttacatacttattatatgtacataaatatgtatataatgtatgtatatacatgtataatgtatataaatatgtatataacgtatgtatatacatgcataatgtatatgaatatgtatataagtataagcatgtatataagtgtatacatatacatatatgtatataatatgtatatatttgtatacataaatttatataaatacatatatatatttttccagtctactaaaatccattgagagccctttgaatgtgatacaaacatctaaaaactgtgttcaagataagcaggcatattaaagatgagtgccatattctctccaccatgataagttgttatactataaaataactgtgggcctttttagtattctactggaagaatctaaaacttaagggcaaataactacaaagattaaaatgctttttcccaattctgtcataaacttgtaattagatagcatcacttctctaagaatgataaaaaatagttatcacatatttaaaaagtaagatatatagtcaactaaaaagaaatctaaaatgaagagcaattaagtgtttcacccaaggttgtacataaaattaagggagtttaaataaacacaggtgttttgcctgaaatcctttttttctatgctgctgtgtgtgtgtgtgtgtgtgtgtgtgtgtgctatttaacttagattgtgcaatgagacagaacactatgagaactaaattagccttaccctctcaaagtcaacattatcctttctgttccttgcctatttcagccctgaaagaagcctgaaaaacaaggtttttctaaaattgattaatttgtgaa

SEQ ID NO: 51950 - DNA, 633 bp, Homo sapiens
tatctgaaaaatgtctagtgccctctgtagattttttaagattaagaaaccaaaggaggcagaaatagccaaattaggactgtaaggtagctgtctaatgacttcccataaaaactctcacaaaatcgcccttaattaatgagaggactgaccaggagaattgtcctggtggagtctttggtgaagccttcccaggcatttttctactaaatctttggctaactttctcaaaacactctcataataagcagatgttatcattctttggccttccataaagtcaacaaccagaatgccttgagcatgccaataactagtatcatgacctttgctcttgactggtacacttttgctttgactagaccatgccatctcttagtagtcattgctttgatcatgttttgtcttcaggatcatactggtaaagccatattatatctcctattatgattatttgaagagatgcttcaggatcttgatcccacttgaaatctccattgagagctccactcttgtctgctgattttggagcaatggttttggcaccatagagtagaaaggttgctcaactttaatttttcagtcagaattgtataagctgaacccgttgagatgtctttggtgttggctatc

SEQ ID NO: 51951 - DNA, 1735 bp, Homo sapiens
gaactttgacattgactgtcacagctaattatggctagaatctgtaagcggagcgtatttttaatagggtggggtgtttggataattcaagttatgaaggcatcagtgtgtggtctccagcaactgatttggaaaaatagaggtgtggcttgtatctaagcaggcacagctgaggcaaagttttaattagagagaaaagaaagtttttatgtagacaggctttttaagcattgggaaagaataatttttattccttttttgtttctctgtgtgatttgcaaacaaggaagtcaggactgcaaaggcagttgagacctacctttactatagagcactaagactctagtttcaaactgttagttgcagactgagatgtaaagtaccatatcagctgtcccaaagtccctcttgctgagacaaaggagaataagatatgggcaagagtgaattttagactttaatttatttggtcttttaatgcaaaaattcaataaaatttgatttgggactttgaagacttggtctgcaatttctaagggcttaaacttgtaacatactctgtgaactttaatatctctttggaaaattcataataagaatgaatttatataacaattatgagtacctctaaattgtaggccttaaataattggtataacttaatgctgtcataaattcattacgtaaaacctatgttgagctattgtggactacatgtctggaaattttgcaacgataatcaaagagggagtgaactttcagccctgaatatagtgaggcattgataagatttaatcaatatgttgttctaacctatttctgagatttctggagacaaaatgtgcaccaataagcaacagttcaaagacaattcagagggggacaattgttagagacacttcactcaaatagaagccggacttgcccaggcttaatatttcagataactggattaagacaaccaaaagcaaaagaaattcgtggaaaatgactcagggaagaaacatttaacccccatttcttcagtctccatgtggagtcaccttgctgaagcaatatatttgaatactttccaacttccttcttgtccttttataccagaggagtacgatacctcgttggtgaaagatggccattggtcaacctttctcagttcctaggatctgatctactaaaaagcaaaaacatcaataatttggtctcttttatttcctctctgcctgtggccaaagaaaaagtgacactggataaatccatctactctgcagaaccaaaacgtccttcaggtgggctatttgtatagctagactgggagaagaaaaggagagaggattcgtaacataatctgatccttatatctgagccacattcttcaaaataaacaaacaaaaattaagaaaatgtgtcagcagacatacagtaaaagaaataataaaggaaattcttcgggcagaagataaatgacctccagagaaaaacatggaaatttaggaataaataacaaatattagaaatgtaaactgcatgggatacaataaatttaaaatgtataatcaaaatacataacaacacaaatggtgggcaataagtggtagatgaagttaaagtgtgtcaaggtcctagcattatcaaggaagtggtcaaagcaatcattttcatttgactacaataaacaaagatacaatgtgtaattgccagattaaccagcaaagcaacaggagaaaaacaaaacaag

SEQ ID NO: 51952 - DNA, 2805 bp, Homo sapiens
atattacttaaattttttcttcaaatagatcaagcttagcatccatttgattccaataaaaggaatgccaattacataaagataaagacttaacaacacagattagtcaagggttttattcaaggctgaatggaagccttcggtcaagtcagaaaaaaagcctaggtctcttgacttttagctatgtgctaaaatgtactctgccttacctctaggtgacatctgttccagagtttttggatgcttgccatatagtagccatactacccacacttgaatatcagagcagcaacaaatacaactaggtagaaagtcaaagatattcaccacgtttggaaaagaatatgttgcttgtgtcaaaaactaaattaaaacggtaagcaaagagaacaaacagcacactgagaaaaggaatctcaataggggatttttatcttggtggggtgaggagggtggtggaggtggagattgcacacatgaaaaagaaaaaaaaatccactggtgtaatttaccttgcaaatacagtataagtcagtcacctctccattctgatgtctttacttactatccccatcccatccagactcaacagaatagtttagttacaactaaagaagccaatagattcatggcatgttctagtagaaaacatacaaaatgagaaatggagagaaacctaggctgttttcccaaaaatatttatggaaaccacactacaatgttcctgaagaaacaaaaagaagaagaaaaggaagattactgtgaggtgaaaggaatcaggacaaagatgaaagaaaaataagcatagaaaagaaaggcctttcacaggatttgtactgcacatgtgcacttattttattcagaagaatgttgctacagaacccagcaggggtaaactattatttatctctggttattagccaagtctaaattgtgtaacaaaaataacaaaagattttctttatatctaattagacataaaggctagaacaatgttcttgtgaaaggatgcttttaagatgcttttttggaattgaaatagtaacaacatttgttttgtgtggtaaacagaagccttttggcagtgcagttgctttcattttgaaactgccaagaattatttgcttatctgtggaatttcaactactttccctgcctgtgagtcatattgatgctgatctagaataaacaggactgcacagaacactgggtcttactgtggtctttgggcaatttcctcccacccttgcccaacacacaggggcaggcattcacagtacgccactaggagagggtaaaagaagtggaaaagagagaagataatgcaaagggagagaaagaagagacacacaaaagcatgataaaaaaagaaaattcaacaagggagggaaggacatgagagaaaaggaagagaaatgtcagagaggatgacagaagtcctagagacataaagaagcagaaaagaaaagtgtcaaaaaaccaaaataataaaaagaaaaaagaaggtggaaaagggagaaatgtgagagggttaggtagatagagcaagaattcagaaagtacagggaataacagtgaaaaagtgggaagaagcttggaaagacttcatggagcaggaatagcctaatataatttggaagggactgcagagttgtctaaataataatgctatttgacagtttgatatgtatttatagctgattccagctttctctgaatattatataggattatccagattttctggggtttatcaccacaggcatgtaggattaacagcctgatgaagtgaacaattatttttcaatctgatccttaggcttgtagagcacttttcccaagttccctgaacatagtacataaaatgcaataaccaatggaaaactgtgtgcatgtgtgtacatgtgatgagtgtgtacacatttatctatcaacatctaaaattcttcgatctgggcttaaaatctacaaaagtactaggttcagaaaaatgccttaaagtagcaagtgttattgttcacctatgatgtgtcagacaaagggaattaagtgggaaaaaaaataggagacagagtccctgtctcatagtgctcagagtccagaatgtagggtatgtggtaagtggtatgtcagagatagtgcagagctacaggaagcatgtaaccagagacccagcttagtacaagtgggaatatctgtttgaaaacttaaaaatgattgaaaactaaccaggtaaaaatggaaaggggttagggatgttgcaaggaaacaggaggatgttcaaggcagaacagagcaaaggaatgatctctttgctttacagtacgtctttttctatgtctgtgatcacaaaatataatgacagtgttgagacagaatgttgtgctggaaggagagacacatcatgaaaagacttgcagatctgctatggatctagggttttataatcagggcaattcaaacattgtctgggagagggcaggcttgagaaaggaaaaagaaaaaaaaagaaagaaaagttgttcagtaagggattaccaatacaacattttatcttctaaatactactctttgaaaagtagatgagaagtggaaaagactggtgtcaagaaatccagttaaggagctcttataataacacatacagtagaagaaccaaggtagtggcagtgaggtgagagcgaggaatttggattcctgaaatactaatttgcagaatcaatgggatttggtgattgctacatttggagaagtaaggaatcaaaaagtgaatagcaagtcaagaagttataggaatttcaaatt

SEQ ID NO: 51953 - DNA, 924 bp, Homo sapiens
acacaataaaactcacacatatttttgaaatagcaccaagctaagggcataccataactccaagcactatgtagaggagcccatctactcaagtagtcatttaaaattagtatatgaaactcaaccctgccgtcatttattattgaaattgccttaaggtgatctcaaaaaaaaaaaacttcatcttttgatttacctcctcctcccttttctaaaagtagcaaatgaaatttgtgggattagcctcttaggagcaaatcgacagagacaaaatgtaaccatgagctaattcttggcagggcccagaagggacgtgccaagaggacatgggtggatcatgggagaattgattggaaagattctgtgttcccagaagagagcaggcttcagtggtttctctcaagttttattgcacgttagcacagccatatgctctgctcatgtgagcagcacctggggggagtacattggcttcagactcaagtggagacttgggaagtttgtttagtaaatgagacctgcgataactgcagaagcggcccctgtcctccacttatacataatgtatttcttcacccagtctatgagagttaggtttttttttttttccattccatgtccaccaagagaagaaaaaaaaaacctttctgttactataaaatacacagaataaaaagtctatcttggtgtaagaggatagtgagtggctgaagggagaggaagaaatcaatatgtcttatcaaacccacatcatattgtatataccaaagtcattagacccagagcctacttcttaggaataaatattttgccctaggattaaatccctttatgccacagaagttgaatttctttcagccaaccagaaaaaccacaacaaacaaaactcaatatagcatcaatagagtggaaaatgcaggaagc

SEQ ID NO: 51954 - DNA, 729 bp, Homo sapiens
ctatcatctgtctctaattcatcagtcttgtgtcgaagacaaactgtgagaaaagactagatctccaggaacaaccaaaaggaaagattttgtgtgaggtccttcctgtaacaaccagctaaatctgtgaacttgtattcaggaatgaacaataacacagagcgccaaacgcggttactgctgatggaggatatgacagacaaatcttaaccttacctctatcccattctttttccacaatctctcctttgcctgtaagacagcaaatatctctaacagcagcatcaagcataataatcctctgagatctgctcccacagctactttttctccacctaaactttgacacaggttgccgtttgcaaacagtttgtactttacctatcacggtaatgattaacttcagcggtctcttgtgtctgagtaaagtatggtccgtggaacagcagtattgccttcacctgggaacgtactagaactgcagaaactcaggctgaattagaatttgaattttagcaagatctcagggtaatttttatgcacattaaagtttgcaaagtgctttaagaaaacctggagggtgacaccatttatcgccctacaaattgctatgagtgccaccacttcttgtggtatactgaagaaagcaggggttttggagtagcttttcctaggattgagaccactgctcatcacttagcagctgtaggtcattgggcaaattaccta

SEQ ID NO: 51955 - DNA, 592 bp, Homo sapiens
agatacaaagatgtttaagatacacccacaaagaactgaacaagacagggcaccaaagccactcagctgactgtcatcttgaaattatggattctgtgtcctaatttatcaccctcattctgttctagcctttctgatgcttggcattaattttccttttctgagcactgaccccacctctcctattctattcctccactgttgaaccggaacaaaggtcacttgaaagcgaagcaaaactcagctgttaccaaaggcgcaaagatcaaagttggcagctacgctaaagttcaggattcagagacttcctctttaagatcaaaattccagatgatccaaatataggcaaatgagccccagtagaacactcagctttctgtgctgaatccaggaaagaagcagaaatcaccatagaagcaactcagtttcactctttgcaaccccgtgggctctatgctaattgcctaccccaagagtgagatcgcatttcaaaatatggtcaaacgcaaaacagccaagtcaatcaagcattaagtattcaagcacaattatccgaacacatgcccaaggaccagcagtgaagcagcttaat

SEQ ID NO: 51956 - DNA, 600 bp, Homo sapiens
tataactattttattataagttatttttatcttcaaggtaaatgtttcagtttttttctttttgggaaattatatagagtcttatctttttccccactattataaaataaggctttaaaaaatgcttttatatttcttctagtacatgagcgatagtgtattttttggcctttcatgtgaataagtctgacacggacaagtactggaacaaagcattcccagttctctccgtgaaaaatctgctgacacctgaactggcttcaattggaatttgttcttggctgatctttacatgacctttgaaatcctggcatccgacctgcctcgggcttgggctccatggctctaagcctggctgcttcagggactctgtcctcccaatctagtatttgctggacctctctgcctgtcttaaccctctgaagccaagatataagaagctagtatttctttgaacctctttgttagtcttaatcctctgaaggccaaaatatgtgaagcaaaaaaaaaaaaaaaaaaaaacacctctttctagtggctgtctgtcccaatatatgtaccagtgctgaaagatgtgctcattgatggggaacaatggga

SEQ ID NO: 51957 - DNA, 2228 bp, Homo sapiens
aacatgatagtttactaaggacaactaaaaccagatttaaattagtatattcataaaggtatctttttaaaaatataaaaatgtaacacacttcaaataatactcgccgcaacctttcagataatttttaatgcaccagatttatttaccatttcaaaagatcacgatataggcagataccttaaaaattctctgggggcaaacaaatcagtatatattagatgtacagggactgcagccaagacaggcatgagttcctaggttataaatatcatctttataaaaagtgggtattttataggacatccaagtaacaccgacttataaaagcaaacactgtacttaaaatgttggccacatatgaaagaatagctgaaggctttaggggattgaagaatggataaactcaaccaactaaaaacacattactcatccctcagaaccaaaatacaggaaaaaaaaaaatacaacaggttcgcacaacatccagaaaagttcagggaatatgaagtgtttcttggcacccagttctcgctgttttaaaatccgtcccttcgttgttggctaggcctctctccagggaaactagccggggcaagaggcaggggaactgtacatgtgggaggtcctgagggcccttgcacccactcgacctccaccaagcggatggccaagcgccacccggaagtgtccactggtgggggcgggaaggcaccgtagtccaaggtatccgcgggcagggagcgggccagggcgtgcgcgaggtcgggggtagctgggaacggaggaggaggggcccgctcgaggctccgcctctcaccggctgcggcctcggctacagccagggcccagagggctccgagtcccgggagcggaggccggagtcgggttcctgtagaggctgctcctccttgtccccgctcggacgtggtccccgctgctcgaggtgcagctgcagcagggcccggcggtacatggcttccagcttctcaagtcgggccctcagggccctggggctgcccggctcgtcctctcggccgctgtctctagccctccggttcgtgctggcctcttcagggacccggcgtgcctccgcgggcgtcccgttgccgccttcgccggggagccgcaaagcctgacggaagaggctgcggttctcgcgcttcagccgccggttctcgagccgcagccgggcgttctcctgacgcagccgcgcgttctgccggtcccactcgtcccgcgcacggatggcctccaagtggctcgccgccaggtcggcaaaccgctcctccagctgctgtcgggcgccgtccgcgcggcctcgccagcccacgccgccgccgccgccgctggggctgcccccaccacgagcccggccggagcggcctggccctcggccgtccgcagcaccgtccccgccgcagcaactcccgcgcctagtggcgccaccacgcatgcgccacatcggtcccatcccaaccgcgccgccagccccgtgggctgaggggccgcgcggccaggcgcgggcaagttcggggctggcagggcggccggggtgacgacggaggaggagaggaggtcgcgggcggcggctgctggcttagagccaaaggaggccgggaatttgcccagactgaggcgtgtcctgtctcctgtggtggagctgccccctgggcctgctctctccaggctgcgctgacacacagttcccccggggagtgctttgctgttcagccctccggctgcgcgggaaaaagcgtgtatcctcagctgagttgtgccagggcgcttccgtgcaggcctgggcactgcaggaactagccgtcctcgcccgctccggagtgcaaccaccagtggttactttgctctttacacggcattctcaaaactaatgataatagaatgatcggttctgagacaaagctatggggcaagttgaaaagctctaagtgcttcatttaaaacccagtggtttaacccacccctatgtttaataaaacattaaacagaattgggctgagtacctgtcatggggtttcccggtggaaacacctggctctccaaagaatgcagtcaattcccaatttgtgaacagccaggaattcactctgtaaattgttcagaacgctatagaaactaggtcatacttagttgatttgttcaggccaacccccaaaagctatgaaacaagaagtgctctgtttattgaagaaactgaatacttagtt

SEQ ID NO: 51958 - DNA, 1019 bp, Homo sapiens
agagaagttattaacaaccaatttaggacactgtgaacattagtgaatttatttttcaaatgaaatgaacaattaataaaacaaatcagttaagtgattaagagaaacttcaattttttaaaaaggtgatagagaaagagtagaaaaaaggaaaaatacctgctaatcatctaacccagtgcttgagcagcaggatgaggcagtaaattgactgatggaaaaatgacaatagatacagtttaaaagttaggtttctgtaatagaaagaataacttttttttttttttttttttaacgcagatgcagctacaaaaacagataacaatgcttcccaagtccctcaaagttccccacagggaaaccgttgccaagcataacacctgattgaaatgaagaccccatctggggcttctgacaaactcatgccctgccattctaaggaaaagttctatagattctggaaaggtgcctatctgcttcctatttaaaagtaactataccaagatttgcttcaaagtaatcagattagaaaaactgggaggaggttgtttaaaataatatggaagggacacagtgagtgataaatatgcaagggttcatcctactgctgtcttttttgtaggttaaaatttctctacgtagagttaagcaaataagtaactggtacataacaatcgatgcattccagagtggttatctaagttgtctgaatcacaggtcaatttcctaagtgggtaattcccaagacgcctagatctcaggggtgtgtatatagacacatacacacacacacacacacgtataaatacacacatatatacgtgtgtgtgtgtgtgtgtgtgtgtatacatatatttttttttctgagaaggagtcttgctctgttgcccaggctggagtaatgcaatggcgcgatctcggctcactgcaacctctgcctccccggttcaggtgatccccctgcctcagtctcccaagtagacgggaatataggcatgcgccatcacacccagctaatt

SEQ ID NO: 51959 - DNA, 2392 bp, Homo sapiens
taataaggaaaataaaaattaaaacaaactattaatttgacccactagtctggcaatttttttaaaaaatgccatcaaaatgtcatcaaaagctagttaagaatctcagaaataggtattcttatatatatactgtttggactataaatctgtaaagtctcatttggaaagcatttggtggcattcataagtttttaatagcataaactttgacccaggaatttcagttctcacactctctcccaacataactcttgtaggagatatatacataaaggtgtttgtattgtagtcacaacaatacaaaaaaacctgcacacccaaatatcagaaaaatataatacaataccaggcagtcagtaaaaataacaaaccacgtatataaagaagcctatcacaacaatgcaggtattcaacagcgggaataacacaatacagcttaagtgtaggaacttaaaaacacgtatctcacgaggagtgattaaaagaggccgcgtatcaaaatactaatggaggggcaagaaaagggacttgacgctttccctttatttcctcattgaatgaatttaaagtacctattcattcatttgttttcaaacaaattatgaacttttttaaaacggcgttctcttggcagactggtggcgtataaagaacatggcttttgtagtcagatatttggattcaaacctaggagctattaacaaactctgtgaccgtgggtaaagtttaacttctttgggcctcaattttcttatctctaatgcggagttaaccatatctacgaaaaggtgaagacgaagggagaagtgtttggctcgcaagggaaatgaaggctagcttccaactcgtattcttccggcagagtgaaaccataggagtggaaggagccaagagtttaaaaaataaattaaaaaaaaagtgatcaggaaatccagaaacttgaagttcaagattcaagacacggatgggagtgtggggctcaccaggacttaggtaggaacatgaacctcaaggacggacgaccttgagattgccgcgctagcagtgagctccagcctgcgccccatccctctggaagcccgacttcttccgaaaaagcagcagctccaggaagcggccagaggggcgcgcacgcacctgctgcaaggagcccgagacgctggaagagtcggtactcctccgcttccggcgctcgctgcgctccacgctgctcccgccccaacagctgccgccgctcccaccgccggtgacacttccactaaaattggcgttcccacagcagctgacgctcccgcagcccccggcgctcccgcagccgctagtgcttccactgctgccgctggccaacgcgggtacgatgtccggggccgcgagcgctgcggccgcctcctgactgctacgtttgcgccgtttctcccgggaggactttttccccgtcatgatccctctgctgcaaccatcggaggaaagtccgctgtctctggtgcgaccgaagcccgactcctgcggccgtgggcggcaggcactggcgtcgcaggttatgcgtcacttccggccgtggcacagaacgtggtgaagcgttatgggccggggtggcaggggggttgccataaccagttgcgcttccccctccggtcgcggaggtcgatttgagtgtgtagcgggtagcctgtctagtcagagtttgttttgttttgtttttatatctctacaaaggatagaaggtggaacttacgtccttttaacttcaaaactttttattgttagtgttttgtctgtttacaataaggttgaagtatagttgctgattctccatttccgtttacctccaaatcttaagatattaacaacgctatgacaataaagagaatagggaaaagttgttccatctcattttcctcatcacctgggcaaattaggtatttcttgcgtagagtctgacatggacaagtagagcttgagttcgtttttgaaaattgagaatgggtcaaagctttatgagattttatgggtggatgtaatctaaatagaaggcagattttaagacaagggagctagaacacttaaaacgtgaaccaaggtctttgtcgtttcagcaggggcctttagccactgagggaaaaaggtagagcctggggcaaagctagctgggtggtagtaattctgtgcctttccctggggtaagaagcaattaaagaagcttcccttctctttgtctcctatttgtctcagtcattcaacaactacttaaatgcctaaaaccagcctagggttaataaatagggacacttccagccctaggaaaactgtcttcccccaggccccactcttaaattggccttgtaaggtaaatcctggggctgagcccactgtgttcccaggagttccg

SEQ ID NO: 51960 - DNA, 2458 bp, Homo sapiens
ggatggtgactcaaattctaaaatctctagcagtgggagacctactaaataacaaaataactaacctcaatttttctttctctgaactgcaatctgtcttctaggtcttaaatatcctgttacaaccagccaaatcagggctgaacccgtgaactcgatcaggactgattcctaacctttttcttctttttttttttggttcgtgaacccttctgataaatcctttgaaggcaatggatgctgcttctcctcaagaaacagcacatgcacagaaacaaaacatccgagaggtttcactccctcaggaccagcacagaccacagactaaaattctaacctggacgaaaagaggattcaccagtgcaatttttgagaactaaagtcttcaaaaattaaattttacagaagactacagagcatcttcttcgaaaaaaaaaaaaaaagaggacatttcagatgccttcaaactacctcacttcggagggtgcaactgcaatcagtaaattttcaagtctaaaagaaacttgggagatcatcgtccaaaaactgaaggcccaaaaggtaggagactcgtctgtggtcaagttagcacaacaaggcaggtctttggtcccccaaccctgtgctctttccacttaaatcccgatggtttcttacagagttctaatagtctgagaattggaagggagcggagagcagagggaaggctggggggagagagagacggcaggactgacagggaagggtcactctccttccactctccgggaagcgtgcaacacagccggggcaacccgactcccagcgctcacctgtctggggcccagaggcgggtggtgcggtctcgggacacggacacaaaggctcccggcggataggcgcagcacaccaggccccgtacgtccagctcgtggccccggagcgagcagctcagccggtacctggttgcgccgctcgtcatggccagtgtctgtctggcgcccggtgcccaggcactgtgcgagaccagtccgcaggggcgactcggagagcgccgggccgcggcgggagaagagcctgcaggtaaggggcggccggagaccggaagagcccgagagccggtacggaagggcggctgggaaggggcgcgccgagcgggccgagtgacacagcaagcctgacaggcactccggaattcatcatcggcctcagccctccatgacgcagagtgtgtgcgtcccaaccgccgacgccgatgcggagctgagctggctttcctccagggctctggactccctgctgagcaagagagaaagaggcccgcccttccaccaggacgcctgaccctggggtccttcccaaacccgggtctcttccgactccgggcccaacagtttgtggtaaatcgggaagcgggccgggactacaattcccataatgccgcgccagctggcgtggacatccggcgcgccgaatccggatattttaaacctgagtctttcgcgctgggcatggcggaatggctgagtgaggttgtttggtgtctactgttaggtcatcctcactgcttttccctgagaatctcgaggtttttgcaagttaaccttgtttttcaattaaaacgagaaagcttgaggccaaattgggaactattaatcattgaactattcctccgtttcaagttatctgaatctcctactctctgttgtcaaatttagcaaatacggtggtccaagtcaattttttaaaggtataactacttttctctggcggcttgttaaaatgtagattctgattcagtaggtctgagttagagctgagatacgtatttttaacaaccccgccgcccacccacccgtggtgctacttgctagtcattatcagaccttattgagtgccagggtaaacatgacctgtctccttactttgttttcttcccatccgctattctctcgcatccaactacacttttccacaaacctttctaaattgctaagcccaattcacacttttctgacttctcccttcctaaaactcctactctaggtttggaatcacttttcccctggtttgggagatcattcttgaaatgctgacttttgatacttctttgctatcatatcccctccctgggtggattatttactacttggcttatttctagagctgtattcccatattgtcttctccaaactctagatctgtatttctagctatctgttagaaatctgtaccaattagtcctacttaaattatttcaacatttctctggcctttctaccccttctctccagccaatcctacacattaaaatataattatctttctgaaatatacacttaattgttttttctctgtttgacaacctgtgatggctttccattattttttttttttttttttttttttttttttttttttttttgagacggagtgtcgctctgctgccaggctgagtgcagtggcgcgatctcggctc

SEQ ID NO: 51961 - DNA, 2103 bp, Homo sapiens
ctgtcctgccaatttcaactgttaatatctgtcagggtccttaagtgcaaggaacagaaatcatctataaatgatataaaagctgaaaatgaatttattaaaggacattaagcagctcacagactctcccagaagctgaagaaacaagctagaggttctcctcccaataaagcctctgagtacctaacactgcagcttgcaacaacacactgatgctggacactggttgctggtgatagaacattgcagtctcggaaacgatgtagttactgcggctgtcacccttacttcaacagactctctgaagtcctgcttctggttgtcattcaagtttgagttgagtccaccaaattagattggagagtctagcaagcaataatactcatgtcccagtaataaggaagactaggaaagccagtatctgtcactttcagttcctgtaagggtgttggggggcagggtaagggagaaactctgccaaaaggatgacaaatggccactgcaaatagggtgagctcaaatgagataattacatgaaaatgtttcacaaactaagggagaattcagccacataacattatctcattttgtgttgtattgatttttaactcctcgaaggcaggcaagttggaaataatgtgtaaaataatgttaaaatcccaatacatatgcaatcacatttaagctgttatcaatgaagattggaaggaaacatacagtaaaagttattttattagagaagtgggatttaaggtgaagtagttcttaaattaaaaaaaaaaaaaaaaaggacactttccattgaattcacagtcttccccacaaacttggatccaaattctaatgaaaggaagcttaaagacgcaaagcttctggtgaaagcaggaacggaacagttggtgccagaatcgcatccatacttcatgatgcgttgtgtacgctatgccgtcctaataggaaggaaaactaccacaaattaggagtttagaaaattgcacaatgctgcctaccacttaacttcaaatgtaacctgttaacaacgttagccgacgtgaggttacctagggacatagcaaaactcgctagagttacttcaagtaaggcacacggaggttgctctgattatcaagaaaaccaaacgttcacataaaatgtttgtcttccagccgccccgctgttttccactttttccaaaaagcactgaagcgtggtgaagaaacaaacatatcctcaattctcgcgagagctccgtgtgtaaccaagggctgaggcggaggattggtcactcaggatgaggagcctccgctatcccgcccccgttgccgggatacgccgcggcgcacggcagttagtgggtaggcctgagagccgaggaaaactgagcgtgggcctcagaaagaagttaaggcacccgcgagccgggcaactgccctccttccgcgccggcggaggtgagaatccccgggtcccatctcttcctccctccctcccacgtctgttctcttgccttggagatgctgatccgctccaaacaaaacaaattcaaactcggtcttagctaactgttaccgtcgggcctgtagccaggccaggcatgtaccaattctagtcgagcgaaggttgcgaacagacctcctccaacagcccgacccctccccgaccccccgcaggagacccgccaagcacagagcagagggaaggaccgcgatgggctgaaggattttagtcaaagcaatacatttctgcctcttacagtggaagggacttatttctgtctgttgatcacagtgcgggcagttagcaactttccacttattcacctgtgtgagaatggttggcttagggaggataacgatagtaataataattagaagcagatgttttaaatgtaatacttatcgtcttcacaacagccctgcaaggtagatgtcacccttctgttttacagaagatgaaatcctgaggggttaattaaggtggcaagattatgcagccgctaactttgtcagcactagtttgtatcgctaatcattctggatccaaaggccaggctgcctctctgtgtgaataattggaaattgtgtgactctttgattgaataac

SEQ ID NO: 51962 - DNA, 1309 bp, Homo sapiens
gtttcctgcccaaggtcacaccccaaagtgttggaggagccgggctgtgagggctgcagatcttttctccttaccataggagcagaaggcaccaagtgagacctggtccaaagccattcagtccaaggcaggttctgaacaaaagcccccagtggttaatctcccaaataaaaactacacagtccaggaagcaccaggagagtgaaacagaccctcagatcttgaaaagattataagcactgaaagagttgcaaagctctcaaggcataaagtctaactatttctttggtctaaatatatcatatttggtttttcaaaatgtaaacttttcaatatagtacaaagtgtacctaggtaaatcttactgctattcgctcacctaaaaataaaacaaaacttgttcgttaaaagtgcttccattcagttatagaatattcaaacaaagtgtcattaagtatattgacacaacggttaaaacattaaccccagtgaaactcctgatgtgccagttcagcagaacccacccacgcctttctgggaaaagctggatcaacccctgtatcttgcaagttgtgtctaaatcctcacccaccacgaggtctatgggcccccactagcagtgcaactttagtgcatacccattctccaccaaatatgttttattttccctcttgggaccaatcacaaagttctggggaggggccaagtgcagaaaaagagataggattttttttttttttttttttttagacagaatctcactctgtcgccaggctggagtgcagtggcatgatcttggctcactgcaacctccgcctcagcctcccgagtagctgggactacagacgcccgccatgacacccagctaatttttgtatttttagtagagacaggttttcaccatgttggccaggatggtctcgatctcttgacctcgtgatccacccgcctcggcctcccaaagtgctgggatcacaggtgtgagccaccacgccccgccaagagataggaattccatactataagggctgaagccactgggcattttccaggttgaataaatgccttattcaactaactctcattaacgatgactctgggccaaatggtgggaggagtggaggtggtccagcttctggcccctccccacccccacccttgtaaatcacccttgttcttgctgtagtccagggctcttaagctattcaagctatttcaggatccatcccccacctgcccaccaccccctcatagttcctaacccctcataagagattagttaaaacttataaaagggaattgagacagc

SEQ ID NO: 51963 - DNA, 885 bp, Homo sapiens
ccccgctacccagaccccgtaccaccatcctatcctttctaccttgctgagtcccatttacccttctggtctcacctaaagtatcatttctaaggggctcctattagagactttgtgtatgtttggtaatatttgtatgtgagcttgtactttgtatattggcacactgcattttcctctgttaaacttttcacacttgtaattatttctttcacttgttcattcatcaacttatacaaagcactttcatgtgcctggcactatctaggcactgggttgcaacactgagtggaagagattcctacactcatggagcttccatcctctgtaggtcttactctactatttgcttttaagttcatgaggacaaggtcatgcacgttttgtttcccactgtgttccagtgtttcgcacattagctcactgtctggcatgtgtgaaacagtcaacaaatatttgctgactgtctgattggcctcccgaagttactactgtactgttgggtacatagtaagtaaatacaagttgaattagacaactgcttgcaggcaattgtgtccacagaaaatggcaatgcttcagacttgttatgatgatttgcattttatttgactttttagtaaggaattattgatcttcttatctctgttatgattaatataaatgaataaatatacatgacaaacaacttcagagtgaaaataatattaaggaaattaggcgggttatctaatagaaacagaagggatctaggtcacattatattggatggttagaggagtcctcccaaaggaaggagaaatttgagcggggatctgaatatgaagaaagagcagccagctatgcaaaaatccagggccaagctttccagacacaaggaacaga

SEQ ID NO: 51964 - DNA, 714 bp, Homo sapiens
atattatttccagatatttagactagctggaaaatattcatttttgtggcttaaagaaagacacgtgaattgaaaaaaacaatatctaagtcaggtgagggtagaagaatgggggatgggatgagaactacagataaagcttaagttatagctgaaataaaaaattaaggcaggtaaaaaatgtaagtatttttactttttaaagcatgagtgtatatcagctgatatgatgtcactctgaaccttgaacggatattgagataagtatttttactttataaagcatgggtgtatatcagctgatatgatatcactctgaaccttcagtggatactgggataaaggtcattgtcagttaccctttctttttctttgaaacagcgtatgtcaatcctttcttggaaaagtcttaaaggaaaaaggttcaaattcaaggaagttggatcctgtaactgacaacagacttgtttactcttagccactaagtgaacttgagtctcaaagtctgaaaaatttctagccctagcaccatgagaacttatgtatgacatctggaaccattgcaaaagatctttgcaggaaggtggagaacacaaaatgggcaagaagactggaaattcgaaaatacagtttgaattttcaaaagatcataagtttaagtttgacaggggataggtaaaattaacaccaagagcaggcaagattaagaggcac

SEQ ID NO: 51965 - DNA, 2094 bp, Homo sapiens
ttgttctctgggacgtggaagcaggaactgtgctctagccgtatctgtgttgcgtcgtctgagtcctctttttctacaatgaagaaaggggacttgggatttaaacttggagcggtactcaaagccagaactccacgttcattccggagtgaaccaccacactactatttccaggcaacgtcataaggcttcctcgttatttgcatcttcgttctctttttggcgactagcctgccctcccgcccttggaaacttgtggaccccagaatctcagctttccgcctaccaaaggtgccccgatcccctcccactgccctagcagcggcccagccccaacgcctttggctagagattgaaatcctctggaaccaaccactggacgctctggattggggcggaacgcgcttccactgtctcgaaagcagcaccttctcggatttgagcctttgcggcgcgcctgggctgagatctgagaaatgcgccctgggccacaggcagcagcggaggcggggaaggaacaactttccctccgccctctaaccacaagggcggggtggggcggcctcgctggggtcgggctcctccactttcccagctgggatcccctgccggagctggcgtgggggccggggagggggaccagaggggcttccttctctccccaagccccgccagatgttggaaaggcaaacaataggggaaacgcggagaaacaaaaggccattcgccacgatctcagtcggctgcgtagagagatctctgtggggagggttaggggagagggtcaggaaagagcgcgaggggggggatcccgagagatttagagtctctggtacttgccaggcaccaggggtcggcgctttaccctcccagcaggggtctgaaggtgggaaggggcaatcaaagaaaacttgaagggttttcaccttcttccccagttcagggaaagggaggggctgggattccagatgtttgacagttgttggccccaaagttaagcgcgatttgtacggcctttacacgctccccacctccgtgaggcatcgtcagccccgggggcgacctggctgacggtgcggacttcccctacgctgccccaagccgagactcctccctcaggatcaggacgcccaagcgttgtcccccagcccaggcgcacttttgtaaaagtttgtcttcccgccacccacagcccaacacgcaccctgcaggcgtccgcggctggggatgggctcggagtcttgcaccccgaaagaaggacgatcttattgatttatatcttttcaaatcaaggacaaatcaagatcccggggtggaaagtgggcgacccttgttcctgccgggaagtgcacacgaggagccggccagaaacccaggcgccggcaggggtctgaagaggactccagccccggaagcccgtggccggcgggcagaagaccggtccgccgcctcccgcaccttcttgcacccgcgcccaggtgcgccccaaacctcgccgcccgcccgggcgagatcgggagcgagcagccaccgggctgcgccgcctcccctagcttggagcgggttcttactcaccgtggggttttacctccagcccagggcccggtcggctcccttcgccgggtcagctgcagccagcgcgaaagaaaatggtgagctcggggcaggtggggcgtcgcttgccaatccacgcaagggactctgccgccggtgcgcgaggtcccggcgagccaaccggcggacgggcgagcgcctggctccagctgcagccgccgtcgctccggagcagccccctcatgcacccagcgcgccgcgcagccggccggggctcgactgtctcgcggggacgccgagcggggacccctggcggccgcctgcggtatggcagcaccgtggagagaaaagtcgtctttgggatcatcttccctccggaaagagatgggacatgaccagtctaagggggcttccagccttgcagaaaagacactgggccagggcagtgaagaaggtgtcagatcagaaaggatgatctctgggtccacaacggccacttccaaggcacctagagagggggaaacagtttgccttccccag

SEQ ID NO: 51966 - DNA, 673 bp, Homo sapiens
cttggatggtgggtattattaccttcattttggagattaggaaacttgcctaaggttcatacagagcttcttcggtgctctcaatcatgactgttcccttgcatccatcccctctgtaagaactgagattagcgtttagggagttatagctggtgcagtagacacctcagatgccctgtgtcacatctcttgacacatctctgatttcagtgcacttatgatgtggcctctttcccagatctcaagcacgcagcagtcattatttcactatctgccccgggacggtttccacagatgcaggagcttgctcagcctaggagaaagcacagtgtctgtgctgcagcgagggagggctaaagttctcatggacaaccaatggagcatgagagccaatgaataaatacttgaggtgagcaattacgggaggcattctttacatttcttagagagccaagcaaaatttagccccagttgcatgaaacggccaattgccaaattcatccttatattgacttttcctccttcgtgttgcaggctgactgatctctcattcccacttcctggaatcacctcccaaacaaactaactgcatactagtccttgtctcaggctctgatagtgtgggattccaaactggaaatgaagaccatcttgtgtactgactagtgaagga

SEQ ID NO: 51967 - DNA, 2681 bp, Homo sapiens
tgaaagtgataaacgctgcttgttcatgtttcattggccaaagagagtcatgtggtcatgcacaagtttcactgaaagggaaagggcaatctgccttgcagataagaaaggagaaaaaaagggggagattttgaaaatgattgtccgatttggacaatcatttaacctaagcttcagtgttctcatcatgtactgaggggatatccactttacaaggttattatgagggttaaatgtgaaactgtaaagtacctggcacacagccattactcaataaatgctgctattttgacagtgatcctttgtttacctgaaatataatattaagatttactccaatctttcctacatctctgggagtaaaaaactcttgaatctttttctggaggttgcattttctagtctttaaaaatgagtccagtgccttttccctgaatttctccaaattctgaccattctaagatatgggttctagctcagtgctcctcacacagaaaggttctagtaaggaatgagaaaatactttctgctttaaagaagagctacgcaaatattaaatgagaataattatatctattatttatggcgaatattattctagtactcagaaaaactcagcataagttcattagaacagtatgggccacattagaaagaacatattatcattatgtttgaaaagctaggactgggtacaaagttactacgatcgtatgggcttagttggccaagtatgttattacagtttcaatggaaccatcatcttgtcaacagaacacacagtgaaacctgcagggccttcctctggcttcatgacagtgagtagactctcgctttccctagggaaggcaggggcctggtagggtctgagcaagagcctgaggcatagactgtgcccaccctccccttctccctccactcatgccagtttttggtttagaaagccagcattttgaatatcaagtctcaagactttctcattgtcctcagggtgggttgctgccccccacaccctccttgttcccatatgaaggtcattgacccctagttttgtaaggtgtttattcttgcagaatttggaccagggactttctgttcagcaaatgattcagtgcatgtagaccctgaggttgtttacattttcaggaactgctattgcgaaactaaaaaggtttattttacgtagtggggttgcttttgccagatgaattcatttgctcaagttatttttaaaatgtgctttcccttagctccttagagaagctctggtctcttgcctgtgtgggtctaggccagaaaaaaaaaaaatgttgaggctattaatggaagccagagaaaatgtctggccaaggtggatcaaagaaggttctcagttttgaccccaaattttaactttctgaatgccgggctagcatactagctggtcctggctccagcagcttaaatgactcatgtgcctagaaccaggaagaccatgcatatgagtttcaaactgctcctacaggtatgtgtggaagggggacccctatgacagaatattcatccagaagaaacttgccctgctgccaattggaagtgccacagtccagcagcagtgagactgctggaagcagtcagattgcagagcacaaactctctaactcatcggggtcaagtggcctgaaatgattcatcaggctgctttgcaaacattttatttaacaattgatatttagaaataattttttatgacagtttcttatcttttgggggaatcagagacccctttgagaatctgaggaaggctatggagaaatatctgatgaagcctgtgggaaaaaaaactgccatccagaaaaatgtatatatgcaagctgtcccttaaaatgttagtggtatcattgggatgacatccaaaaattgtcagggaagtccgtaaatccccttgcttcagaatttggggaaactttaaacctcagattaatggtatgtagatactattcattcattcagagcttactgacttcctgtgtcatggcaagcactatgttggaagctggaaatacaatgatgtataagacaaggacacagccttgtggagctcacagtctaatgggagacaaaacaaacccataataatgatgcatgataatgagttaagtgctatgctagaactgtaagtgtagaagcaaacaagagccccaagtagggtaatcaattcaatatatatttaataaatgcattacgtgccaggcagttgggaataagctggtgcatagacaagatccctatcccatggagccttaagtctggaatactctcaactaaaagttagaggaggggcctggaagaacatgatgcccacctaaggtgaatcctaagtaaagttcacccaggtgaagtgggtaagcgtattgcaggtagtgggagcaacacgcacacaggcccagtaacagcaaggtgagtcaggggaaactacaaatagttcatcagggctctccatgaaggcaggagcagtgagagacaagggtggagaggtgtgctgggggcagatccccaaggctcctgtgcttcaccatggattgtgggttgaaggttgtcaatgagggctttttttttttgagacggagtctcactctgtcgcccaggctggagtgcagtggcgcaatctcggctcactgcaagctctgcctcccgggttc

SEQ ID NO: 51968 - DNA, 745 bp, Homo sapiens
caaattaaacattatgatgttgtttaaaagattctcctgattttaagagtttcataatgtgagaaaaaaggaagtaagcctgcaaacatagtaaaaaattattcttttaaaagatattatttttccttactattgggcaaaagccttttaaaactggtaatgcttaatggactttcaggttagtatcaaactggaacacaggaaggagaattcaatgtgttctttagatacatcaaaactatactgaaatgtaaatagcattatatattcaactacaggatttaggaaaacaataatttctgtaagattaaaaggaattctcttgggaaccattccattcaacctcctcattttatgaacctgggaacttggcaaagaggttaaagagaccaaaggctacatgaccaacagcttatgaaactattactttgaactgttatacttacacatagtagtaagcaaaagacagaattgtgcaatgaaagggaaacaaaaggtattagagtcaaaggctcccaagaagaatccagggtctaaaagtttctttatttgtctaagctttagcttttcatctataatgtggagctaccatttcgtaccttccacagttaatatgaagatgacaggtatcagaccagatgtatttgtatctaatagggtaaatgcaaaataaataacatttattgtttgatgttcactgcatataattaaaaaaataagatttatatgtaccagaaaataagct

SEQ ID NO: 51969 - DNA, 2703 bp, Homo sapiens
agactggaaggtgaagttcatatcactatctggccatttctcacagttccaagtttctcagacaataggtaggctaacctagtcctcctgggaactatctaattaacgtagaatagaacccgagggcagacttgaaaaacagaagtcctccttggtttactttgtttctctgaaagcaaattgtggagtgccaacatagccaaacaaaatattttatcaacttcataaggtgcttgtaattttttcctggagcaggtaaatgctggcttagtgaacaatctggaatgtggtaattactctcgttcttgtttcagatgtactatcagcatgtagcagtttccaactgattcagggttttcctaaagtggcaggccttggcagaggtggtgacaacaatgcccgtgtcaaatgacaccgtatttcaagtattctgactccaggttattaatatcccctatatgatagtcttgtttctgtgatattcacagattatgttaaaagtttcccaaagtctgagaaaaatcatatcttaacagtatcttttttttttttgatcctttgtacaaaagtagaagtaatgccagacagattacgtacccttgttgtgaacaactggtgcatggcaactgtttgaatagaaatttaccaactgccacaaccaggcaactactctcccagagcctaacaatctcgattgcatctgaaagggccacccctcctgggaaagtgcaggacctccctcctgtttctgaatacaaagcctggtggtgttcaacgcggccagatagacccaatgagcacacggacatgtaatctgtgcacttctttagacaactgattaccatcagtcaagtgatgcccaagtcacaatagtcacttcctttaagcaagtctgtgtcatctcggagctgtgaagcaaccaggtcatgtcccacagaatggggagcacaccgacttgcattgctgccctcatatgcaagtcatcaccactctctagaagcttgggctgaaattgtgcaggcgtctccacacccccatctcatcccgcatgatctcctcgccggcagggaccgtctcgggttcctagcgaaccccgacttggtccgcagaagccgcgcgccgcccaccctccggccttcccccaggcgaggcctctcagtacccgaggctcccttttctcgagcccgcagcggcagcgctcccagcgggtccccgggaaggagacagctcgggtactgagggcgggaaagcaaggaagaggccagatccccatcccttgtccctgcgccgccgccgccgccgccgccgccgggaagcccggggcccggatgcaggcaattccaccagtcgctagaggcgaaagcccgacacccagcttcggtcagagaaatgagagggaaagtaaaaatgcgtcgagctctgaggagagcccccgcttctacccgcgcctcttcccggcagccgaaccccaaacagccacccgccaggatgccgcctcctcactcacccactcgccaccgcctgcgcctccgccgccgcgggcgcaggcaccgcaaccgcagccccgccccgggcccgcccccgggcccgccccgaccacgccccggccccggccccggcccctagcgcgcgactcctgagttccagagcttgctacaggctgcggttgtttccctccttgttttcttctggttaatctttatcaggtcttttcttgttcaccctcagcgagtactgtgagagcaagtagtggggagagagggtgggaaaaacaaaaacacacacctcctaaacccacacctgctcttgctagaccccgcccccaaaagagaagcaaccgggcagcagggacggctgacacaccaagcgtcatcttttacgtgggcggaacttgtcgctgtttgacgcacctctctttcctagcgggacaccgtaggttacgtctgtctgttttctatgtgcgatgacgttttctcacgaggctagcgaaatggggcggggcaacttgtcctgttcttttatcttaagacccgctctggaggagcgttggcgcaatagcgtgtgcgaaccttaataggggaggctgctggatctggagaaagtgaagacgatttcgtggttttgaatggttttgtttgtgcttggtaggcagtgggcgctcaacacataattggtggatgaaattttgtttttaccgtaagacactgttaagtgcattcaaaactccactgcaaaccctggtaggggacagctccggcactgcgggcgggaatcccacggtcccctgcaaagtcatcgcaattttgcctttacatgtaagaattctctcaagcatgattttcacactggggaatgtcatttttgctagttgcaatatgtggatgagttgtttttttttaacttttgaaaaacgtaccattctgtttgatgtgtaaaaaacacaaagatttttgaaaccttgcgtcttttggtctgcaggtgtatagattccacttactacagatgagtagcatttacaccactcagatgtgtaaaaaaacaaaggttttttaaactgtgtgccttttgatctgcaagtgtgagatggcacttactacagtgagtagcatttaatctttttcatcactaaaaatcacacagaacgttttaatcattcaccgaggaagaaagggaggaataaatacacaaaatggctctcaacgt

SEQ ID NO: 51970 - DNA, 648 bp, Homo sapiens
ttctttgagagaaactgggttatacacacagacataacccgggggatttgtccagggtaaaatagccaaactaatattaagagaagaaaatcttctcacagttgaaagataaatagaacaaagagaaagaagtcgaagagcctagccttctgtagggaagtctaggcctccctgcagggaacccaattagttctctctcacttgggttgctagttcctcagagcacagtctggggaacaatcatctgaaggaagcaagaaattgagaaataacagcaaccaaaaccttaatttatgttgttacttggagtgtagaggctgcactaatacgtgtaagatcaataacagtttcaccattccttagttggggaaacaggatcagaaggtacatgacctgctaaaggttgcactgctgataactgatagggtcaggtaaggactagaacctggtctaagaaattctttggcatcaaattatgccaaatcctgtgctctttcagaacatcaaattctctctccaaggaagaacaaagactaaaaaaaatttatatattttgaaatcaacacccaagctcctcagatcttttgggagatgtggatgagttatgtttctgggaaagtcatttaatttctctggaaaaaaatccaa

SEQ ID NO: 51971 - DNA, 1298 bp, Homo sapiens
ctggatttgatgctaatttgcagcttgctttcttctacctggcacagaatatagtctatccagctgaccattttaatgctaaagtaactccttgatgtgctgctgagatcatatctgatgaatccaaaaaaagaaattcattagcagctaagggagcgtgaactgctgacccagaatagatgatgctgttaagggattagcagtgccatgcatagagttatgattagctaaataattggtgacacttaacacacggctttctccaagggggaaaaataacactatttgttgttcgtataattagatttttcacctcaagtgaaaaagtaaattgagcacaaaatgcaagcaggtctgaagtggctgctcaaagttcatgtgggtctttaattataggactcatcagatgtaggacttcagacttacaaggctgtgctgatttgaactcagaaatgttaaaacctctgagacaacagattactggtcagctctgccactgctgtggctgccaggaaatgtgaatcatttatcctggcacttcatgacgatgtgcaatcaaatcccacttgagatgcctttaaataattctactgctttcctctggaaactcctgtcaatcagtaatcggggctgccatttctccccccattgctctctccggcttggcagcagatgaacctttgtggccagagatttgctaatgtatcggctgaaaggcacacatttcatgtttcctgtgccctctcatttcctgcctctcaaggcactacctctccaaggatccatttcagtgttcctaataattaccctactcttgagacagtgactgtaagacagatttcagagtgactggtctcttattttccaaaatatgatcttctattgctttatctgagtgtcctggaaaatcacctctctcctgtgctgtacaataccatgacccaaattaagaggagtgaaagattaggagagagcacaatttttgtacttgggggaatgaagtaaattaaaggagtgtttcatgtttctttcaaatgtgactttaataacaattaatcacagacagagtttcctattgcttctcagtaactagaaactaaagagtaaattctttttgttgacattatgatattcttttttgcattattcctgaatttctacttcttaaattttattttattattttattgtttgtttttaaaaattcaggtggaattcttttactccctgtacttcgtgatatttctgaagtttaagttatcttgtgaatatatgttcatattttagtgtgagctgcg

SEQ ID NO: 51972 - DNA, 1752 bp, Homo sapiens
tataaataaaactctttagaaagaccaacgtgctatgggtcaaaattccaaattctcattcaactaaggacatcttcccttcaccacagccaaaacctgacctggctacagaaggaggagtggggagtggcatggtctctgagccggtactaggatgagtcccccgcccccttaaattttgctccccagatgcctcactcgcttcaccctaatctctgctctacaagttgttttaatttttctcccgtctcccgcactcccttctccttttcactatgcctgttacttcagattttgaaggaaatatgggtaaaggagcaacagagaggagaagtgccttttcagttggctggtggtgtttgttttcttgatggttaacaccttttgttgtagcagacattcaaatgctcttcatggcctttggaggcctctgacctgggaaattggcaatttccttaggtatgttatgcattctccagctgacacctttgggctcctcctcagtccgtgccaattatataacgcacacacagaagtggatttaccctgaagctaatgacgcttcagcttcagggcccctcacctgcacaggctcctaccaaggtcctaggaaggcccctaccagtgtgtctgtgcagtcatatgcttttgtaaaatttataaggataagctattttaacacagttaagtctgaagtctctttcctttccaatttttcctttgaaataattctccttatgtttggtgaacttagagtgtgatggggaattttgggaaggtgatttgaggatccattaaattaggatttggtgggatacatttgtgtggttccaaagtcacaagattttgctatggattccagaaatattcctatcactcactgtcataaaaaggtataggggataaaggtttttatttgtattttttgcttttgcttctgtattttttttgagatgtaatctgactctgtcacccaggctagagtgcagtggtgcaatcatgactcatgcgtcctcgacctccctgggttcaggtgatcctcccgcctcagtctctgattagctgggactacaggcatgtgtcaccctgcctggctaattttttttgtatttttgtagagatggggtgtcagcatgttgcccaggctggtcttgaactcctgggctcacgtgatctgcaattacaggcatgagccactgtgcctggcctaggacaaaggttttattgacataaagtgtcctacggcatctggcctcagaagtatgtgggtaatgaagaagaaataaggtctaaaacctatgaggctcagagctagtctgtgaaaaattctttcaaatattacaaatcagacctgataaaaactggtcagagtttcctaaatttgataacaatccagaaagtttatatggcatcaccaaaataagatttaaagaaaaaagaaactttctaaactatgagaaaccaaaaaaaattgattcaaccatacccaatcaaagactaaatgatcttaaaattttctctactatcattgtcacatgaagcaggtatcaaaaatatgaagccaaaaattaggggtaaaactattacgaagaagtgtcagacaattaattattaaaaatgttacattattgtggggatttgggtgtttctggcatttgtcagcttttaaaaatttgtattttgttatcttttttcattctaaagcagtatttgcttttgtgatgtaaaagtatcagaaaattttttatgtgt

SEQ ID NO: 51973 - DNA, 554 bp, Homo sapiens
ttctttaatatgtagtcaccacatgacaagtacaaagcatattattattgactaatatacatttccatgattgataggttagcacttttattttgggcagctttttacataatttaggtatttggggactgtttcctctcaaattccatctcccacctgctctggtatggcaggtcaacaatccatcttggctcattgctttgttatcttgacacagttcagattgcaaaacatctggagctattgatgacttcatatattgcaaaaccatgtgttttcccctgaggagtatttttcattctgttttaaaatatgaatcacttctgaaaggatggctcactgattatttaacttcaagatagtcaatgagtttataagccagagaccccttcattgtgctgccacattcatggttagaggaaaagagtgtacaatatcacctgtcaaagtcaattgtatgaatcttacaacacatttcagaacaagtgaatgtaggccacagtttttttctgattgctttttcttaaattgcacaggaaaatttttctaatgta

SEQ ID NO: 51974 - DNA, 761 bp, Homo sapiens
ttcaaaatgatagaaagacattgagtaagtatacagaaagggagttgaaaaacacactgaaataatgacatttatttaaaatatttagattagtgttgggtgtgggtaaaaaactacttttgggattctggtaatattcttttaatcaaactaattcattagtgtagtgatccaagtggttgtgacagttcaaacaagtgggctaataaatggtgcaatatgtgaagtataggctacagctcaagcattggaaggacacactgcaagcacatggttttctgtgggatgaattgtatgtgtacaggcagtgagatataaatggttttattattcccattctcagaatccttaggttaaagtcaaaaaaaaggctggaattgagtggaactgatagtatccctataaactttatacaattaatcagagaggaggcagggagagaaacaaaaataaaccaagctggtagcactctcagttaatcattatgtaaccctgtgacctcttcctcatagttgtttgtctattgcctcagaatcacatagtccctgttacaagattatcataccccttaactgctctatagacaacgatttgaatattatgaaacattaagttttccctctgagatattctttaaagcagatcctgcacaccgatgaaactactgatgccaacagctctgaaagaccccattgacaccagctagtctgaaggatcccagaagaaactgactcaccaaagaatgcagtttccacattctg

SEQ ID NO: 51975 - DNA, 2390 bp, Homo sapiens
agaagaaaggaagaaagagaaagggagggagggagggaaggaggaaggaaggaaggaaagaaggaaggaaggaagttagttaacgcctatcttggaagaaagcactttacactgttgtgatctttactcataagtgcactgtgagaactcttcctgatcctcatacatggaaggaagatgcatctgtgatctagagactctgaccctctaggccaaggagataccatgtgagcaaaatataatggcccagaatcatctcacttacacatctaagaaagacttcaaatgaagcccatttactgtatttttcatacccaaagtagcagaatcatagctcattggagtagcacaatcatagctcattctctcccagactagagtgtggtggcatgatcaatggctcactgcagcgtcaacctcacaggctcaagtgatcctcttgcctcagcctcccacgtagctagcactacaggcatgacacatatagtattaatactttcttctacctgtttccaaagacattgtaaaaagacagtgagtatgtgtgtgcatgtatttgtgtgaaggtgtgtgtgtgtgtaacaggaaaaatataatataaatctccttcatttgggcagatcacagagtcattacgcataaaaggagaggaaataatgtcaatttggatttgtttcaaactacttttatacggacttactcttaaagcggctaaaaattagtgcaaagttgcaaacaggtagcatataggtgtttgaacagggctatcatttttccttgtgtctcatgcagctgtgtgcaaagtgttatgatttccacaactcagttgtaggagtctcagtccactaagtcagaaagtctgtggactcatgtctacacatgaaaagtctaagtactaaaataactgaaaacaaaccttttatcaggccatgtttaccagacttcgtgttagggttacaggcctggaaattttggcttcgtctatgcagtatcactctcttcttatctacattcatgcgtcagtgatgagaagtttttttctttatgtccacccatgggttttctgtggccaggcctgaccacagctcaccacaacttcatactcaatttctctgccccagcacatagttaggcaatgtgtcattgcacagtaggaatccaaatcaaataactctgaacaaagtctcttgtgtaggtggattctatacttgcttttgaacgttaaaaaagaaaaggaaaaatattgctgaatgtgcctcctaccattttctatagcactgaccttcacacctgacccagatggaaataaaacatcccttaccttttttttaaatgctttagaacactatgtgactaaagaggaagttttgtgagaattatttttgccacagtccttacagttgagaatggcccgagttttattttgaaatcatcagaggatttaatcattaaataattgtttactatgggacttggttaacagtagggataactgaatgaaatggttaagcaaagagcatatctacacggttaaaacaggactatttttttctttcctttttttctttttcaattttttttttctaaccttgctctgtcacccaggttggagtggagtagcacaatcatacctcagtctctcccaggctagagtgcagtggcatgatcagtggctcactgcagcctcaacctcacaggctcaagtgatcttcttgcctcaggctcccaagtagctagcactacagtcatacaccaccaagcctggctacttttgtgtgtgtgtgtgtgtgtgtgtagagacagggtctcagtatattatgcaggctaatcttgaacttctgggcttaagcaatccacccactttggcctcccagactgctggaattacaggtgtgggccaccatggctggctatttttttcttacattttttaatgacctttccaccacaaatgaaatttacacattatgtttgatatttattttatttaagatgtcagaggattaatatcttaacatttaatttggaaatattatatatataatatgtacatatatatttgcataccaaagtacaaaaaataaattgtcttcaagtggactgtattatcgactttaaatttgatcaactttaaataaattatggtccacaagtactatcacatgacaattttctgattagctgaatacatataggacagacattaaaggctgttaaaaatgctatcaaccaactttgaaagagatcacttcgtaatgtgaatttaaagtttaaaattttaagatgaataaaacaatatcactcctaaaataaaataagaaaactcagaaatttgttataagaatatcaaaatatcttacagaaattaggaagagaaccagagacactcg

SEQ ID NO: 51976 - DNA, 1445 bp, Homo sapiens
tggctctaccaattggtattaccacccaaaatatacaactgttccagttacttcacatcctcttaacacttgctattttctgtttacctgattgtggccactctaacagatgtgaggtgatacttgtggtattgatttgcattttcctgatgattagtgatgttgagcatatttccatattcttgtctgtgtgtgatttctctgatttcttgactttctaatgcatttatatatttacacatccataaaacaacctcagatatttgtccaaattattagctgcctcttcaattgtgtgtgtgtgtgtgtgtgtgtgtgtgtgtgtgtgtgcgcgcgaccagacttttttaggagctgaatctttctctttggtgccctctggtgaattttttttttaagttaatctttagttgccaccaccaaggcacatgtagtaacaaatctacagaactaattgctttattttcttaggcataaccaagtatgtaaattttttagcactgtctacgaatcatttatctctcatgttcagctctgccgtgaggtgtgaaattatgtctatttccacgtctgtaaggcaatagatcatgatggttcctgtttatcagcttccctggattcctgtgaaagagttatcacaatgatatatttttttaaagttttgtgtaaaccctatagtaatttacccatcaagtaacagtctaaggcagtaagtctttgtttctttcaaaaaccagtaatctcttgttggtcttttgaagacaacttcaccagaacaatttgttctagtaataacacaataattttcaaatctgtttgccaggtagtggcagtattaatataccacacgtctttttgtggccagggtttctaatttctttccattacctaaagttattttttcccttttatttcctattactttttaaaagttgtacagaatagttattaagacaacttctcttaattttcatggattatagccttgtaactgcagttacctcaaagcactgtgctttgaaacgaaagtgcacgtgatatttacttgggaataagctcatcttgaagctatagtctatgtgacttaatgggaaaagaatctgcaaaatatgaggcaaccttggaattacacccagaaactgccatgtgttaactgtgtgactcagagaaaattaatttcctgatttataaaatgaggatattcctgtcgtagcagtttactgtaattgactaagataacacatcaaattctggatatgtacagtacttgacagtaacaattattaggctgactcaggctgtctttctggttctgtctcttattactgtatcctcagatccaagtcaatctctgtgaggctgtttcttaagtacagaaaatagggacacttggccattcaatcccactcagttgatacataaatcaaattacataaaaatacatg

SEQ ID NO: 51977 - DNA, 620 bp, Homo sapiens
ctcttgcttgtgcaaagcaaaaaaaagcaaacaaaaaactagtttgattttctggacatcctgagttgctatggcaccttgaattaacaaacaaagactattcacctttttttcagttaaaaaaaatagtcaattcatctctcagacctgagtggtgaaacgtgaatttagtgaccctgtcaactcataagcgtgtgacttcatgtgacaatctggcatgaggcatgaggcttatttgcttttccaagagacaacaatgatttcacaagaggccagtcacactctctatctagtgtttctctgatcatggtttgcacttaagaggtgataggtgtggatggtcaaagttttaaaaccaaaatattgcttcatttcacacataggagaaatgggaataggcattatcactgctgacagaagcagtctttggtgaaagggactgtggagggtatttatctgagagaagtaaaagtcatccaaggttaaagaaagctccctgatttcccaaggcttacactctaagaaggaaaggcctgcaaggctaattgtaatccgtttacaacaattatgggaaagaatgacacaacataatttggaatctttgaaccatgttgcttgtg

SEQ ID NO: 51978 - DNA, 1004 bp, Homo sapiens
atgagtaaatgcacacaatacaatggtaagaaaaaacagtagacaaatcatacatatgatatatatgttaaaaatacccacataagaaaaaggactggaagaaaaaaatcaaaatttgaagaataagtgaggttatgtatgatttttctttccttatgtttttatgtgtcttccagttttcttattctgaaaaatactaatctgttcatctcccagtattttctactagactgtgggctccttgcggaggggctacattttcttcacagtggtgccctcagaaagagcacattgctgatacaaaataagagctcccaaatgttaaatcaataaagtactttgacctttgaacaacagggttttaactgcatgggtctgcttatatgcagatatttttcaaacaaacagggaagggaaaatacagaatttgcatgatgcaaaactcatgcatacaaaggactgacttttcctatacatggattccacaggatcaactgcaggacttgagtatgtgtggattttgatatacatgggggtcctggaaccaatcccctgcatatatcaagaaatgactgcaattgctcttgtaaaaagaaaattgcaacaaattttatttttaaattggatataatatattcagagaataattatttttatggatatagcattacaatcaataattgagcattcctcagttatttctggaatttcatgttttaattcaaaaatcataaaagtagaagacactattagcatcacactataataacttcaaggaggttatgtttttaaaaatattcttattttatatattatcccccattccaaaaaagcactttagatggcctaaataaaaacatataataatagtagtttatatttattgattgcctacgaaatgtcaggtttccttgtgttctttaaatgtatttttattaaaaataataataataaatgtatttttatttaatcttcataaggaccctaatatcccaatttcataa

SEQ ID NO: 51979 - DNA, 1760 bp, Homo sapiens
agagtcgatcacagggctttgtgcagaataggagggcagtataaagtagcaggggggctattagtactggctattgtttactcatcctataagctgcttattcagaaaactacagtaactttccaaataatttgggcaggaaaacctcaccacctttcatctagaaagatctaatcacttctttgaacgccattcacccaagagggcacaactcctaccaacatgaaaagcagatcttgtgaaagcccacttgctgccatctcccagccatttctccgacttcagaccggtgaacatcgtgcattagaaagtgttgttacatgtccaaggaaatctacatatagaacttttgccacggaaatgctgaagtcctattctgacagcgtgactccgatgtccacttggcaggctttgcgcaaagaattaaggcgagggtggagagggtgggtagggtggggacggacaaagtgagaagggaggcgggccaagtgaccacacgtacatgaagcctctccagttatggccaaatcattttttaaaaataattccatttcttccccaccctttggtcacttcctaacgccggctggggagtcacatgctaagctccaaagtgagcaacagacaccctcgtcccaggtcccatgctggcagaagcggacccgggccgagggatcagccctcccacttccagcggaggagcccttcgcaaccctagcctccagcccggggcgaagtcctccaggcccgcgggggcgcccgcaggctccgccccttcttcggctagctgcccgtccgtcccgcccctgctccgcccttcccgcccctgctccgcccatcgcgcggcggccccgggggcgagagggggcggagcgtggaggcggcagctggaaccgcgcagcgcacgggaacgcgtcccgctgcttgggtcaggttcgccggtcgcgggagccccgccgtgcagtcggaggtgagtaccgacgcggcccgacccacgtccccaggcgggagcgccgtccaccctgtatccctcgagagtcggtgcgggcctttaccgaggtgcccgaggcagtggcggcacgggggacacggaggcgagcttggggaggctgagaggagaatcggggacgtgtttctggcgactgacgtctccaccctgtccccagtctatgtcatgccggggagagaaaccagggattggaagtggctttcctagacccttcttagccttggctgtgcgtgctgtcctgaaagtccttgcctagggtgtgcggccagtcctgggagtcctaaccccgagggtgtgaggcccgcactgggagtcctcgcccaggcccggctggctggatagggaaacccttgctaaagttgtgcgggcagatccgggaatccactccaaggggtaaagggaaaatgggatgagggggaagagacccttcgtgggaggcttgaacacagagcccaccatgatagattcagagatctagaaaggagcttgggctgcagttatgaccaagtcatttttttctagattcagctagcacatcataatggcatcttccttcttgcaacacatgtaactctcttccctgggggacaacctctaggacagaagtccccaaacttttctggtactcagtactcctttacactcttaaaaattagtatcttaaggagcttttatgtgtgttatatctatccatatttataatatgtaagtaagactgagaaatttgtactataataattcatttaaaaag

SEQ ID NO: 51980 - DNA, 3271 bp, Homo sapiens
atacataactctgcctggatttgttccctcctgtacctcctcattgccttgtcttattgactgtaataacaccgtaacctgcctcccagacaccagtctggcagcctttccctgagttagtctatacccctaccggaatgatctctgaaaatcaaatctcatcttaaagattgcagctcagaatcctttaatggtgcctccttacctttggtaaaaattcaaactttgcagcaacctggaccttgctccatcccttgtttcttagctctccccaacatgtaccctgtactttatccacgtgcaacactttatgattcccacaatgtcacacttttgtgcctttaatgtattgtttcatctgccagcttattctttcagtgactctgtacctctgtgtaattctggaaggcttgtgcatggtgtcacctgtccctagagtcctttctctccccctctgatgctctgatgctggattaggtgcttttccctggtggttctttatcagccttcatccaccacacctgtagcatgggctgcatgatgttctgatttctcctacacagtctccattctcagtctgagcatctgaaggaggatggggactttatcccttcatcccaggtctgtaaatgtcgtgtgtatgaatgaatccacaccagtcccttcccatagacaacatagaaaggcccaggtcccagaagtatcaaggtctaatgctgctttagtatttgtcactccttcaacccagtgaaatagagcagctgtgccattgtgggagtcactgggatggaaccagctgcttcagagctgggctctggagtctgatggacttgggtttgcgttccagttccctctctcagcacgcctgcatctggcttcagatttgtagcttctaacatccttctatcctgctgcggggaaggaatgtgctgatcagaaataggagcatcaggtcctcctgacagttgcctttcttaggtaaaatcagtaaatatatgggtttgcatattgagctctgagaattttattagcatgagtcataatccccgagttcagtcagccctgatgagaccaggttggtgaggtggctgggtatagttggcctcagacacttggcgaattcacagaggtaaagatggcccagaagacctctgacagccagacacccaatctcttgtggtgatggcctttctttctaattcctaattcctaaagtttgagttagaaaagttcattgccacaatctgcgaaatgagttcaggagcctgaggaaatcatgctgctttcttaaagattggatctcaactggacctgctttgtaatacttttttttgaaagtacagctgtcttcacccactacttctcctcctcttaaaacataaatgcaggctgggtgtggtggctcacacctataaccccagcaatttgggaggccgagatgggcggatcacttgaggtcagaagtttgagaccagcctggccaacatggggaaaccccgtctctactaaaaatacaaaaattagccaggcgtggtggtgggcacctgtaatcccagcgactccagaggctgaggccagagaatcacttgaacctggggggcagaggttgcagtgagccgagattacgccactgcattccagcctgggtgacagagtgagaccctgtctcaaaaaacaaaccaaaaaaccaaaaaacttagatgcagtagggcttagttgaggtatctgcaggtgtcatgtactacaccacactggtgaccatagggagctgcagggtagggggcccacattctgagaaggggctgaggaagacctcaaggaggagaggatgaggtcaggctcagggccgggtcagatgccgggttctcaggacaatgcccccacttcttcctttactttcttgccaaatgtttcatgacccttggtgactttctttctcagcctgtctctggaatttataaatgtcgaagttcaccaagactttttacgaaactctggttatattggcccacagtgacactaaaaagtaaaagtgaatatttctgtgagtttgtgctgctgcaactaatttaaaacgagcttagaggatgtgttaagtctttctctttgagacttgcatgtgatgttctgccccctcttggccagtgagcccagaactaggggagccctcaagaggcaggggctgcctggtcaggcattgctatagcgtggccctggttccccaagtcctgttgtttttggcagtggctgtacacatctgccgagtgagtcatgatcatttttgtgatacatcctgagaatttccagtgttacttaataatgaaattcagggaaatagggttagacttcaggaagtaagtacttttcaagtacaatctaatattttcatatatgagttaatttcttatcaaactgtaaccaatttttgatgttggaagtctacagtctaaaccagatgacagttaaggctttgtagtttgtctttatcaaagtccctactgtggccactttatcactgtctttatcaaagtcctcacagtagggactttgataaactacaaacacctagctgtacacctggcttaaagtgtagatttacaacatcaaaattggctaaagagcctcatgtggtctggccgctactacctcttgccttttctgtcttcccctttttttgccttcacacaccttggtctccttggccttccttagacccaccaggcatgccaccacctcagggcctttgcacgtgaggttacccctccctggattgcacagtggctgaacatcagtgaggccttctttgatcactgacactccccacagcccctgtactttctactgcttttgccctgctttatcaatagaatgggtcaccatctgatactctgtttgtatatttatttatttgtttagtctgtctccttccattaaaatggaagtactatgagggcagggactctgtctctgttgttccctgatgtatcaccaggacctaaaacagttcctggcatgtaatagacagttaacataaatgtgaatgaatgaatcattgaattttttccacttagaaaggactttttagatcgttaaccaaccttatttatagattgggaaactgaggcacagaaaagttatatggctaattcaaaataaaaccatcatttaagcttttttttttaaaatcttgacatatatatagcacattctggtcagttatccaggatgagaaaagactgagtgaaaatagaccactaacttaaaatttgag

SEQ ID NO: 51981 - DNA, 420 bp, Homo sapiens
tctctgtcttcctctggggaatgctacatgattgctaaggttctttactaaaaactcaacattctatgtctcattacctccttagcacctaaggtcaaggtgtccctagggaatggtgacaggttggtgccatgccttagtgccatgctatgtatgcacaaaaggtgctactccaaggcacctgcaagtgtcctcaattgagccaaaggtcagttggtagcaagactgtggttggggaaaaaccctagctcttcactcctcccacccttttactgggagcatggctcatttgttaaatgtcttaccctagttctgcctgcctttgcataatatttgttattttttagtgacctactttaaaaatctggtgttcagactgtccatgcccacccccgttcttgcatgcagagtgtacctgtg

SEQ ID NO: 51982 - DNA, 2554 bp, Homo sapiens
tcatgattaattgagtctggtcaaaatagcgcctttttctaaatttccataaggttagaatccatagtcttaatcagtccatatccattaaactgtacaataatgtcattgagttcaatttagactaactttaaatttgtagttttagcatttacatttttgaggtgggaaggaagtaattgttactaatttcagtgcagagtaagactcagatatcatgactgctttttgtaaagatttcaaacgagtaatttttctgtagcatttcagagtttacttgcagagatacttatgcttttgttaagaattggcctttaaaattatagttaccaaagtattccttcttctcaagtgagaactgttgactatatgtatgtattttcctctagccagatacatgtatatcttatataaatatattcctatataatatacattttttcttcctttagcaaggatttaaaggattccaagttgctcctgaacatcataatgaccataagacctttatctatgataacactgaattcacccttgctcatggttctgtggtcattgctgccattactagctgcacaaacaccagtaatccgtctgtgatgttaggggcaggtaagtgcatttgactccatcctcatggtcatacatgtgtgtaggtggaaatagcccgagacagggcccagggccttggcggagttgtacatgtagttccctgaacctcgtcttttccagatacagatatttattggcccataaatatctacacaataaatagtatccaaagcaaagtttttaaaatcgaatgcacactgcataatagtctctcttgagaattaacacagaaaataagtagaggaaagcaaaggaagctggatttctgggaaagcctacattcttgtgtcagactttggaagaaaaataaagtgttaccacagactttgttctccgtgaaacccctgagcagcaggattgagttctgacgtgaatgctgggaggtgtttctcagtgagggcacagggcactggctgataaaacctggggccactggcctgtttcgcaattctggttgagttgttaatatttacatatgtggtttccctactataaggtctctttagtttccaagtttttagtcatccccaaagctcctcttatatccatccacagaccagacagtgtcagcagttcctttctatgaagcagacacgggcattaggaaagccttctttgcctgagtccgtgtattgccacctaagctttccttgtctggtctggagcaaaccagtcttctgtagacaagttaccagcttgtctgtggctttttgtcccctcatgtccccacccccactgctcatgtttttgctacttctgtgatacttcctaagacagagcacccagtgttccagtagcagtctctgtatctgccaaagtccagcagatcctccacttcaagatatatctgaacactcgatttttacttcttggctgaccgttccttgccagccagcacacagctgatatagtttcagaaagggctccttcaatgatgattttcatccaaataaaacataattagaaagatgattttccctctaaaaaaaaaattaaaaactcattttgtaatatattcctaaatggttttacatttatctctttaaaaaaaaagtaagcaaatctctttcttcatttccttgcctagctttgagtttactgcatatatctaaatgaccgttggccagggagcctttagatttctgtttggcagcagaaacagcagatagcgccaacatgaagggagcgtggtcaggtggtggcaggaaatgcagactgaagaaaatcaggctcttttctgaagtgtgcctggcacctagagcaggcagcctcccacactgcatctgtgtttaccatttcacaggattgttagcaaagaaagctgtggatgctggcctgaacgtgatgccttacatcaaaactagcctgtctcctgggagtggcgtggtcacctactacctacaagaaagcggagtcatgccttatctgtctcagcttgggtgagggagagttttcttttgcaccattgcttttgttgaattgtatccctcatgtatcttgctgtgtcaccttgtaacagatgtgagattatctgatgatatctaattgcatagtcgtttatcagttggtagttagacttaaacccttacattccatctaaagagagccctcttgccctctagggcacctaccatgaatggagtttgcaggactggaagttgctttggttgagtcagtgaatgagtggagagtgaatgtgaaggcctaggacattaccacacactactgttgactttataaacactggacacttaggccacactaacttaataaaaaaaagtttctttcttcaataatgtaaaccgtagcttacttttattttacaaacttttaagtttattgaaactcttgactcttaaaacacttagcttaaaacaaacatattgtatagctgttccaaaatattttctttatatctttatttcataagttttttcctatt

SEQ ID NO: 51983 - DNA, 1227 bp, Homo sapiens
agagagaaagcacacggcatgattgaggagcccagaggaatgcaacatggttgggtttatgaatgtttggaggtgatgaagctcagagggcaggaggaaccggattgtaaagaaattcatatgtgacactgaaaagttgggatcaggtacatcaaaatccttacttacaagcagccttcaaaaaggaacttatctacaccactccctattacatgtctatttgttctacctcagaaatacagtcacatactactcagagagcaagggtgaagtcatatatattttctgtatccctctcttcctttcagggttagtgtaataataacatcaataaacaactgttagtcatattaaaaaatcatatctgatctttggaggagtgacatcatgaattcagatcattccatttcaactaaaatgatcaaatacatattcaaacagtgatgaccacacaggcacagagcatgggaaaaggctgagtgagcccagctcttggctatctgatgcctaaattctctcatcacctcttttgcattgctagtacatttataagaggtttttggaagcaaagaggaagaatgtttgctctctacaggccacttctgaggttcatccattgcttgggatgagagctcagttagagaggctaaaaaatgtgactgttactcaagttcaaggttaaatattttctactaaacagagagagggtcaaagttcagtattcgtctagatggctctgaactagaggtagtagagagtaacagaatctcaaaggcttgttattggatccaacttacacttctggggcttataaacaacttgctccagttcctccagattgtgtttgactgttgctatcactgacgcatcaagagaagcacacagcttgcagatataatccaaggcttcatctgtgtttttggcatccccaacaccaaccgaggcagtcagcccaatgacctgtaaggagcattcaaaatcattagatgtctgagaaatggtacaatgtttccacaacccctcatataactctttcctgctggggtagggcgtttttttgtttttactaacacacagtgtatggcacatggaggcacataatgcatatttactaagtgaacaaatgaataaaggaaacaaaattcataatgagttgtacaatatggacttgggacctgagaaggacatcttcagtgtggccataagagtaagaaaataggagttagg

SEQ ID NO: 51984 - DNA, 1766 bp, Homo sapiens
atctcttttgcctaataagaagggctgtgtaaagctcagggcccttgtccactagaggcaaggtgccccctgaccccttcttccagatatactcttttgtctcttgtcttttattcccgcgttcgcccctctttgttcagtcccctaggtccgtgcgggttacatagtggcaccccgaacagcaacagcatcgggtgctctacagctgggattacagcgtgagggaccacgcccggcctcatcgatatcttttaagtaccacctcctttcacctctttcccagaagcctctgctcatctccagcacaaagtaattcgatacaaatttacaaaatggtcattacccaggatcacctgtctccgaagttagatggaaacacctgtattaaagcctaaagctattcggtctggaaaagtccggctcctctccagcttccacttctttaggcgtgcaaataagattcggcagagtaagcatcaacttcctttaagctcagaccgcactttgtgctcagtactgtaattatctgccctttgtgtcccatcccttggactgtaatgtatactaaggaagagcccttatcttatttctcaatctctgtcagtacccagccaagcacacagtagactttaatattagtgaaaataaatgaaacaaaatttcttccccagctttgaacctaaatagatgagcacccttaagcaagtcacttcacctcgctggaactcagtttccccacctaggcctccgagggctcctcaaactctggcaacctctagcctaaaatgctgcggagatcttaccacaaacctggggagtctggcaggctctctgcattgattaaaagaagggaacgaagcaagagaaaaacaagtcctcaattgttttccgccgagaaggcgccgctggagacactcaccctccctaaaccagggggccatgtagctcaggatgtaggtagggtccagggtcttccggatataatcctggaaggcttgcaggctgcgtcgctgctcggtggtcatgccggcctctgcttgcagctagctacgttccccgcaggctgtgcctcactagctttaaagccgggtaggaggagggcgtggcgagcggggaaagcagggattttccgaggaaatgaggccggacgcgaggcggagctgcataggaactttaataactaaagggaaaatcgaaagtgcaactagcggcgggcggggttcgcggaggctgttttgcctcgggctagtttcgtttccctccgcaccgaggaagcccgggaacggagaggacccctaggaattgcttttatttttatgatcttatattttgttttgcttttatagcgctaacgtttagacacagtaaaatgcacacaatctgagtgtgcaattcgatgagttttgtaaagtgtacacctgtgtacccagttctcccacgtcggctgggtgccagggtaagtctatgtttagctttataggaaaccgccacctgttgtccaaaatgactgattacatccagtttacattcccacccgcagtaggagagctccagtagatagacacattggtcagcctttcttttttttttttaattttaacttccatcttggtcggtgtgaaatggtatattattgtggttttaattttaatttcccatataattaatggtgggcacatttgcatgtgcttactgggtcattcatatatcttttgtgaagcatctgctccaatcttttgcctgactttggagttttttggtttatg

SEQ ID NO: 51985 - DNA, 2276 bp, Homo sapiens
ctggcccgccgaggcccggacagccccgcaggccatgaccgcaaccctcgggtcccgaggcgccgctccaggcgggagcgccaactcccacggcccttccgacccccgcgtcccattgttccgaatctcactcacctcggaggatgccggcgcaggcctggctggggcgctcgccgcgagctcccggcagcccagaaagctaggtcggtgtcggcaggatccgcgaaggcgtacccggcgacttctccgcctaccctccgaagcgggagcaggcgggggcgcttcaccctcctcgcgagacagcggagaccccagcggcggctgcgacccctgtgacgcaaagggctcatcaccaatggcagctcggaagcagggcagagagcgagacccaccccccagctcccgcgcatcaaaacacaacacccgccttcctcacgcatgcgcagcagatggacgccggcctcgggggcggggctcagcgcaccggcccaaatgcggcccctcccccgccgctccagaccccggaggagggcagcgcgaccctccccatcttgttactggtactcagccactggggacactgactgaatgttcgcccctaacttacccggaaaacacgagaactagttcgatgtcgtttcaaccttaccaaactctgcggaaacttaggaaattatctttagtgtctagataggggaattgttagatggacttgaagtctctcacctcctgttgtacgcctcccggaagcaacaccaggagtccaacgggatcccaaaccagagcccaaccagtatcctataaagtcttcagagagggatcccctccaggctggggagaaacaggacaacctaacaaaacagggcctggactcctccctaaacagaccacgtttttctccgctcttccccttcccactccctgaaatctagactaaaactcttttaagataactgcgaggtataaagaacgtctagagcctaagcggcccgttgccagattctactcctcaggcctcaaatgtgagcgccccaaacattctagagctgaacctggtacgctcgcccaccaaactgccgtgctcggggcttagtatctcacgcgcggcagttcaagaacatcagacacgctcaacaaacacttgttgcttgactgatacattatggcgggtaacgcgtcccacgtatttcttcttagagatatacattacgctatacgtttctgaagaatggctcgatttacaggggttcccacaacgatttgtcacatataaaagagtgggtggtatttttacgtcaaagatgaacaggcgaacgtccatctaaatcgtgtggtatcagatgcggggaggcgtgggggagggagcgggggagaaagcgttaattcttccagctttagagccagacgtaatatttaaaacgtggattgtttttcaaattaacttttaaatggacacgacagcaccttatcctgcattaatattgcattgcaactagaaagaaaaccagtggaggtacgcctatctccttagttggcaaaaaaaaaaaaaaaaaagcaatttttaacattttctcgtttattcccctctctaaaaggcgggcaaggcccccgatcacgtgataccgccccccaactccgggcggaagaggccagcgacagcgctgcacgaagcgagtgggcgggcgctcgtgcccggctaaaagatggctgctggcgcctggcagccaccgcctgggaggttactgtaaggcccgcagctcccgccagctcccgcggactgctgccgcctccttaccatgaagccagtaagtcgtcgcacgctggactggatttattcagtggtaagtcccggggatcgcgggcccccaccgtgtcgactcactgggcccgcaggcggaaaggccctatttcttcagcacccagaaactccaaaatccattcctgaattaagcatttcactccctcacctcgactccgcctcttcctggaggatacgatcttccgcttcttacgtaagggctgctgggtgtacccgccactggaaccccatttattcgactttgttactttaattcccaccttagcaatggcaacggtaacctgacgggggcgaggggaaatatcaggtagatttcacacctcctttgcgatttttggtttagttgctgcttgccatcgttttaatctcctggggctgcatcatctatgcttcgatggtgtctgcaagacgacagctaaggaagaaatacccagacaaaatctttgggacgaatgaa

SEQ ID NO: 51986 - DNA, 1382 bp, Homo sapiens
tactattatcctgtcatcagtaagtgttgcaggtaactgaaagcaattctgagatgtttatcatccataacagtcctcaagaaaatacccagaggccttgaaaataaagttcttgaatgagtgattttcttcaaagcccaaaatgcgatttttttaatgaaacactgtgttaaaagtacagaacggtagtttagaaaggtagctcttgaatgtgactcacaaggcataccaacaggaccctgtcttttacggggatcacatggggctgtactatcagctaggggctggctgtgccctctggtggttggatactgtgttacttggtctctagaacctcacacttaaaagtcagacaagtgtcctcaaatacttaaatcacagaattttaattctagcgagtccttggttattattctgagggaagatttctacagtcaaaagagaaccaaacgtgcagcgtcctggaaaacctaagtattaaaattcgcccccgtccactgtacttgacagtaaaaggcatgattctctcaaagccatacatattcctggactcctgcctcccgagactccaggaggactctcgggactggccagtgtcccagagcactgagcgttatcagtccttggtgtggctgcagggagcggacgttcagtgttcaggctgccggcagcagtgggatgtgttgggggggaccggagaggtctgtcactcaccattttcctccaaggggatttattctccaaaaatttattccagaatttctccataggccccatcttctgtgggggcagcaccggctcccgagggctcagctcctggtccttcagccatcgccttctcagctctcgcagctgctgcagccgcagtttctcatccggagtgtaccccgtcatgtcgccgctggtaccaacgcaaaaggacacggcgcaccctcgaactacggactagttacttaagcgcgctcccgctctgcaaagcgaccttgcgggaacgccgagcgccgcgcgcggttattacgtcacatcctggttccgcctctgcaagggccccagattcctcgcgaggaaagcagtgtgtgggcatgcacaaaggtctccacctccagttctctctacgcccacctccgctatacccgaccaaattaggaccgggtggggacaaggagtactcgtagttgtggggcctgaggaaagtgacagattagacgaaagtatgctaaattagaggactggaggttttgctaaggaagaacttgtatgctgggaggaggaaggataagcataaatgtttcagtgaatatgctggccagattcaaaattatttgcttgcctctcccaccttggaatgacctagagagtgtatgaaaatagttacatcccag

SEQ ID NO: 51987 - DNA, 582 bp, Homo sapiens
tagaataagtctgtgatgtcaaacaatgggctgagccttccccagtgtcaggaacttacccaaccagaagtcattaagctcggtggtttccctcttgcctccacaagcactcattaggggctgcgaaagaaatgcctttttatgtacattctccctgaagtttcctactgtgtgagattggcatttgggtgcagatttcatcatctgggctccctgccaactgcagtggaatagttcaaacttccagcctgtgaagtctcctggtcagggacctttacgctctgttttgctgaagggtatgacatttgcaagtcagcagaaggaaggtttctgtacttctcgaatatcttggtagaaataaaatctttatgagggagaccctgtgtgggatgatttgagccaaccacttggctttcttacagaatagacaggtataatttccatgtcccaaaccaggtcatcctagtgtagtttgtccatttgacaaatagaaggcaaagaaagagcaagaagcaatgctgaatgcttcggtttcaaagttcagggcaaagagctacaactggaatgttcacattttttcag

SEQ ID NO: 51988 - DNA, 991 bp, Homo sapiens
aatgaatacagtgatgatgaactaaaaagcaattcagaaacactttttattataatacaaagtcctcttaagctagcctacaaatatgattgtgagcaagtaacttgactgcattgttcacctttaaagagatttcttctctttttgtaagtcctctttgggttttaaataaaggggtagataacatgcaagactcaattgtgttgtgtctacggagtcgtctcacacagaaagaaatgagtcacagaaggaggaaaaatgccctcatgaccacctttgctattagtgatattggcttacagccttttagatttgggggatagagcacgtggaaaacagcaggaaaggacgcagagggtgactattacagtaacaacagctgttttcaattattcagcatgtttacattccacactggcacagcaaatgattgggaaatgattctttacctggccaaatgtctggacgttgaccttgaagttaactgttgctccagacacttgtgaaatgaactcccctaaacctgtcaccggtcagagcattttttccattttaaaaacataagttttttaatgaatatagaaactaccactgtaatctcttatctttggaaggggggctaaattattttttctcaaaattcttttgaattaaaagcgacttgccttgtcaaagatgtcttacttcgtcctaagcagtatttagcatctaccaaagttgatattttcttaagcctgctcattgttgtgtagttacttaggacagaaaagaaacaaagaatgcagatgaataaatgtattaaaccaatttcacaggcaagtttcccttgaaaaacaactccttgccataatcatcacattcattgagtgaccatctaccaaatgctttactcccatgatttcatgtaatattgacattcaccctacaaagtagatggtattacagtgtctgttttacaagtgagaaatccgaggaacaggaagtcaatttg

SEQ ID NO: 51989 - DNA, 1225 bp, Homo sapiens
caattccaaatagaaattttatccctgctttgttaagccactatcactggtatgtatggggaaaggctttttttttttttctttttttttttttttttgagacggagtttcgctcttggcatgcccaggctggagtgcaatggcgcgatctcagctcaccacaaactccgcctcccgggttcaagaacgtctcctgcctcaccctcccgagtagctgggattacaggcatgcgccaccacacctggctagttttgtatttttagtagagacggggtttctccatgtcggtcaggctggtctggaactcccgacctcaggtgatccgcccgcctcggcctcccaaagtgctgggattacaggcatgagccaccccgcccggccaaggactgcttcttctggcattccctacaaggcctgttgaggatgctgctaaggtccctcaagtgcctttcacgaagcatttctggcggaaacgctgcccttcccgacaagctgggccgcctccttggttggacagggcccattctctaatattttttcggcttgtgttgcgaccaaggtacatacaggtgtcgggagcacacgtgaacaaacgcaaagtgggtcgaagaccaacgcgagcgcccgctgaaacagcccaaggtagtaacaggggaggacggagaaagcagccgtgagagcagcgcatgaaagcagcgtcattcaaggcacatcactcaagggtaggagcagcctcggccgaacgctcacccgcggcattgagcccagccagcagaagagataggctgacgaccgccttacctccagaagtcggagacggacaaattcacgttactcatctgtgcctcaccgcttccggcgctgcgggatgacgtcagaggccggctgtatcgcgaccagtgacgtcaccagcacctctctaacggattggctgaaagaatcttgcccacttcccagatcaaaaagcgtccgccccaattgggttctctctgggccgtggtccaactgaggatcctggaagttatgcctgtggggaccagctctctcagcatctctctgcctgagggccactcgcctgtcactgcctcacagtctctgaattgggtgacatttcagacccaatccctctgtggacgtttctaggtggctgtgcagcttctcgatactccataaggagacgttcacaacctttaaggccatctctcctgctgcagacaacctgct

SEQ ID NO: 51990 - DNA, 2253 bp, Homo sapiens
tctctgatctatcaggttaatataggaggctctcccctactgacttctacctcatggtttctctggcagtctgttgacttgtttggcttctcactaaagtctaactggggcttttcaactctgcatctccagttctgtttttgttttaaatcgagacggggtttcaccatgttgcttgggctggtatcaaacttctgagctcacgcaatcagcccacgctggcgtcccaaagtgctgggattacacacgtgagccaccgagcgtggcaaactccatctttcttggtgctagatactgacatacctgctgtgtccctggataaagaagcggaccccaattcccattaagcccccgtggtaccattttcaagtccgaggtcttacgttgcagattgtacatccaggttccctgacccgtaggatttaaaagtgaggtcaaataattaaacaaattgttttagtcagacactcttgcggctactctgtagccaaactgggtgaaaacctgaccagaggagtccacggccctctgtacatcaaagacggtccaaacgtctcactgtttagctcagtcccagacacactgagctcaatctgcacgaatcagcgaggtccagggcagataacatgtgtctaggggcctggacttgcacaaaaagccttaacaacttcacaatttgattaattatgccgccttggaccacgcgtgaaaaacagcaagacccaaggcctatgctattggtctggggactagacccacctggctcaagcattttttgctcgccacgttcccaaaaagagaagaggcgcccgtaagaggggggggggggggggcaagactgttccaagagctttcccgttcacacacagctcccgctgggtcactgtactcgagcccttcccgccctcgcgggcccaggcggccaccccacaggtttgggaaccctaggacttgcagtgctcctgggccatgccccaccagccggagacttccgcactctcaggctcgctgagtggagaaaagggctccagaagattccacgagcgccgggaagccgcgctagcaccaacacccacaaggcctttcggcgcagctcctcccgacccgtgcgcccccgcgccgttgcccaggtaacggcggggcggtggcagcggccgagaagggcgggacttccggcgggtgacgcgcccgggttcggctacaaaagaggacggctgcggcgcgccgggcggaactttccagaacgctcggtgagaggcggaggagcggtaactaccccggctgcgcacagctcggcgctccttcccgctccctcacacaccggcctcagcccgcaccggtgagtttgagccctcgcgctgcccctagtcccctggctggcgccattggcgccgggaaaccgatggagccgcggtcgggaggcagttggccgcgtgggtaggaccgctgtcagttcctgggcccacgatttcccttttggagggctggtgtggtgccctggcaacccatccccggcacgcacagtgaatgggcccgagacctttcctagacctccctccttccccagcctgggatctccaaggagctactgtcttcggctgcccctccgtgcgcgcccccgcggcccccctccccgtccgtgctcgctcggggtggggggggggagtggggttggcgaccctgcgcacgcgcacagggaggcaggggcgaggggctgcggggggagccgggcggagactgcggcttttggtttcgctttctctgtttcccctccctttgtttgttgagggctgggctttccccaccgccacttgggtccagggtgggagggagaaaggaaggaaatcggtcagcgccaagtgcaaggggaaacctggcaggtaaactctgccagcctgaggggcgagagggattcggctggagaagctgtaagccgtgggcggtggagggcttgctgtgtggagccagtaacctgttctataaaccactcccccccaccactgtgtgcccagacgtctttttctggagagtatatggagtttatcagatttgccaaagacagtgatagtgtaatgaccggtagactgaacatatcagtgcttcttttggttacaactgtcaccgcctctagggcaaacgggaagaatccagataatagttgtgttatattagtatggaagctttggtgtaggaaaattggaaccagctgctagaaggcggctctcagattatttcccgataatgattatttgt

SEQ ID NO: 51991 - DNA, 1055 bp, Homo sapiens
actccttagtagccactggccatgtgtggctccattaatttaagacaaaaacaaaaatacggtttcttagtctaaatggccacatttacatgctcaataagcacatgtgattggtggctgctacgttggacagaacagatataaaacatttatcactgcagaaagttctgttgggcaatgctattataaaaggtatgagaaatttggccttcaaaacaaccagtgctggcccagcagtaaatgggctgttttctactaaatcaggaagaagtagaaattgatactcttctgtggtgactcaataaatacatcagcttccctggccaatcttgattaatgagaatttactgtgctacagaatttttggatgaagtaattggccatgttgctcaatacggtacgaagtgaaagcttcaaaaaatatattgtgacagaaatgaatgtttggattattgtgaaatgtgcccttttaaataacattggtttttctcaagtgactttgaaggtaatgcttttgcttaccatatttccaagatggccacgtctgtgcccttaagcaaatatttaatctctgacctgattttccctcatctgtgattacatcacagtttgaggatcatctgtgataacgtgaacattctgtgtatatagtaggtagtcaacagatgtaccctgtgaggctcatcttttattattctttgccacattctttatagtgcctttagcacaaataagatccagcatcttaaacagatttgcaatgagaaatattttgttttaggtaaaaatgttgtacatcagctctcagtaaccctagaagacttatataatggtgcaacaagaaaactggctctgcaaaagaatgtgatttgtgacaaatgtgaaggtacggtgtttttttgttttgttttgttttgtttttaagcacctttaatatgacacctgaaaatggagctaagacttctagatagatatgtaaaattgattcatgtacactacctagattttgggggaggagagggcagatatgaagaaaaccaactgaaaacctccca

SEQ ID NO: 51992 - DNA, 1560 bp, Homo sapiens
caaacctaaagattgaggaggaactgacagcaatattgagagtgaggcaagagagaaaaaaaacctagcttcggagtcacatctggttttcaatgcgagcttcgtgcaagttggactgagttaggtgcctcacgtctggaaacctgtttcttcatgtgcatttgcgcaccctcattacattgttctgagaattaaatatggctgcttacatagcaaggaagggctcaacagaggccgttagtggtagtaataatacatgctgaaaaaaaacaactggtgaagaagatactgaattgtacctgagatttataccatttgctgttaaaaaaaaaaaaaaaaaaaaagccatactactcccaaatacctccgcgcaatgttttccagtcattaattcaacagcagaataggggataggacaaatgtccttatgctcatggaattaattttaacgccaggtagtttagcttctatgttaagtgctagagagcagcatccgttaaatctggtggctgcagcagagcacttccctaggaaccgactgcacacgcccaattcagaaggaagtgagcactgattcccggcagccaactcccgttcgcgcagccgctgccaccggcccttaagacgatgtgaccgccaattttgtaacagtgacgtcacccgacgtctgcaggccctgacagttggctctagcgggtgcgcagtctccctacccccggtaaggggctctaccggccctggacccaagatgggactcctacctccgaccacccggagcagcggcgccccagatccggccgtccgccctgcgcgtgcgcggcccgaccccgccgcggtctggctgtaagggcgctggaggggagctgggctgccccagccttcaatgctggagggacggccgcgtggggcttcagaaaggctaggcgccgaggagtgtaagcagcgtgtgcccatttaaagacaaaatcagtgtgtttttcaggtttgtacgaaatgaagttgtagaaagattaacaagggttacctgggaaaggcagattttcaacttagcgtttacatgttcacccagtgcattattttatttaaaaagaagaaaaatatatacttaacggctcctaatccagctctctttgcctggtctcccaagacacctatcattttgcccagcacataccttgccgctgtgccacactggagtccccggttaggttccctgtgcttagaccgccccctagtccctccaggaagcctttcccaaccctttcgcgttaactgcccgcctcatcatcacaaaggtaacttgagcttttatcagttttaattactccttttaatttgctcttcttccctatgtttaggcagaaacgagtctttttttaaccatattcatcacctggtgccagcaacagaagtgttccctaaaaattcctagaataaaccaacacgtgctgactagattctccatcttcataaacggtgatacaaactatgcacatcataactaccagcttcatgaggtcaagactaaatcaaaaattctcaaggacttttctaaaaatt

SEQ ID NO: 51993 - DNA, 1938 bp, Homo sapiens
gacttagacccctgttattctgctatgatactatcttccttagcacatgtccgttgacttccattttacactcccaaaataagtcatctctctcctcaaacagctcacatttgacatagccaaaatcaaattccctaccttcaaacagaaatgaatacataaagagctagaagctttgaagatagtctgggatttgaatcaaagttatgtgaccttggacaagtaggttaacatcatttcagtatttgctgaatgcataaacctcccttcctcctatgaaaagtctccaaaaaaggtcctctccctcccttacactcagacacaatttttatgtctgttaatttaattattattaagtgttggcaaggacaggtggaggatggagttctggaaaagcacactaaggtcttctttagtcactaattctcatcccctattccttgaaaatttttctttctagcccagtctccagtctgtctctccccagacaacccaaaattccgtgccagatcgggcctgatagttgttcattcattccaaaagctagttgttcattcattccaaaagcaattaactcttcctctaaggtatgctagacactgagaccacaaggaaaaggagctcctaggcaccgacaaaggctagtttggggtgaggttatcaaacagtgacaatactgagtgataaacgctaggcagagaaaagcaaaggggccgtataagcagagacaacgaatcacattgcataagctggacagggagagaagcaaggcttaaagagacctatccccttgcgcagataattagactggagtccagagtggatccttaatttggtcaatcacagcgcgccagcagtcggccaaggacagaacttaggtctgcaaggtgtgttttccccacccgtgccacctccctcgaggttttgggcttcacgtctgagagctgctactttcctgtgggcccacctccgaggtagcgagatccaagatgcttctttgggggcaaggaaatggccctccactccctggcctctcggatgccttctcccgagtaccctccgccccacacccttaacctccaggcccccggcaaggcgcgaacatccccaccgcaggactcactccgaagattcgatttcgatcgacatagccgtatctctccgggagcaggccccagctctccctcaaggccagtcgcgcaacacaccaacgacacctccggcggacacctaacgtcacttccgcttgggtcggcgtctggctcccgctctggagatagagtgaacgaagagtaggggcgaggttcgcgtaggggcggagccctcaggggctgtcagagggcggagtttatgcccctgccccagagaaatacgcatcaggaggaagactgtttaaaagcaggccggagccgggtgcggtggctcacgcttgtaatcccaacactttggaaggccgaggcgggcgatcacctgaggtcgtgagttcgagaccagcctgaccaacatggagaaacccccgtctctactaaaaatacaaaattagccgggcgtagtggcgcatgcctgtaatccctactcgggagcctgaggcaggagaatcgcttgaacccaggaggcggaggttgcggtgagccgagatcgcgccattgcaccccagcatggaaaacaagagcgcaactccgtctcaaaaaaaaaaaaaaaaaaaaaagaaagatagaaaagaaaaagaaaaaaagcaccgggcgccatacagctcacaaatgtactgaaaaagaaaagcgctggggcggagcgcggtggctcgcgcctgtactcccagcgcgcgagttcgagaccagcctgggcaacatggtgaagccccgtctctactaaaaatacaaaaaattagccgggcgtggtggcgggggcgcctgtaatctcagctactcgggagtctgt

SEQ ID NO: 51994 - DNA, 719 bp, Homo sapiens
ttcacaagttgataaattttgccaattcctaaagatcaatttgtatagaaattttgtttttaacactagacaaatgaggtctctcacatctctccatccatatataaataaagaaacaagcaggcacacacacagacaacttctaaactctaaaccaggcagttgtattcaccaagaatctttccaccgcatactcacaggctggatcacaacctcctagaccaaatttctagtgaacaaaagtaaccccgagggaaatccggtctcctgatccgccctgctttccggtaaatgggccccctcccataagtccatgtatcagcaatctatctcttgaatccagcagagggcaggacagtcacagaaaaactaccattgtaaacctagcctccaaatgtctaactggttaaggaaaagaggtggaggggagagagattcttggtcctgcggataaaggaagtactgtagaagggaaagtcaatatttgagtgccaaaatggggcaaaaggttcgttttattttctattaaactagaccagtttcttctaacaggatataataaggcaaagcagagaaaaaaatcacataattctatgtgctttttgcagaacatgaattttaagttatgagagttaaatgagttaattcatacaaaacacaacagtgcctggcatgtagcgagcactaagtaagagtttgttgttattgttgttgttgtt

SEQ ID NO: 51995 - DNA, 1653 bp, Homo sapiens
tttttagtagagatggcatttcgccatgttggccagaccggtctcaaactcctaacctccagtgatccacccgcctcggcctcccagagtgctgggattacaagtgtgagccaccacgcccggtctgtgacctgtatcctatgccaaccttcagtctcatcctgtgactaagaatgcctaaccttctgggaatgcagcccagtaggtttcagccttatttcacccagccccagttcaagatggagttgctctggttcaaacgcctttgacattctggccttggtcacccaggggtcaaccctagactcccattacagcacttcctcagttccctcaactaattgcactccctcaaattgaggcattcccagcagtatgctaggatgtgtactgacatcagggttggagaggggccagggaaaggcctggcaggccttgtctcccacaaagaaaacccttggaacagtctcccggaggttgtgggcagtgaacctgcacgacagggtagacccaagacaggaagagtgcccatggatcctgggagccagcagggccaagatctgccagccaaattcacagaggccaccaagcccagcgcccttgagacacacacagcatctgagtcagacacagagcattccaagctggtaggaatggcccaagctgacatatgagatgtcatgcccaacagacaaattgttcatggggaagatttctcctgtcctcagcatgcaattcttctctccccattccatagtctcattgtcactaggtcagtgtctatccagagcaaaccacatggaacacaaatcattgaggcttggagttgatgaagttaaacccaacagcctgctttttagcagtcttgattcagcttgtcatcaaaacaaaccacagcccctggctttgcttaggaaaatgcctttggctgagaacttacaggggggtcttggaatagtgtggcaattgctctcccttgggaagagggtgtacagtcggggaggaaaggtgcccagaagagaaagggagaactaagcaggcatctaggccttattggggaatcctaggtctccacctggacttctgggtccccgcagtcttcagacagacactgtgctgagccctcctgagcaccaggtgttggcccaggcagggcaggtccaggaggattaagaagctgtgttgtccatgaagcaggaactggttgttgctgcccagagtgatgcctcagaggcagaaaaccccatgtcttcaggtccacttgcatccccagccctcaggagtctcccttcttccctcttccccacgcctcaggcctccttgcatcctcatggattgtttcagtgttaaccattcctgtacatctcccagaccgtggtgacaccaatgcaatgcccctggtatacggaactgtcgctgtcaagtttactaggttcctaagtcctctaaaacagtaaagggaaaacaaaacaaaacacaaacaatctcatcccaaaggtgctcttggctccagccctggatccaggctgtacttctctcggcagtgctgctgaggccacagcttccctggctggggcaaggaacctcacagcctccatcgccctgctcccacactgtgtggatgaggagctgggtcatggtccagtggccaga

SEQ ID NO: 51996 - DNA, 960 bp, Homo sapiens
caaatgatgacccagaaataaatggacttccctcaagaagacagagaaggttagtcgcagggcaagaggaaaagtcaacagcagggcacttcctacagaagacacagagacacagagaggggaaccaacttgcccagcatcacacagcaagtggggagtcagagacagccacacgtaatggtcattgtatggcttcctcctggcttgtctttccaggctccctgcctggtgacctggcactcactctccccaaatacaccgtgatatcattgtgccctctctctactcttggtgaccctggaacacatctcgctgcagggcaaatgtccttggggtgtcatgttcctctggtttccagtctattgaccctgtcactcataacaacctcctctgcacctggggttcctctgcctcacagcctgggtacaggtcctgaagcccagaaaaaggcagtagccacattccctgcctggggacactgccaaagacggaaatgaggcttgcctgccatgaccggctcagccagacaaacctcatttcctttctggcatggtaagaagttccagttctaagaagaaaccagcccttaggaatgtctgaaatcccacctcctggaagaaacaagagggaaggagcctggatatgtggcagaaacttggtaaccttcagaatgtggtcaatgtgatcatcctcattccctcccctctccccccacccccacacagctggcctcagtcgagagcagcaaacatgtctcgcccagggaggcgccactcattcacccccaggggcagccgcctccttgggccccttggccctgcctccaaagaacagctgtaggccagtgatttggcacctgggccacgttctcccatggaaaagaggtggtatgtgggggatctggtgattactctcatgattaaggggctctgcttggctcagacttggttgttctgggtc

SEQ ID NO: 51997 - DNA, 1197 bp, Homo sapiens
cccatcatgcttccaacacactgagacaccttgacccccaatcctgcccttcttgccaatctggcaattttttctccacaactctaaggatcttgcagctcacacctttgagacaacagacagcagccccagacctggcgttgaatgactaattgggtcgagtgccagccaggaggcctcctgaatgccctgcacacctcctgccatactgcagggaccatgctctgctacacacctggctctgtcccagtgagaaactccagagagctcagactccaggaaggcaacgactacctctgttcagaatcatgcagacctgcgaccaggtttcagagccactgcctggggtggtggggagaagctctgggaggaggcagagggctgagggcttcatgacaggcctcaagccgagccaaggcgcccttgctgtgcggcgcatggcgtgtgctaccacaggctctcggccccgctgggctggcttgtgtgttttcttggctctggaagctgggaggcagggttacgtaagcagatgagcagatgtaagctgtcctcggctcccccagctcaagccccgccacgtgggcctctcggctgggagtccaggtcatggccttgcatgtaagtcgctcaataacttcaatgtgtgagctcaattcagacaaattccactgctcccctgcctggcacagcaaacccaaacacatacatgcccctccatcaaaggccctgctaatctaagccaacaccagcacggactcctgactggttttcatgctggctgaagcactagttcaatcctttagcctcagcaaaataggctgaaacatctagtcactgtttgtcaactgattggccagtgggtcgaaagaagcgttggcctgatgctttattgtgacaatgtttcactagcccaggaatgaaatcacagaagtaaagaccatgtaggtgttttttaattaaactaaaggtaatcaaagtataggaatgccctttcttccaagattaagtgcttcttactctttgaatattaaaatgtcctttctcttatgaaatcatcatagattttcatgctggactgatttttaaaatttaatttaaaaaaaaaatccttccttggcagccatgggtcaggcctctaagtttgttttgaaaattctctggacaggaaatccaagtattcaggaaacatttgggaac

SEQ ID NO: 51998 - DNA, 657 bp, Homo sapiens
aagttcatccacatgagttaaatgatcaggcgcccaggctagcccaacagaatataagtttctatggatggctacatgcagtgtttccaaaaactgatccacaaactttttgatcaacaccattatttttaagtcaggtttttaaagccagagcctgccccatgctataggtttagcgccacatatcaaggaagaaggaaagaatgttcttactttctgtaaaccaacttggcaaaggtaggtgggtgttgaaagagccacagtaaggctccttttgtggacacagagtgaattcaacaggaactgctctgaggcaatcacaggaaaaccctaatgtccagaaaggccacatggtgtccagcatagggaactacacacacacacacacacacacacacacacacacacacggtgtccagcatagggaactacacacacacacacacacacacacacacacacacacactggctggaagtgtcagtgtgaggctccagctagatccaaatcgcccttagaatccacatacttcaaaagccaggattttccaatttagaacctgtgaatgattccaaacctcttggaaagcaatgcagcaatgtgaatcagtattgtcaagatgaccatatcctctggcctagaaattcttccccagga

SEQ ID NO: 51999 - DNA, 10271 bp, Homo sapiens
accaaaggagttaggacttgcctaaaatgatgtaatgaattagaaaaagaataaagaccagggctcggaatcctcactccagcagccttcaaggcttgctcctaccctctgcagaccaagaaatccctctctgcagctctcttccctttcaactgcctccctttgatccctcagtccagctaccctcagacttcctctgtccataacagtccaaactgcaccaccttctctttcttttatcatcttcagctcactctgcctccatttcctttcctctcctgccctgctggtaaaggtgtgcaacttttggaatttcagctttagtattctttccacatgacagcaagtagaggaaatcgcaggttacttttagcagtagactcctgcccttccaataagggagactgttcaaacatactgagagacagagatgctaaaatcaacgtctggaagagaggtccttcattctgactctggccctggcccagaccacccatttggctccctgcacctcctcagtaccctcaaagcacccaggcttcctctctctgaccacaccatattgccagagtctatctactactactaagggactgcccaagagtgggggcctctcttgttcatgtctatctctcacacttcatatagtgtagttaccaataaaagtttgctgaatgaggaaatgagtccctgttcattctcttcctggggggagggggtctctcctgactttggtgtgaagactcaattctacctattcttgggcaggcagggactctgcccagagtactcctctaaatgtcaggcgctacccaacaccttaataccacatccccacaatcccataacgcaaataccagcttccctaggccgcaccctgaactccacatcctttcctgtttctttttttgttgttgatttttttcaagctggcagtgtcctgcaacaccaatgacagctctgcggtttcaggatgtcaaaggcaaaaggccattatgcaaaacaggaagaaactttgaaagaaaaaaacttaaggcatttttagaatatactctgtcatggggccaagcaatgattgaatcccctgccagggaccctccccatgacctctaggcccccgtggtggggcaggaaggagcctgacctcacactgtatccgtcacactgctgacataatcctgccccttccctcagtgcaacctcgccctagcactccaggctttgtgccaaatgaccccggcagacaaaactgctcctcagagagaatttatctccactgaggacattctaaagggagtaacttcaaagtatactccttgggaatagcctggcacactggcctgaggctttattgatctaacccacctgaatcagccccaactgagaaccaggttctgcctctccctaagagagcttctccctaagagaattcctagaaacctaaagtttctcactatggctcctccctagatctcaggaccacctggaggtgggagagctgtgctatatgtttcagaatctgatttgcaagcttgctcccaccttcctgtgcgtcacatctcaatgatgtcaacagcactggtttagctagctgttgttcacccacaaccacagccccagagccacagtagtccacagaagtccagcacagggacttagctgctaaagaaacaaatggagaagttactgagaaagcatcacccccaccgattctgttcacagcagatttctgctcagccagatcctaagagcctatcctgcagcctggccctttgcccctgcccccaggcacttcctggacctagtttcttttttaatcagaattctagacacattgttcagcaataagtgatactcatctgccagcactaagcaaatctggaatttccaatgagtctatccttttgtaagactggcttgaaaatctagcccttctcaaaaaacattcaacactttttttccttttttagaaagctctcctacagaaaccatccaaaaagtacataaagctttctgcacaagcatcactacatcactaagaaaaaacaaaaactatatatgtatatgtgtgtgttcagcaacagttgaatgatttttttaagttatggcatattcagctgacagactatgatactgcctttgtgatttttaaaggtatagggtcaagtctgtgacagaatcttaaatgaaaaatgctgaacaccaggctatctacatgaatctatgtcaatctatctgttcatctataaagacaacagctataacactgggtgtggtgactgacacctataatcccagcgctttgggaggccaaggcaggtgaatcacttgagctctggagttcgagaccagcctaggcaacatggcaaaaccccatctctacaaaaaatacaaaaattagtcaggcatggcggtgtgcacctgtggtcccagcaactcgggagactgaagtgggagaatcgcttagcccgagaggtcgaggctgcagtgagccgtgatcactgcactccagcctgggtgacagagcaaaaaccctgtctcaaaaagaaaaagaaaaaaaaatatatcagctatattcttaaacatgaaaaagactagtaggaaatatgccggtatgtttcttttgggtgataggaatttgggtgtgcttttatatctctttcaacttttcaaattattttcaatgagcctgcattactttttacttttaaaatgaaggaagagattatcccccctcaaaaggcaaaagcaaagacccatacccctatccctatccccaacatctctgtgaggcaagtcattctctctctctctctctctctctctgcctgggctttgtgaggggctctggagaagcagcgggtgtggggagtggatagagaagcagctacataacacacccagaccagactttaaaatcactgccaaagaattcagcaacagccaattatatagcccctggccttcatttgtgcagggaaggggcgggctgaggccaagccgcaaagtggaacctgaagcactgagtgtgtgactcacccctctgtcttctaaggacaaatccctttaggccacattcacccagaaccagctccccactaaaccctgtcccccacccccaagccccactctccaacctggaggtctctgacttacagaacaatatcctgagatcactccttgagctagtgaccgcctcagctcacccggcaatggcccagatcaacacagaggcccctacaactcaggtctcaggtctctacaatcttaatcgcagtctggctcccaggaacccctaccaagtttagggacaggagggaccctgtgagtctaatcccatgccttgttaattcccctaggagccagggtctggctggctggccttacagtgacctcactgcccagggaccacaccagtctataccaaagccaaatgtaaaactgtcaccatgccaggccctcaaaggatttaagcttcaagggcagaccatttgtcctaaaacaactggattgctgctccactggacaagaaaaactggaatttccaggtagatgtgggttcaagcagaattccagtctctgcttcttcatagtaagagcagagaacaaagagtaagaaacaaggtacaggaggcactgggtaaacagatagcagggaaatcagcaggtatgactactgaataaacctctttcacaaacacacacccatagcccagctgagtgcaaaggggatgagcctgccggccctgttccttaagtctggatggtccctagggtggaatctgtggaaagcttggactgccttgctattaactgccccataattcccaacccataaattagcttagtcccagcctggaaatccctaccctgctgctacccaaagaccataatacccagtgatatctcattataatcattataaagcagcaagttaaagattactcagcagaactaatgcatagcttcagaaattagaggaaaattttcacacaaccaaataaaaccagggctggagaattttgatatgaacttggagtttctgaaagaagaaaggaagaaatgaaggagggaggggagtgatagggaaggggataaatacacactttggttcccctagatgacctcagcactgttcaattatgcctcccctgcctaaattaagagttcctgaagaggaggcactttgttttcttctttgtagctctagtgcccagcataatacaggaacactgctggaactgaaggaatgaagttatcagatgccttagccgtcacggatatccatacaagatcaccatacaagacccttcagatggaccaaaagacacaccttgcagggatcttctgaaacgctagggcatatcaggtcacccctgaacctgtgcactagccaactattgaatagtaacctccaggaagagcactagacaatcccatcgtggaatgctacagttctaagaagctgcagtttaagtccaatcccacatttggctcttactccccattccccaaggagtttccatttggttcatcagaggctccactgcaggtggaggcggtgccttgtgtttgctcaaagtctggaatgaattacagcagccagggatcactcttattgccataggctgtgtctaagaaagcgaccaagtttcaccatgaaagcaaaccaaatagtcatggagggtatttctcaatctcagactgttagacaaagaatgtctgtgtatacgtcaatacattattttccacgaaaaaaacaacaggacaaaactggcttacaagactagttatctgagcctaaagcttcaacccccaggatgaagctccaccccaagccggaaggtgatgaggttccaaggctcatccccaaaagggcgagagagagtcctttcccaagcctcaaagtacactctgtcctgggcagcctgcttgtgtccacatgtgtgcatatgagggagggggaaacgtgctggtagagaaacacctgagagctgagagcccagcaaagaccagcaagtgctaggacacaaaccctggcagacgctcagcaacagcccccataaaaaccagggaaaccggctcatgagcaagtgctcctcgggtgccctggctacctgtagctgctgtttgctggtccaagtgcccatctctagatcagagtcttccctttgaacaaatgaagaggatctcctcaaagcataggtgggcaagagcggcctctgaggcttaagcagtctaacactcactcccctacccccctgaggggactgtaccaaccatcccaggccccagctgagcccccaggccagcctgcctctctcaccagttcagcttcaggtactgcccacctccccccatcaccctactcatcttcagactggcagtgccacagctggtcaagtcccattgagctgctgcccaatctgagcagagataaacatgacgggggaagaagcccaaggccactgttcctcccatctcagcaggcaaacacccaggtggccagaaaagagggcctcgctgcagggttataagtggatgccgcatggccccgctgaggacctgagacagggttaggaaagaaggatagcatagcacctgcaggcctaaactacctgggaggattccctggagaaagctgtagaatcctcaggaaaggccccccttcccactgcatcactcactcctgcaagcctcacattagcccagagcagggtgcccggtgtgggggcggggggtactatggctccaaacctgcagcctgccccaggtcacactaacccaagtctatctgaagactattccaaggccctgacaactccaacagcaacccatcagcagtccaatccggtgccttatgtcctccagggaagggtttgcccataacccacacctgtcagctgagaggaatctcagcatctggcccagacccctggacaccagaaagtaaagccaagtcggggaaaggaactgcaagtagtgaaaaggccacaactctaaaccccacggatgctttctcccaccaacctcaaaaccacccgcaagggctttggctgacacctgcccatgaacagatgggctcgactccccccacccacacactcccaaggagactttcagctttctcaaggcctcatagccaggaacctccattctgagaactgtacctaaccacccaaacctacagaccctattaaaatgaagaaaagacctctcggcccccatttctggggctgcctcagcagcagcctaaacgtcatggtctcttgcatgtcacatgaaagcagccaaaatagagaaggcactctctcctcgtcctccaaaatgttctttctcaggaagtcctttcaagtagccaattatagtccatttagaaacaccagtaactggtgacaagccgatcactagcaacaccattacaaaacaaaactaagcagaggtatggtcacgaccttgtctcttacgcttctgagagaagatgtgatactcaaataccaatgtaatcaactttgcggtacttttgtttaacttgctaattattttttctttctgtgcaatatccaggcaacaactaaaaacaaaagcaaaaaacctggcctttttctggcctggagactcagtctctctcccccttcactctgctgtgcagagccatttctgtgggagtctgaaaaaatgaaactttttaaagatcctaagcaaatattattactatattattattatacggtgtattgagtgcccgtatttttttttttttttttttttttagacagtcttgcttcgtcgcccaggctggagtgtactggcacaatcttgactcactgcaacctctgcctcccaggttcaagcaattctcctgcctcggcctcctgagtagctgcgatgccaccacccctggctaacttttttgtatttttgtagagatgggatggtgtttcaccatattggccaggctggtctcaaactcctaacctcaagtgatccactcccctcagcctcccaaagtgctaggattacaggcgtgagccaccatgcccagcctgagtgcctgtatttaatgtacacgatctcatttagtcttaaaaaaacccctgtaaggtaatcatcgacaaccacattttacacaaggaagagattttgagaaactcgatagcatgtctcaagtcagacacttagcagcaaggcagagtccatttcattttatgggactagtctgcttcccagaataatcatcaaatgcaaaggaatttaattatctgcttaaaaaaacaagcccccattattaccacagttcacgtctgaccaattccaagatgttcttcccaaacttgatatgaacacattgacgcaattactggcgaaattgagcaagagtatgtagtagccagggctctgtgggaaagtgacagaaaactcctattggcaggatgtcatcctgcctgccagggcccctcacttacaacaattatctaaaacctagcattagaaatgagaaaccacctgtgtggtaaccctggaagcaacctgtggttgccttgggcctgtgggcctgtaggttacaggtcaaagagaagtccagactaggctcagccagctgctatgaggaatgcaaactcacctactcaagctctctgcctatgctgaaacaggctagaggtcagagttcagatcatctgggcaagataattgagactcaggctgctaccggaagtaccagaaatgggcaacgtggtgttgactggttatattttagccctctaacacccagagtacacaagctctctgcccctgggagagatccctgctcacctaggttttgggtacccataccaggaggaggctagggggaagggctctcggtcacgatccacacagaggaagaaatgaacacacagtgacaatttactgagggcttaccctcattaattaagcccttatttaccattgttcacaatatcttccaaaacaaccccttgaaagggtgaccatttattatcccagaagagaaatatgaggttcagagagaagtcacttggcccaaacgatcaggagaaaaacccactcaggagagtggctctatggcaagacacgtgaaccgagaggtcagtctccttccccaccgggagcctcacgtcagtccccaaaagggagtggattactcgaggtccctaccagagttctcagtgcaaggctgctcgaagccctaagcagacccaaactccaaaacttcctgagcctcgggccacagcagggaagtctccaaggccttctctggttctggggctagaggggcctcgggacttccctgtgcggtcccggccccacgcctccaacaggactccccagggacccacctcgcaaaccttctctcccatccagtcccaagcctctgtctgggatttaaaactctgatccagaagagggaggctggctgtcgtagaagagccagcctgagggaatgtctgggggaccctgtcggggaaatccgggggggtcccaatcctccgactggcgccgacccgagtccttaccaagcagcggggactcctcagggcaggcgggcagcgacagtgcggtggtgtggggcactgggaccgaggtcaagttgctagcggggccagggccagaatccacgactgggctggagtcgccacccgggcgcggctgggaggaggcgcctagaggaggcggcggccgggcccctccggtccggagctccccggaggactgcccgatggcggcggcactgttcgagccgccctgcagcggtgtggagactccgaccagttggggcaggcggctcaggtcgcggccagccaggtagtaaacgagggtgacgccaaggtgcagagcgcagacggccacgagcaggcggcaggcccgctgtagggacgcgcctggcatcgcggcgctgccgctcaggagcggctcccgaagcctcatcttcccgccgccgctttaagaagggtgtgggctacaggaggggaggcgacccgcccgcgggccgcccgccaggcgctgccccacagcggcgactaggggagggcccggagcgggggcgggcgagcggctgagagctgagactcctccagccagccagacctgggagcggcgagaagccgcccgaggcgccggcggagaggggaggggcggggccccggcgaaggcgggggcggggccgggcgcggggttttctggacgagggcgggaaggcggggcagcccgtggcgggatgggcgcgctgggcggggcctcgggagggtgggcagcgggcggggcgccgtcgtggggtccccggagtatgactgcagctccgacgcttggccgcgcaccgccctcttcctcccgagcctttgcggcggagcttcggtcgcgttgagccgcgcctcctcttcctcctccacgctgccctcgacaggccgcgccacttcctggggtgcgaagggactcgggtgcgagcctgggcctgcagcgcggcggcggagagaacggagaggacagctggcgggtggttatctggagtggtttggggccgcggcggcgttctggccagtgggccttggtgggctaggaagagaggcagaaaaaggttacccaggaaacgggcttcgacgccgggcgaggagtggcacgttcgaaaccccctccctaactcagcccggctggaccccgctgcttaacggggggtcctgcggcaaagaaagtggacgggttgccacttctgtgcctccccatcaggtagcctgggctataaggggctctcagaccagcttggttccagatgtgtgtgtggcgggagtcctgtatactttgaagaggagagcagcaagaagcctctaactcccaggccagcgtgcaggagatcagccggcgttacagtctacactgggctacccactgtcccatgaagtagcagttctccccatgtcgtagagtggggccccggcagattaagaaactttcctaagagcccacagctggcaagaggcagaattctggctccgaaacccatgttttctacaggtttaccctttgttgatttgcaagtaagggctgaaggctgtgtgggtgagagacttaggcactgaagccacttgacctcgatttgacccagaggcctcaggccctgagtgagcagagacacctcaccccagagaaagactcatggaggtgctgtcagtaatgtggatagggaagttgagggctctggcagccaaccatcagggaataacagtagctaccttattttgagagtttgctgtgtg

SEQ ID NO: 52000 - DNA, 3415 bp, Homo sapiens
ttagaacgtaaagtggagttctccaaggagttggtaaaggtgaagctgaccccagcatcctgtgtctaggggtaaagtcggcctggccaatgagtgagggtgggtcagattagtcctgcaactgaaaattaagtggagggggaaatggggatgtgtcttccattggtatagatgatagccaggagacaggactgcgggggttattaagaatcacagacctgtcccaggacacacgtggccagaaatcgaggaaaaggaacaacacttgctgattgcctatccctcaggaacttgcagagtccactgaggcctgagcactagtctcagctgcccctgatccacaggcacctagaagcagtcaattacaaataatacagatggcccagaaacctttgggacaacattgtccagcagtccagacattaactggtgctagtgagacagacccaggcaacctttctccccactgtctccagctcttttccactctctacttcgtcaggtgaaaaattaatcccatccggcgagacaaatgcaggaggaagttgcagtgctgattggccaaaagctggcatgggggcttggccgttggcccatccatgtgctcatctgcccagaatcaccagctccctgcttctccctgcagctggccttcctctgccctcctatggcgccctcttctgcacctgccaggttacatttctgtttttaccctcatggatcagaagggcatcaaatagtgcccggcacatggtagacagttatttcagtcatctattgcagcgtaacacctaccccaaaacttactgttttgaagcaacaatttctcgcagttttgcagttggctgggcagctttgcctcacatggtgtcagctgaggcactggcacagttggaagttccaaaatggcttcactcatgtgaatggcagttggggctgtctgggggctggaaactcagaatgggttgggtcatggggccttcattctccacttggatctctccacaaaggactctccatgtggctgcttgggtttcctcacaaactagaggaagcattccaaaaaggagcatttcaaaaatacagaagatggagatccctgaaagcccagccttagcatcacttctaaagcattcttttgcttaaaacaagtttatagggcaggccagattcaaggggaataaaactggctcggcctcttgtttttacttttttttttagacaggatcttcctttatcaaccagcctgtagtgcagtggtgtgatcataggtcactataacgtcaaactcctgggctcaagtgattctcctgcctcagcctcccgagtagctgggactaccgggatgcgcctccacgtccagctaattttaaaatttttagtagagatgagatgttgcgatattgctcaggctagtctcgaactcctgagctcacgcagtcttcctgctttggcctcccaaagtgctgagattaccagcatgagccatttcacctggctgactccacctcttgatgggaggagggacaaagaattgtcaggcacctttattccacagtagtttgcccaatggccacagattatttagattcttctcacaggtaaaatacattagtgtcttcttaaaatcccccaaaagttcaactaattaagacttcaggtccaaagtattgtctaaatcagatccaggtgttaccgaccaaagcgcaaaagcactcactgcccaatgttctagaaaccaatactgtgacacctggtttttgagaaaagaaaagctttgtactgcaggtaggccaacaaggagatagaagagtccagctgaaatctccctgtggtgactttaggtctccctgggctggctcaagtctccctgggctggctttaaggtagtgtttttatcagaaaaattttggggggtggattctgagattagtaagtaactggtggaaggaaaggggaggtctggaaagtcctcagtcatgcacaattatttcttcatgcctcttcactggtcacatgtgcaattcagggggatttagaatgaaacgtggtggaaatttgggttgtgacaccagaaagctctttctgtgaacagcccagttgccctgtttgttccaactgatttcagccagttcttttatctcaagcagagggagttttggcatttcagcacattgtttcttttcttatctgccatcctgcaaactcaggaatttctgttagtcattgttttctttaactctttgggacacagtttcacaggtatattcctcaggttcagggatgggagatacggatagctgggtgcagtggctcacgcctttaatcccagtgctttggaaggttgaggtgggaggaccacttgagcccaagagtctgagaccagcctgggtaacatctctaaaaaataaagataaaagagggacctgtggattataaagacaaattacctcattccttttttttttctcccttttcctgagaaattcagttaaaaagtcactaggtagggttgagcaacataagagtccaaacagcatagacagggtgtcaaagcccaaccaggatagggaggggtaagggtgggggtggggaggatagcagcccagcaaagagggtcaaagcccaggagagcaaaaagggcctcaggacctgagcatggtaggaagtctcctgtgaagtagggcaaccgagtacagggtgttgaagccaagatgtgatgaagagagtgttgaacacagcaacactgattaaaaagtaaccatatggtcgggcatggtggctcacgcctgtaaacccagcactttgggagtccaaggcgggcagatcacctgaggtcagcagttagagaccagcctggccaacgtgttgaaaccccatctctaccaaaaatacaaaaagtagctgggcttagtggcacatgcctgtaatccacagctactcgggaggctgaggcaggagaatcacttgaacctgggaggcagaggttgcagtgagccgtgatcgggccattgcactccagcctggtctacagaacgagactccgtctcaaaaaaaaaagcaaaaaaaaaaaaagcaactatatatagatgagagttacccaagtttctgacagtcagaggagttacaaatatagacagggagaaaactaaaatgaatcctttgatacattatttaaatttgagaaattggtgtgaattcattattttcaatatagtgatagatgaaataagaatggtgtgtgtgtgtgtgtgtgtgtgtgtgtgtgtgtgtgtgtattgtctgggagcagaaatttcccaaggccatgagcacatctagcagccaagtcttggtttctaaacaccattctccaataaaaggacctaggtattcttggagaaaaggctgattgctgattccagggactggctag

SEQ ID NO: 52001 - DNA, 1905 bp, Homo sapiens
ttggcctggagcagtggcgggcgcctgtagtcccagctattcaggaagctgaggcacgaagatcacttgaacctgggaggtggaggttgcagtgagccgagatcgggccactgcactgtccagcctggcgacagagtgagactctgtctcaaacaaaaaaacaaaagaaagagactgatgaataaacacagttctacaacaagcaggacaaagtcagagagggagagaaggttaagagcctagaaatgcaggtcagtgtgagtcccccaggtgggtaggtaggagagaggccattcctgataggagtgaagtttcaggaaccagaaaagaaatttccttcctgcaggcagagtggaagccacctggttcatgctccctggctgccgggaattcctcacctgggaactcccctcaaccttcttgtttgtgtaggatcagccatgccagaatgcaccttgttccagtcaagctctggggccacggtagccctgctttactgctgcctgcggtctgggggagctgttcccagctggctgccactctgcccattttcctaatcagcatgccactccccaggtccccagcctggggatgtgtggcttggctgagctgcaggtgggtcccgaagtccatggcgatgatctgtgcccagtccttttgttccaggtagacgaccaacttgtcctgcctttcccaggaccatcccagttataaaatgaaaagtcccaaatctcaagaaccctctcagttctggggaaactggtagggttagtcaccctaattatagagaccccaggtcctcagtggaaactgcctgagcattgtgccctgaagacagcatcccaaccctgaggaccccagacctccaaactctaccctcttaaggagtcccacacaactggatattcctgaaacccccatatctctccatagacctgtgtgcagtatgagtcagattagattctgaagcctcccagtcttgaactgggtgacccggacatgttacctaacttcactgtgtcttatctggaaagtaatatccaaaatagcacatgtgcctcatgggatcatgggagtattgcctgggaattcccctcgacttcctgattgtgtcaggaccagccatatgccagaaagcaccttgttcccatcaagctctggggccacagagtccctgccagctgaggctgtagtttggccccatagaaagttttattctctcagctttaattttcaaaatattctgactatataaaagtcagcagttactttcatgaccttaccctaatctagtcattgcctcctccttcccatggcccacctcccactctgttgggtacacatcagagtgccagtggtatggcacagtttctgcacaggcagtgggaggacccaggctgcctgcagaggcttcacctagtccttcctctctctggtgttagaccagggcccgatttctgtaatctccaggctgaatccctggagggggaaagctcatggagctagttagaagggcctagcaggaaaggggctgtcaaaggacttcagttgcttggccagcactctgatacgagcagaggaccctgcgtctctggtccccatgttcttacacctgtcagcaagaagttccagctcaggagggactgtcccctgtgaaccctggaaatacggaagaggcatgagcacattttatgcatgcacagtgggggcagctgatgaagtccttgcagccagctctcccacctgacaattgtcacatgggggtgagggctgtctgctcacaaaggcaacctggcccacatagatttcttaattgctgttcaccacagagaagtgtatacactaatacgggcattgtatgtcccaacgacagcaaatcccaaagccccggtgctgggtttcagg

SEQ ID NO: 52002 - DNA, 2439 bp, Homo sapiens
tacgaacagcagagcctttctttctgaagaagagacgccaattcttttccagggatgcggacagcaaggagggagcctgtgtacagtacattacaccaaggtttggttcccccaacagctccgtgaggtcagcaggagccagggttaccaaatctacttcacagaggagaaaccggattcttagaagaagccgtccatcccaaggtcactcaaaaccgcaggatctagaatccaggtctccagattcccagacccttgggcctcccctagctggttctagagaaacctcatggactcagctctccggtgtactgacttcatttggtggtgtgtcaactccaacagtaggcagacccaaagggtgcccagagtacaacgcttggacccacggccaactcaagcggcgcacacggagaaggcactcagcacacgaggagcaccccggcatgcacgaagttctgacttatcacacacggagcagtcgtagaccacatggcccaatatatgcctgacacaaagggcacaataactgcgcgggcacacaaacacaaccaggcccacgacgtaaagcacggagaagctcaaacacccaggatcgcacaaatgaccagagacaaaatacaccggccacatggaaaagtgtacagacacaagcccgggacaaaagacagttccacggacacaaccaataacccacgcttccggacgccaggacaagcgcaaggtcacacgcttctggaggacacgtgactaaacccacagaccccgccgggctttcgggacctgcatggagcccacctggcgcccgacactcactgtgggtgacagtcacggtgagcccagctgccgccatttcctccctggtcacctcctcgctccgggtcgactcctcgtcccgggtcacctcctggctccgattcatctcttcgccctgggtcgcctcctcactctgggtcgcctcttcactccaggtcgcttcctcactcagggtcaactcctcgctccgggtcaactcctcgctccgggtcgagcggcgccgggttttcttcttcatccgcggcctgcgagcgccggcggcggcgcccctggtgggtcggtcatgcccgctggcagtactccgggcaggtggacgcccagagggaggcggaccacgctgggccgggggctccgactggcgcggctcccggcctggccgaagggcgcgcagccgggaacccagccgctcccggtcgcctcgcggtctccgcgcccccccgcgctgagccaggcccgcacttgttgaccgcccagcgatggaagctgagcgcggcgtctcacaaccccgcccgactacttcccagccccgccccggcctgccggccccgccctcgccctatgccgcgttagttgcctccaggccccacccactcaactgaggccccgccttgctacagtaaaacccctcccactccttctaccaacaccccgccccctgcaggctctctccgagagcaccaagtccttttgctctccatccccggaagacccggctgaaaatccggaaaaagaatcgggaaacgccaggaggcatattgcgcttgcgcacggaggggccggaagtcgaggcgggagtgactctgcttccgtttctggttttgctctagtgtttgggtttcttcgcggctgctcaagatgaaccgactcttcgggaaagcgaaacccaaggctccgccgcccagcctgactgactgcattggcacggtgggcatttgatcatgcataagtaggctcaggacctctgacacacccgaccccgcccacccccagccccgggcccatattcttccacttcatttcgggtcctgggccccttacacgtcgtccctctctatctcaccttctccccttcatccctgttacccaagtcattcctaacgccacaaaccagggaacccctaaccccatcactgccttgccctgccagcacccaacccgttttgatgcccattgcccgtccactcgctctcgccttgatcctctcacctcacccagccctaggcccatacacccttcccacctcatcctgcctgatcccttacccttcttccatctgtcatccccagtccacatcaggactcagcttgatatcctaggtcaacatatctgtgccttcgtcctggatctcagtaacacaaaactcagaaccctagcccctcagattaagccaccatccccgatttagggaatggcattagatctacaatcagctggtttcacttggcactggcccatttcatgtgcctcttggaggaactctcagcctggctagtctctgattctagggaaattccaactcaactcagtgattctcaaattattttctgccccaacccacttgaaggctacctggtatatcagaatcggggcagtgtggcggggggtaagagaataatttataaa

SEQ ID NO: 52003 - DNA, 2654 bp, Homo sapiens
ttggcaagtggctgggcctgacggaggccaaggggcagaccggggctccagccagacccccgaaaggaagcaggtgctcccccacttccaggacttagttggggcggggggcccagctcctgggcctagggtcttctcacccccacccccttgtcctgggtaggcccctgcctgcccctctctgccttttcctcgggtgtccctcctcgagcccctgcggcactggcttgggtggcagagcccacttgtttcagggaccccaggaggtggtgccccctggctcctgggactgtgtgtgggtctggggggtgggggggtggggagaagcgtcgggcagggggtgcaggggaggaaactcctcaccaggaaagccaaagacagggttgtgccttacctcaggagccacccgttcccccttgccctgccgttcaccctccacctttccccccgggcggcctgctgctttttccttctcttcctcccctgccctgccctgagctgcatggttcccctaccctgggaagccaggaaggaatctgaatggagaatcaccaaccaccaaagaaaaaaagactgcggggccctcccctgccaactccccttccctggccgcccactcacccacacctctttcacgcaggacaggctgcccaccctgtccacgtgaagtgccaacgccctccccaccctgggccgagcccccacccctccctgggcccccaagtgagattgcacatttaactactgtaaggagaggagcggcgttggcaaatgtgaaccatgagaatatcggtgatactgatgagaataaacgcctttgtaaaaaaaaaaaaaaaaaaaaaagtctggagccaggcgtggtggctcgcctgtaagccaagcactttaggaggccaaagcggcaggatcgcttgaggccaggagttggagagactagcctgggcaacatggcgaaacccgtctctactaaaaatagctgcgcatggtggctccgcctgtagttccagctaccggaaggctgaggcgggaggattagagactgaagctatagtgagccatgatcagaccactgcactcaagcctgggtaaggcagcaagaccctatatcaaaaaataaaaaaaggaaaaccacaatgattacgcaagtcgccgccctccctcctgcgattgttgctatttccatccagctactagtctcctcctcccgcccgacacctggcgcgtctatctgacgtcacgaacgcgccacacagattcgggctgcgcaacctctgtggccgtctacacggcgcgcagatgcgaatattctcgcggcgccggaagtccggggcacgtgacctggtgacagtgctgacttggctgtacagctcgatctaggttctgcggcacgggatggcggaggcgcctcctgtctcaggtattgtcccggcccgagcgggactgggcccctttcagggagcggaaattgggtcagtgacgaagttctagggcctcagccactcatatcgcgagagtagcacatgctagggcgtaggatagtggctcggaagggccaagccccgcgcatcgtgcgtacgaagatctgtgtcttcttggactagatggtgaagcccagtagctgggtttcggaggagagaggacttgtcccggcgctgcgagtcgatgtgggtgccctgccttcccacaggctgtttctggggcagcggcgcactgaccttcgacaggcgggcgtcggccaggtcacagccagtgacggtggcgggctcttgacgtgtagggtgtggtgtgctcataccgcctggagtggtggcgtgggcgcgagccgaattccagtagtttagagtctcagcctgctgcgaaccccgtgtgactcagtctcagtctcctcatctgtcagttgggagtagataagttaattcctgtgatggctcccgccctgtactgtacctattctgtaattgttcactcactccccctcctggagttgcctcagtgtgtagagacagcctcatttgttcgttgatataacatccatttcctcagggtgttccatagatcagtgttttccaaatgtgttggacagcaaccaaaagaaacattttgcatcgcgaccttaaatattgtacacttacataaatataaaagcgaaccagaagtttctggaagcagtgaggttggttggtttgttttacaatcagcaatatattctgttttctgtttcgtttaaaaatatgtcacagcccactgccttcatttgattttatggcccactctggaaaacagggcagcagtttgcagaatggagtttggaaaccattggtttgaatctcagctctgtccctgaccagccgttggggcaccaagaagaccatatatgtatttgtatactgggtggcaggtaaaatgtatttattactatggttcttagtttaaaaagttagggccgggcgtggtggctcacgcctgtaatcctagcactttgggaggccgaggtggacggatcacgaggtcaggagatcgagaccatcctggctaacacggtgaaaccccgtctctactaaaaatacaaaaaattagctgggcatggtggcacgcgcctgtagtcccagctactccggaggctgaggcaagagaattgcttgaaccctggaggc

SEQ ID NO: 52004 - DNA, 1281 bp, Homo sapiens
tgaagttaaaataagtgataagtgacttaaacccatgtcttccaggtcttaccaatttatagtatattctgtatgctacacatagttctgactttgctactaattttatgtccttaggcaaaccattttgtctttgtgcttcagggactgaattgactgtaccaagaagcatcttctgggggaacatgagtgggttgaaggggagtatgcttaattttttccactttgggattgtagaccagattatagaggttatgtatggaaaacccaaaatatattcctaggggaaagagatgaaaactaatacacttattaagtactatctatgaaatcatatttaaatttctcagtaaccgttgaaataagtattgtcatcctttaccatagacaaggaaactaaggctaaaagcaggcacgtgatatccctaagttcatacaataagttggacaggtggactttaacccattttggcttagtccaaagcctgtttacttgatattacacaatgctactttactgttttgaaagaagaccacatggaacctgatgattgatacccctgaactgttagctggccttaaatttttgtaataaaatgaatagatgtatacatagtactttatggcccaggtgagcatttttactcgacaacacttagctgtcattggctattggtgtttggtttttggacatggaataatgattgattagtcctccacaagcaccttgaacccatcaccttcactggaaacatagttcttacttaacagcatgttttatacaaagttctaaggaaagtaatttttagatttggcttggagtctatgagtttcatggatgaagtttaatctctttactggcatgtctattttttatgtcctaggtacttttaaattcaatacagatgctgctgaattcattcctcaggagaaaaaaaattctggtctaaattgtgggactcaaaggagactagactctaataggattggtagaagaaattacagttcaccacctccctgtcacctttccaggcaggtcccttatgatgaaatctctgctgttcatcagcatagttatcatccgtcaggaagcaaacctaagagtcagcagacgtctttccagtcctctccttgtaataaatcgcccaagagccatggccttcagaatcaaccttggcagaaattgaggaatgagaagcaccatatcagagtcaagaaagcacagagtcttgctgagcagacctcagatacagctggattagagagctcgaccagatcaga

SEQ ID NO: 52005 - DNA, 1221 bp, Homo sapiens
ttggcctcccaaagtgctggtattacaggtgtaagccaccgtgtccaacctgttacagcctttttgagaggactaaataataatatgtaatgtgcttgcaatgttgtatttaaggttaattttattcttttaacttatttagacctgaaagcaaataacaataatattatgaaataaatgcagtgctaaaagtatgtactcaaaaaagcatatacacacactcacactcagttttgagagtatctggctgtattgaaatctagaaagactttgctgcaattgtgtttgaggaaaaaaatctggaagtgggtgaaggtattcaggaatagatctgggaggattattctgatactacacactggtctgtgtcactggactttgagctcctggagccagggactgtaacaccaccatggggcttatggtaggcaccaagaatatctttgttaagtgaatgactaaagactttgagggcaacggctagagccatctcaccactcatgggttgttggaacctgcccagacttgggcttcttatagctgacactacagcttcacgagcctctttctaacctaaatccatggatctgatagatttagaggatcctggaaaatagaaaatgcaaagcaagatcctgtattgcccagtggatcctcaggctatgttacaaggggcatttggctactctgctgttttcctgggaatgtttccttaattgtgggaatccccacctgagtgtctccttcctaaatcctcttcctcagcaaattcctgcccctttttggcctcagtctgaatagccagctgccttacccagaatcagatatcccttaaaatctctgtgtttggattcttctcttgagtgacttgctgatccttggttgattaaagtgaggaatggttttttgtgtttgagttaatcttttttgttattttgttttttaaacaggttctctaattgaacaactaacaacagaaaaatacgagtgcatggtgtgctgtgaattggttcgtgtcacggccccagtgtggagttgtcagagctgttaccatgtgtttcatttgaactgcataaagaaatgggcaaggtctccagcatctcaagcaggtcaattaattctctcttctgagtagttattctcccctatttgatacgtttaagtattattaagcccagctttaaaaatacagtttaatttctcttaactactttttctgca

SEQ ID NO: 52006 - DNA, 1791 bp, Homo sapiens
tagatgagagactctaaggcagtataagaatgtggagtgaaggtcaagatgatctgaaagtggtaaaatgatgtgagaatgcacataaaggccttatttgcagatgactttgccccacactgttcttccaggggaccattaatttaacatgtttttattgagaacttattaatgttcaaggcactgtgaagaaacagaggcgaataaaacggttaacttaccagagcttacagtctaagagttaaaacacaattagcctgatactctgctagaagtacaaagtactatgggagatctttggggtagttacgacttacagctggatgattaagagaagccttcttggaggaggtagaattgaactggcattgtaaactaggtaaaatctttgtaggcagaaagatatgttgaagggaatagcataggcagttcaaaatcaacagggtttagggtatattgggagaagagtgattcatccacttacagagcccaggatctatgatggtaggggagtgggagatgactggaaaggaagggctgaccctttgataccagtctcagatgttgggacttcatttggaaggctgtgggaagccactgagggcatcaacatgattctttatggagattagtttggtagcagtgagtagagtattttggagcctaaataatttgggacttataatccagatgaagagtagtacaagcctctaaggagtgtgatagaaaaatatggtgttaggttgattcctgacagtagtaggaatgggagtcacccaaagtttcatgcttttggaaatggtgataccaaggaaaagggcaggtcaaaagaagaaggtctggtggggacagtgactacagtttagaaatgttgagctggaggagtgagcagaacatacagtgaaatatgtccaacaggcaggtagcaatatttgaggaaagaccaggacttaaggatgagaatcacagctgagaggagtagttaagaccctagcggatgaaagggtacagagtgagaaaagggtgtaatgcagaacacttgcaggggaaagaaaagcaaaaaaccccaaaacatcatttggagtcagggacaaaaggtagagctcttgagagatgttagaggaaaaccagggcactgtattggagcaaaaaagcacagaggcagggaggcttttgtgatagtctggagatgaggttttggccagttagagaggcaggaacaggagagcgatgaggtgagagccactttgtaggaaaaattgacacaacttggtgattaagtagaaagaggtgtcagagatgactgtagtttttgagcgtgtgtgactctgacagagttgacgtcactgacagaaataggaaaccctgaaaagggaggagttatagagggaagatgtgaactttgactgtggataaagccagtttgaggtgactgtgaaaccccaagcaagaatgttcagcagacatttggacatatgggtctgaaactgaagattcagggcaagagagaaaatgtggatttggggatcaatggcctttaggtggattgcacctctcaacatgaataaaatttctgaaagagatagtatagagagaaaagcagaggccatggactggggatggctgcaatttagtgtgcaaattgcccaagtgaggatgaattcctcaagggcaaggaggaatcctgtgccttcgttttactcttccctgtctctgctgagtccatggaagatgtgccatgaagatttgcagtgacattgattataaaagtataaggtcttttatgccgac

SEQ ID NO: 52007 - DNA, 1114 bp, Homo sapiens
tggatgaatatttttctaaaatttacatttcatgtttaaacagagtttactgaaggtgttgtaatttttctctcattgacccagagtcatcatttttatgaactccagttactgtattacactgaatgcagtggtgcccttggcctgctgaggtttctcagactgatgccccataccaatgagcagtttgaattgttgtatctgcttgttgaagctttttgttgtttatattcttatcagtgcttttagtatgcttgcctgtctacttttagtaattccccctttcttctgatttgtggcttctgattacttgaatatagaaaccagaaaaagctcattggaattagatacaaagtaatactatactgagcctatctgactcagtcttttgggaatgtatgtctgcagttttgcaatgacttggcaacttctctcctgagtgggtgttgaaaggccatgcatttagaaaaaaatggaaagtaggcaactgagattgaataggaaaattatttctaaaactaaccatgtatcttgtgaggtaaagctagaatctttaggtttggtttccatttcatcaaaaggagagagttcacatttctttcaagtgccagcgtgaatcagtgggaacaccctacttaatcctttttctcaatctgaccttaaaattgtgtatagaggagaagtgctgtcttcttgtattttaatatacattccagctgcattaggaaagccagtcatctgttggttctctgcttgccatgaaaatgtgtttatgatatggagatcaaatgactagtaaatcaaatcccctttcggaaagcacatgagtcagttttataagaatttcacatataatgaccagaaatcctaccctggcactcatgtatcctgttggtgatgagagaagaaggaaatgtgaaatgggtaatgcaaagggacttgagcaagagaagggtagtaactggcagtaacagaccttgggatgggacaagaccaggttaagggataagagggtacctgctatacctcagcaggtatcatggaaaacctttaaggaaataggctgagttgactgagaagctcagagacaagcgtgtggctagcgataacaatg

SEQ ID NO: 52008 - DNA, 3067 bp, Homo sapiens
tgaggaaaaagaagatttattctgtgtttttgttatttgttttgaaacagggtcttgctctgtcacctagactggagttcagtggtgcgatcacagttcactgtagcctcaacgtcccatgctcaggagattttcccacctcagactcctgagtagctgggactgtaggcctgcatcaccactcctggctaatttcttgtttttgtgctttttttttttttggtagacacagggtttcaccatgttcccaggtgatctcgagctcctggggtcaagcgatcctcccacctcagcctctcaaagtgctggaattataggcatgagccaccacacttggcctttttttgacttaggcaaatcgtcgtatactttaaagcatattccagtgtctaagctgggccctgaagttgtcagaaaaggcccagtctgccagatgaagggaagatagggaagaagcattgactgcatacttccctcaactctgattctggagttgcagggcatggaggggaagaccagtgtggctagcaaatttgggagtatgaaaatgagtagttgcagttttcatttccagctcttttcgtttttattaaagatttcattcatacctgtgaaaagctctgccatgaaggagactgtggaccatgctctcgcacatcagttatttcctgcagatgctctttcagaacaaaggtaaatcctaaacaatgctagagttgttgccatcaatgttttctttaaaatggtgattatgggaggggaggaatcaaaataacctcagtagattaggtatgggaagtggttgtggcactcaaggtccagaggcctatagtgggataaggcaaatatacagatcactctaccaaatacaggtgtgatagtctgaaaaggggaacagtagcactgttgcaaggagtcagccaactaagaagttagaggaaacacagtccatatgaccacccacttgtggcaccaacttttgataccaattgaaagttcagtggtccctaagaccacctgcgaggcttgataatttgataaaaggactcaccgaacttgctggtggttacactcatggttagagctttactacaaggaggttacagttttattacaaggaaaaggatacagattaaatcagccaagggaagaagtatgtaggacagagtccaaaaaaataccaaaggtggaacttcatttgtcctttccctgtggagtcaggaaagtattactctctccgcttcagtgtgtgccagcatacatggaatattgccaaccaggaaagttcacccagacctgtgtgttcagtttttattggtgctctattgtgcaatcatagttgactgcccatgtggctaatctcagtctccagtctctcccgaggtgtaccgataccatgtgacccaaaacccctgccctaaaactatccagtgtggccagcctgctcctaaatcacgtaattggactatccagtgactcaagactccaggcaaacaatgacacttatatcaggcatggcattccactaggcttagagattacctctcagaagccaagcacaaaggccagactctctttaagtaaggtttaattcttcactgtacatctgttttgtcagtttctactttctggtgaaagcctggatggtttttatttttctttttttttttttaattttatttatttattttgagacagagtctcactccatcacccaggatggagtgcagaggcgcagtcttggctcactgcagcctccacctcccagattcaagtgattcttatgccttagcctctggagtagctggaattacaggtgcatgccatcacacccggctaatttttgtatttttagtagagacgggattttgccatgttggccaggctggtctcaaactcctgacctcaagtgatcctcctgcctcagcctcccaaagtgctgggattacaggtgtgcaccaccactcctggctaatttttgtatttttagtagaggtggggtttcaccatgttggccaggctggtcttgaactcctgacctcaggtaatctacccgcctcagcctcccaaaatgctgggattacagacgtgagccactgtgcccagcctaccttggatagttttcatcagactttatgttataaaaagtcttcgggtgattcagcttggggaacacactgagtgttgatttatcctgctctttgacctacttagtcattttagtgtatatcaacatttgtcccagtagagtacaagccagggtggagacagaattgtgaaccgttggttctgttaaacacaatgcagggtctggcagcatctgacttgcgaataattctgaggatatagtccataaatgggaagctagtttaataggaaaacttcagaaaaaagggaaaagtagtataatttacatgttacaaaagttgtgtaatcatatatgggttttttcctgaaagaaattacaatatacataggataacagaggcatttttgaatgtcaggtatgggaccacttttgtactttgtaaatactgtattaaagactgagatgctgtgatttggcaatcataaatttagtaatgcccagagatgctctttgtgatctgtgtgactgaaaattgtaagcagggttgggacatgtaagctggaagtggctgctgtcagttttcttcattctcccacaatccctctttctatctctacgttttcttgcttctcattgactctttgtcctcactccctctaatagtggactccatggcagtgagtgtattcttgaaaagctatgtgtaagttgaatttttgcaagtagaagtccttaaattgcaggaggagctcactgtcaatacaaactctgttaaacctgtttgacaaagtaaaaaaaaaactcttcaaaaagctgataattggctgggtgtggtggctcacgcctgtaatcccagcactttgggaggctgaggtgggcggatcatgaggtcaggagattgagaccatggtgaaaccccgtctctactaaaaatacaaaaaattagccaggcacggtggtgggcgcctgtagtcccag

SEQ ID NO: 52009 - DNA, 797 bp, Homo sapiens
acgtaattcatccagcgcacaggttttgtttagataacttggttttgaagaacagaagtttccttctctcttgaaaaatgagcagctcaggcaacactggcctgcattccactctccatggcaacagtcagctggagtggcggcagctctacagccttgcacagattggcactctgcagccagccaaagtccccaccgccctgagttgccgctctcttggcccccgtagcatgtgatctacaacccttgccccgtgtctcacgtgtatggctggttttccagggcccggatggctccagcccctcctctccctgatcagtgaatgtggcccagcccatccaactctcccccacagccaggaggccagctccaagggcaacacccctggaagctgcaacatggatcagtccacttccctcatcctggctgcaataaatggggccaaggtcacactagcttttttggcaaaaccttcaccctggtgactcactgagattcctgtatatatatataaaaacaaaaacaaaaagccctcacttcttggcacagcctggcaactaaaaataacaacaacacaatgtccgatataggcttacacctcacaaagttcttttacaagtgctactgtcttcaatcctcacagcaaatctgcacggcaagaatttttctcccactctataaatggggaaactgaggccgagagaggcatcttgaactacctgaaagtgaggaccttaccctggctgggggagcattaacaagccagagtcttcaaaagctggcaatatttaagctaa

SEQ ID NO: 52010 - DNA, 685 bp, Homo sapiens
cacgcccctacccacaaccctggcccctagttgagcctctcactcctttcacagcagctgaggcaacccagccaagagcctcagtgagatgggtttgggtaaggtggaaccttaacccccagactcccaacctcatcctgttttcagcacccatgagactggctctagcaccccctgctggcagccgaagctgactcctttagcctgagtccactggaggtgtcacccgtgcgtccccaactccagtcccctcaagggctccacccggcccagcccacatgcctttgttgtggcttccaagttttcttttccacgtcacctgcgctgcttgctctctggttttgttgactttagtgctgtctctgtttgctctggctgagccaacagcctcaggatgaaactctgagcccaggaagtgtgaacctgagaggcagcaggctgggggtggggacggaggcaaatgagagacagggtaagatctgagctggttcccgggctcaggctggagttcatggcagctcactccagcagcagggtcggggcccatgggcagggatgggtggaaggatttttccagcctcactgagagcaggtcttggcctgtcacatcactgttttgaagtttatttggaagctcagccccagaactctaatgcctcacatctccaggaggtctgaacccctc

SEQ ID NO: 52011 - DNA, 627 bp, Homo sapiens
caggatggtctctatctcctgacctcatgatccgcccgcctcggcctcctgaagtgctgggattacaggtgtgagccacggcgcccggccttccctcagtttcttgaaactcccttggagaacagaagatgaaatacagagttgacatgtcatgcccagattcccttttccctaattacaagaaagtgttttccctgttccgtgagtaactaactgcctttctctaagtggcctcactctgatgagtaactgaaaatgcacttctctgtttgaactttgtcagaagtgtccgtgccaaaaagctttgaaatgctcaaaagtacataaaatagaaagggaccgcaaacataaaacaggaaacaaacaagttaatcaagtgcttagcatagtgcccagcacatattaaggacttggtaaatggtatttattaactcaacagacatttatggatttcctactggaagtcaggcactatggggacttggcagtgaccaaaacatagttactgccctcccacagcgtcctgcctggtgggcaagacagccttaaacacatgattacacgaatggtggttagttataagtgttaagtgtcaaggtactggggggctatcacatcaggataagg

SEQ ID NO: 52012 - DNA, 1172 bp, Homo sapiens
ccaaccagcccatgagctaccaaggcaactcggtcccctccctgcgttcccctcacacgtccccagcccatacctggtcaaagaagccattgatcatatccaagtgtccagaggggtaggtagcaaagatgccggctgtgccattggggcccgaaacaaaaagctggttgtcggcgaagtgccagattgcatctggtgacagattagacacacagtgagtcgggggagaggcctgagcccagacttccctctcaggtgtgccctccccaccctcccatgagttatgggtaagtagcaatactgctgtattgcagcaggcagagggggtggcgtggggtggggtggagggcctgagactctgttattgcccaacttgtttctttcccttcgtgccccctaccttgaccctgtgcgtgaatgagtgagtcatgagcccggggcctgggcaggtcctagccgtctgtcatcaaaaggcctggtgccagcaggtcctgaacagagggacgggggtagtggaggaggacagggtggggaatgcttaccataatacagcccaaaaactattccagcacccaagaaggctcccagcgtctgtgccagggtgtagatgggcagcttgatccagggctcacgagccaggaagcacatggcaaaggtcacggcagggttcaggtgggcccctgggcagaggggacaagggacctattagctgcagcctgccacagtcggcaggctagggtcccctgagaaggggtgcagagaggggtttcttgcacaggatggcggttggtctatgtaacaggtcagctgataatctctgattccaaggtgagagtcgaaagttctaagtgtcaagtttcttctccaccctcctttcccaaggggccaaagcagaggccacagctgtgacctgcccttaggaatgccaggacacctagtgggaatgctattgagggccaagggctgggggcagggttaaggccttaccagagacctggccagcgatgaggatgcccagagtgacagcaaagccaaaggccaggttgatggtgaggaaaccaccgtgggtgccccggctgagcacaacctgggccacggagccacagccaaacatctgtcaggaagaagaacaggcagggagggtgaggaccagcaactctcactccagaagg
